United States Patent Application Publication US 2013/0096032 A1 - sequence listing, part 30

SEQ ID NO: 1057 - DNA, 91567 bp, Arabidopsis thaliana
aagctttcaatgtatgcaataaagagtagtcatattttttaataataaaacgcataatcttgaattaatgtttataaaataaagagagggcatatgttcgcatcaatatatcctcaaacatattggttgcaaaacataacatataagtggctaggaaaacacttaatgttgtggtagttagaaactttagtggtggcttgaacgagttaaatctattgaggtattgttacatctaacttgttcaaatgactatgaaaattcctaaccataacaaccttaagtgtcttctcaaacacttatttgttatgttttgcatccaatgtatacattgatcaataccaatatatcacaaagctctttacaaaatagcaaataaaaattatgagatttactactaatgtaaatataaaaattcataacagtaatgcgactaatctttattccatattttataagtatcttacttcgaaagtgtttggcagaaaaaatatcgagggagagagagagagttaccaagtttgggaaattatcgagaagttgtctaattctcatactctcctttggatgcatgtaaaggctttcctaccaaacatgcaaaatgcttttgtcaaaacttcatcaacaacagaaaaaatcttccacccgcgacttatgaaacttttactaacctgaggaaaaaaaagaaaagaatgataagtaaaaaaaatagaatattgttagctagctacaaagaaaaaatatcttgtggatagtctaggaatcctgataccgtaccttttcatatacttgtttgagtgtgatacttagaattgaacaagtaaatacatacatatatatgagataatttatggttctgccactgcatatcagactcttgccaacttatttggcaccattattaatctaatttgcttttattgactaccatgtttgtggtcaaatatttgactaattttgtttaggaatgaacctattaaatctcttactttgacgggatattttaaggaatgtaatatattgaccaagagattagggtatgcattttaaccggagtgaacataaaccgattcaaatcgaactttcatcaatgtttttccttcaactgaacggtttgatttaattttaaatcgaataaaactgataaaccatttttatttacgtatttctagttaaaatagtattataaatccaaacacgtttgattaatgtaaaataaaatttatttagtttaatttttcctaactctaagagccctaaatctatagggaaaacatacaaaatcacattgaattacttttccttttctaatagtcttactgtaatatttaagtaactagatattaacctccggtataccgcaagtaggcttatattttagttaaactaaaattttttattgtaaagatgatttataaatatatgatattattttatttgattttaaatgtatagtaaactgcgagttgtatatgttttgttgatattatttatattgtttagtgtttaagattatatacttgtattttaatttttaattttagagtttcacctgtagtataccatcttctattataattaatatcgatctaaaccagtcaattctaggattttccagcttgtattaaaaattgaatcacatcatacacataaaaaaatctaatacgttactaattattgtaatatataagattttaaatttttaaaataagatgtatgaaattgaatataaatattcaaattatgacccgttactcagtagaaagttttcttaaatctatttttgactcgttataatatattttcatgtattgaatagtttatatttatttttaaaaattcaaattatggcatatgcaaaacaaactctaattatttttttataacgatgatattatttttttgcaaaaatagaatcatatgaactataataattaataaaaaaataatttgataatttagatatcaaatctaatttgttgattttaattggttagttttttggaaattaataatgtatttcgtttttctaattaaattaaattaattaaaatttagataatttatggttctaccactgcatatcagactcctgccaactttatttggtactattattaatctaatatgctttctattgactaccatgtttgtgatcaaatatttgaccaattttgcttaaaatgaacctattaaatctcttactttgacgggatattttaaggaatgtaatatattgacattagggtatgcattttaaccggagtgaacataaaccgattcaaatcgaaccttcatcaatgtttttccctcaactgaacggtttgattcaattttaaatcgattaaaactgataaaccatttgtatttacgtatttctagttaaaatagtattataaatccaaacacgtttgattatggtaaaataaaatttatttagttcactttttcctaactctaagtgtaacaccccaaatccaatcccttgaatccaccctatttgttttgttaaaacaaatgtccatggatcccattgaagcccaagtgaagcaagtcacaaaataattagggttttgttacatgtgtatgtatatatgcttatatcgtcatcttcccgcatccttctcacgtcatcatctccagcaactcgttactaacttaagaacatcaaatcaacttgatcccaagccaccatcaccattgacgttgagatcggagttgttggagcgtgtggttttgtttttaatcacctacaagtgtggagtgaaagcgaatgtcacggatcatcaccattaaacaacggcttgattgggtaaggaaaacctaatctatttagaaagaattgtctctcctagccattgaatttgtggcagatatatcaagttagcttttgggtttttgtgtgaatatgtgaatgaaggaagcagttcaaatggtaaaattggtgatccgtttcccgtcacgtctgaaggagtttgggcgatttcttaacggttctgaatagatctcgttcccaagttttcagaacagttttccgatccaaaatcagaggtaagatcaatcgggaaatcgcgtttaaagttggtcaatagtcacaattttcagagcgcagttttttctaaagtatctaagaaacattgtagtttcacgtagaggttttcaggatcaatttcccgttgaatcagagagaatcaagcgtggcgtgaggtgtcattgcaataatcataatgtcaagaatccatagccgctgaaagagatagaatcgagattatattcaagaagttatgagtgtttccttctgggcaagtaactgcagaatgtatccacatctgtgctaagtataaatccagaacagtgtgtaactactggttttgcgatgtgttttcccgatggaccaaaaggaattagatcacgatcaagatgtctatggaaagatcttgcttcaaggaacttagagtagctgacatcttgtccatcggatttaagctccatccgtatttgactttgaaaggttgcccagaatcatctcaagttgcagaaacctagatatcagttctgatgcaacgtgggagattcatgtgagatctgatcgagatgaaacttcgtggacttattcatgatactactggctacatattaaacggtgggatcacgtttctaacggttagttctcgacttatgagtatgttactgagacagttttgtatgaagtaaaccatgacaagtttttattgtttgaatgggaaacgggttcggttggagctgaagctttgcagaagcctttaggactcatggagtaaggtttttgttgatggagaagcaaggtggagcgcaagagtatgcagttaaagctcttatagtaagttggtctaaaaggagagaaaggagaatagagatgttattcatcttcaactaggctagggtgagggtggtatttgcgaagcatagtatcattttcttttgttatgcatcttcatgcatgatatgtaggcttagatctgattgcataggataagattatgtgatgatatgatttgatgattgttgagtatgatgtttgataatgtgaaattatgtatgatattataagtatatatatgttaagtatgattatggaagttgggtgagttaataacaaaacggtgcgttttgctctggaggcgaaaataagtgcgatttagggttttttgcttttcacgcaagttctgatgccgccagtggccacgccgccgttggtagatggggttttgagtcagagcaggtcagatacgagggaactaacagaggttggtgagatctttgttagcgaagaggtttttcaaggtgatgctacgaaagtaagtgaggttagtatagatggtatgattggtgtggaaagttgtgaggaacaagatcggggccaggattcacagagtttgtgtgagatggatccaaaggaaatgctgccaaagattggttcggtggaagtcgtgagccaaaaggaggaaaaatcaaagttccacagttcatgggtatccatggtcaaaaacgaaaaggaattggagaaggtggagttagtggtagaagaagttgatggcattccaacagcaaggataccgaacaatgtttttgaggaagcacatccattgtgggaaaattttcttgttggcagattcctcgcaaaagctccgtttgtgggaggaattcatgcgctagtcaacaagatttggactctaggagatagagtagtgaagattgatgtgtatgtggtagataaaacaacagtgagatttcgtatcaatgacgaacgtacaagaagtcgagtccttagaagaggaatgtggaatctatgtggcgtccctgtggttttaactaagtggagcgccatagttgacacagaacaagaagaaatcaaaactattcctctttgggtgatagtaaaaaatgtgccaccgaaatatttctcctggaaggtcttgagtgcgatcactagtccacttggaacaccaaataaattacattcggacacagaggcgtgtaaatcttttgacgaaggaaaggtatttgtggaagtggatttgacaaaggatctaccaaagaaattttctttcaagtcagagaaaggaggggacacgatagttgaatttgtatatccttggctgccaccgaggtgtcatacatgttcaaaatggggacatcaaaccatagattgtttagcaggcaggaggataaaccacgtgggtgaggtagcgactaaggtgcatgaaaataatgaggaagaaagaaaaatacaaacagaggttttggtgggaactgagatctgtgcaaatgtagcgcctgaagaaactgcagtcactagaaaaacagaggataagggatgagaaaaaataattgtaaccgaaatgggtatggaaaagtcggatcaggaatggagtaccccaacaaaagtaactcgaagccctgcaaaaatagagctacgttatggtgaggtatcaatcatgtcgaattctttttcatgtcttagtgataaaggagagagaggggaagctatggaatcaaatgaggttgatatgagggatttagaagaaactgcagaagctggaggaaataagttgatagaagttccaaaaaataatgtggctgaagttgtaagcacaagttcatctcaagaagtgagtttggttttgagtcaatcgcttccccgcgtctcaaaagatgaaaaaaagtttctttctacaagcaactcgcatagtactaggctaccaattcctagtactttgaagacacgtaaaaatccaaagaatttttgatgtcgggattcttctggaatattcgcggcttcaataaacaaggaaaacatggagttgttagggactggataaacaaaggaaattatgattttggttgtttgattgaaacaaaaatcaaagaaagtaaagcagagaggatagtaaattcagtatttcatggctggtcttttctatctaattatgaagaacacagattgggacggctttggctggtttggcgaagtaatgtacgggttactccgatttataaaacttcacagctcatcacctgctctatacacattgaaggacgtccggatgaattttttgtcactttcatttatgcctccaattttgtgacagacaggaaagttttgtggagtgatattacacatcatcataaatcacccctgtttcgagataaagcttggctcctctgtggagatttcaacgaaattttagagggtgatgaccactctcttcatgattcttcaccagtatctccggttggtatgagggattttcaggatgtagtccgcacatgtgaatttacagacatgagctatcagggacaatgatttacatggtgtaataagagaaaagagggagttatctgtaaaaaactagatcgagtgctagtgaacaagcaatggatacatctgcatagtcagtcatattctgtatttgagccagggggttgctcttaccatttgagatgtagattctatatcaaagatgaggcgcatagggtgaagaggcctttcaagtttgtaaactctatcacacagcacccagattaccatcaggagctagtggagaggtgggaagcatatccaccactttttcactcgacatcggctatgtttaagctctcaaaaaagcttaagggactgaaaccacatttcctgaaaatgggaaaacaaatggtaggagcaatatctcttcgcacaaaagaagcgtacacttctttatgcgagttgcaggcgaaaactatggcagacccttcctctcaagcagttcaaaatgaagccgatgcctatgaaaagtggatgagattatcagatattgaagagaagtaccttcggcaaaagggaaagctccattggttaaaggtaggtgaccaaaacaacaaagctttttatacggctgcaaaattaagggaaatcagaaacaacataaaagagattcaatgtgaagatggacgcattgtggacaacctggatcaaataaaaagtgaagcagaaagatattttaaagagtttctttcttttcagcctacagactatgtggaatggtcacgagaggatctagaaaacactttaacattcaaatgcgacgagagtgatcagagtatgctcactgctgaagtatcaaacgatgaggtcaagaacgtgctctttgcaatgccgacaaacaaattccctggtccggatcgttacagctgtgaatttttcaaggattcatggtcgataataggtgctgattttgtcgtcgcgatccaatcttttttcacgacgggtttcttacctaaaggagtcaactctacaatcttagctctaatccccaaaaagaaagaagcaaaggtaatgaaagactacagaccaatctcttgcttggaatgttctttataaggtcatttcaaagatccttgccaaccgactcaagattattctcccaaaattcacctcgccaaaccaatcagccttcgttaaagatagactgctaatggagaatctgctgcttgcaacagagattattaaagactaccacaaggatacagtctcccctcgatgtgcaatgaagatcgacatatcgaaagcttttgattcggtgcaatggggtttcttgctaaacactcttcgtgcactgaacctcccggagaaattcattctgtggatacagacctacatctcatcagcctctttctcagtgcaggttaatggtgaacttgcaggttattttggcagcaaacgaggtctccgccaaggctgttcgctcagtccttacctcttcgtcatttgcatgaatgttctttctcacaagatagacaaggcagcaagtgacaatcgcattgatttccacccaaactgtaaacaactgaaactcactcacctatgttttgctgatgatctgatggtctttgtcaaaggaaacataaaaggtgctcttgaagtctttgatgaatttgctacacacacggggttaaaaatcagtcttgaaaaatcaactctatatatggcaggagtgcctgcgggaacaacagaggagatactacagcaattcccatttgaatacggtcacttaccagttagatacttggggttacctttgttaacaagacgaatgacatctgaggactactccccgcttctagagaggatacgctcacagatttcttcgtggacagctagaacactctcttttgcagggagacttcaactaatcagttccgtggtgtttagcctcacaaatttttggatcgcagctttcaggctacctaaggcatgtatccgagaaattgataaactttgcaatgctttttagtggtcggggccctccttgaatacaaagaaagctaaggttgcttggtcagatgtctgctcaccaaaacatgagggtggtttgggtctgcgttcgatagacgaggcaaccaaagtgtgtattctgaaattaatatggagaatcatgtcagctcatggctctctattggtagattgggtcaacaaatacctaattcgcagtggctccttatggacagagaaaacaacttcgacatatggatcatggatttggaagaagctgttgaaatacagagacaaagcaaaaactttccatcgggttaaggtgaaaaatggggactctacttctttttggtttgattattggagtccgttgggacaccttcatgatactataggagatagagggtacattgagttgggaataccaaaacacactactttgggtgaggtaatggatatgacaagaaggaggacgcatagacagccgttactaaaccgggtggaagaggaaatagagaaacataagcaaaaccggattcatggtgaatatgatgttgcgttatggaaggggaagaacaactgctaccaaaagaagttcatgacgaaagaaacttggtcccaaatccgagttgcaaagcctttgttcgtaggtcacaaaaaaatatggtttccgaatgctacaccaaagtatgctttcgtaacgtggttggtggtaaagaacagagttgctacgggggagagaatggaaaagtggaaccaaaatgttaacacacgttgtgttctctgcagccacccaatggagactagggaccatttgtttttcttatgcccttactcacaacaggtttggagaacactagttcaagggatcatgcttcacaggtttactacaaagtgggaagacgtgatgaaaattcttgcaagcagagacttagacaaaggaaagcgattcttgctagaatatacttttcagaatgccatacacgtcatctggggggagcggaataagagacgacacggagaacaacagtttacaccggaaaagctagtcaagttaatagacaagaatgtacgtaatcgggtgagtactatcacaaggggaggaaactcatcgctcgcgggatgcatcgaaacttggtttgcgacaaggcaatactaaggatatatttaaaccaaaagttaagaaaagtttgcattaatcatgtataaacgtttattttttctttgaatataatttaatattaaattcaaaaaaaaaagtatgattatgagtatgtatgtatgatgtatgtatgactggggagaatcgagctatgggctgtggtctccctagtgatgtggacagtgatggaccgacgggttaacagttggtcaagaacggctgacgagcccgggatgcatgagagtgtctgagccacgagggtcagcctccactcatgaggttctggttatcacgaggatgactggacctaacgatgtgtatgtttatattaatatatataagatgattgttatgaatgtgttgtcagaagttaaagcatgttatggtgattgggtgtgtctaagtttatatgttatgatgatggtggtatagctttagaaagtgttttatgtttcagtgggcaaagttgattcccctcaatgagtattctttaagagatatgttgggaaatgatacgttttttgaacataattatggaactagtacggttcctattcataattagagattgcaccggtcccactgtttcgtctaatagacgagccgtgaaatacaataaagtggggtaggagttgtttagtggaaattacgtataaaggcttcactcataaaagtcatctaccactaaaataataaagggaaggctttatagagagagagcaagagaactagagtataagttagttttttttatatattttctttttctttatttataatatttcatttcctccaattttaagaatcaaaattctcgtttgtaaattttatttttctaaaattgatcatatacattaaaatcaatatttttttctctagatatgtattttgtttaataatttttaaattttatattactgaacactgtaaagataaagactatatactactgtacaaatatataccatcgtacagatgttactatgcatttttttttctctccttcgagttatatttttttgctcgtcaatcaataatttagtcgttggttgattttgatctatacattaatagggttgctaattcagatttttgtggttggtttcgaatcatgtacatactaattgatcacgtttaggctcaaaattttatgtgatgtttgtcactgctggtaatatccttgtttatatttgattagcgtatttaaccgcaaacctgtcctctcacaaccacaaatcatgaaaaataaataagcatacaatattagctagtctctaaaccaattgaataaagaaaataagaaaactattttgttgaaataccagaaacaaaaagaacacaaaaacaaaagtaaattttgtactatctcgacacttgtttattcatctatattaatttgtatctatatatttaaatggcttatatctgtacagtagcttatttctttacggattgtatctgtacagtggtgtacagatgtatctgtacagtggtctgtacaatggtgtacagatacatatgtacatggtgtacagatgtggtgtacggtattagctagtattagctaatatatagataaataagcaaaaacataccagaaacaaaaaagaactataaatagacattttctctcataaccacaaatcatgggaaataaataagcatacagtattatctagtgtctaaactaattgaataagatgtggtgtacaaatgtggtgtacggtattagctagtgtctaaactaattgaataaagagaataagataactatattgttgaaatatcataaacaaaaaagaacacaaagaaaaagaataatttttgtatttatatgtacagttgtttattcatatatattaatttatatctatatatttaaatggcttatatttgtacaccactgtacagactgtatctgtacagtggtgtacagatgtggttacggatatatctgtacatttttttttatgtataatggtttatgatataatttttaaaaaaaatatcaaacaaattgcatatcaaaagttagaaaataaaatgtagatttttatgtatctgataaattttagaaaaataaaattcattaacgaacattttagttattagataaaggaggaatatgatgtagtaaataaaataaaagaaaaaaataaaaaaactgacccacacaaaccctctctctcacgcgctctctacaatttcagtggcataaaatcgtaaatattacttcttcagagtggcaaaaagggatttacaacaaatacaacagtaatgacatgtactataaacccaaatttaaatagtaatcgtactagttttctaattatttttcagaaatgtattagtttgcaaacaaactcattctttaatcacccttttttcccctttttcctcaggttagtaagcgtgaggagttgtgtgtaatatttcgttcgtgtgtgaagtttaaagaaaacgtttttgcaagatcagatgtcgtcttggcctatattgcgggacgggtgttacactaagagccctaaatctatagggaaaacatacaaaatcacattgtattactctccctcttctaatagtcttactgtaatatttaagtaattgggtgtttttttgttttaatttgtcatttttaataaaattaatatcgaaccaacctaaaataaaatgaactaattcgagcaaaatcaaacacagttcaaaacaaagtaattctggttgagttcgcttaagatttttatcaaaactaaattaaccaaaccaaacctaaaattaaaccgaattgccatcccctgttagagatattcaatagtggcatcccctaatttcaaaactgtccaaacgttttatacatttgaattctcaaacaaaggaaattttgaaaattattttgtgaaatattcatgagcttgcatacaagtaaaatctatcgagttcacccaaatatttataaaaaagatgtaagataatagagttccgccaaccaatagtgatgcttcttagcacttttattttcttcaaaatctatggttcggcgtaacacgcgaatagtttcaatgactcttgagtgttgtttgacagtgaaagcaacatagcacgattagacaacactcaagttaatgaaggttttttcttgttcatattttggtatttttcagggttttgaatctgtatttctaaccctactttgagtttctacatatattatgttttaaggtttttaatagtggttttagagtctttaagatgttttcaaataaaggggatcaaaagcattgaaaattatatgaagagtctttggagtttttaggatatatttaaaaaagacaaaacagatttaaaattacaacaaaatagacaaaagattattggacgtaaaaagatgactaatccactagacggattcatcaatcacatatccaatgaaactgggtatggataaattaaccaaatgaaaacggacaggaatggacttaaatatcattatggtcatacaccttttatcccgaaaaaatcaaaccgaatccgatatatctaacatgtactcgaaagtatccaaaatactagtacatacctaaaaacattagttaatttatacttttaataatccaaatgtccaaaattacaattatgaattcgaatatatttgatattcttgagtaatttggattaatttggatagattttagataacaagtaaccaatatgtaagtatgaagaacaatgcgtatgagaagattccaccttgagtcttttcacttttgtatgataacctcatgaaaatcatattgattaactgtgtgatcatatacactcagtaactcgcatttaccttaagaaaacttagctttctctaactaatcaacgctccctggctacttattcttttggcttgatcgtgataattaaataacctgttgtgttacgtactatgagtggataaaaataaagcaaccaatcgatctttcttgacaaaaaaaaatggataaataaaacgagtacaaaatttaacaagaaatcatttcatgttggcccatcaccaattttcttttacctcgagtatttagaacttgtgcaacccaactcctaatcggtatacaaattttggtcacaccctctataaaatttggagaagatccaatagatccagtttttacactgtctttcttacataaatttcagacttaaatctctttttcgttttcagaagtaacataccgatataatatgccgcataccaacttttttgatcaaatcatgtctttgctcttttttgtccaattctttttgcgttttcaaccaaaaactattattcatttatattgatttaaacttttgagagtcatcacaaaacatcaaactagtgttctgaggctgccacatgtatgtcacgtacagtatgaccatcatctacagaattgtttttttgaaatagagggatatatagtacgtgttttatttacggaatataatacccaattcattagcctcccgtaacatttcacgtgggagtgggacatttcgatgaagattcgaacaaacccgtaagactcttttagaaactttagtagacttttctatatattacattccactattaattagtagagcgatgaggaactgatctattttttgaagtttatctcatatgcgaagacaagagaccagattctgttcattgatttaacaaaagagtgaattgctacattgcatatatatgaaacaataaaatgtacctacattgtttttccactgaatcgagtctgtttttcaatcagcaaagagtatttaaatattggaattttatattcttatatgatatctactctttttttagacaaggtctatgtatgatagaatttatctttaaaaggtttataattacatttcttttaggtgttttatgaactactagatgagtacccgcactatgtgcgggtttacgtattactatttacaaattgttttatataatgtctgttcatataaagtaaagttgaatgcataggttttgaaacataaatatgatttgtaattgtttttgaaaagcccaactatattagttcatctgaaaaacgaatgtgcttgagttgttttttattgttgttttagattctcagttttttttgaatttatatatccttgcttttttagttatatgtatagattgtgagacggtgaaattttagaaaatttatttcttacactaaaaatataacatgttcttattaatcatgtctctgcatattcaatctaagcatattcaacttgatgtttttggaaattttagttaagtttttgtcataatcttatatcttacgtattagttataaggataactcctcaaatatctttcaaattacttgttttcttagcataaatctcgaaaaacttagatatatttaatctgcatattcatttagtttctttcataataatcgtctaatttttaggccaggaatatgtgtaacatgtttggattttatcatcactttagccacttaagtagatctcaaaattaaagaggatatattgaattaaaaaatgtagaaagagtgatggttcaagttctcattaattatattctcctatttaaattgttatgttgaattaattactaattatgtattatttattttatgaagtctacgtggcaagctctcatatgctgatgtgtcaagttgtgggagagagttagtcttctttcatatatatgattcattgaaactcaaaccaaaatgtaatgtagattttcacaagaaaatattgttctatgaatactatgatgatccagcttttatatactgttccctttttgtttgtttctgttttcatgtttgctacgtgtttatggaatggaaccgaccgatcatgttgtgaattaaattatcgttaaaaaccactatattgatttttcgaattttttttctaacatcatcatttggcctcatctacattaatggggaaccacttttttataaaacatgttaattatttatttcaacagaattttaatttggaagcaaagactcgacgtctcgaccattcctataattaagtttattatttctaactacaatgtgttctctatatatggaacttattctttgaaatattttcaaagttctaggtacacaaaagcagggttaggtataatatagccttggagactattggatcattattggcttcaagttcttggtgatcctcaaggcctcaacaaaaagcggaacaagtagatatttgtagtattgttttgcacccgttaacactatttttgcaaatatttatatacttgtattaaattaaaaaagaatataaataaagctaaaaattggagttttaagatagaaaatttggtggcgacaaaagaaaaaaaagatagaaaatttggtaaatttgtgattttttttacgaaaatatatatttgaataaatttcttctgcatttgtccgaaacaggcagctactatgaacacgagagaacccatgacacggcctacccatgacggtcgaattggtgtagaatcaatgattggtttgtacagttttaggataagccaaaagtacaattacaataaagccatgcacgtgaagttacttccatgtcatgaatgagggcacgtgggtcttcattcaattacgtcatttatctgtccaaatctattggaaataatttaaaatttccttgtccgaaatcaaatggcagtaatatcataaaaacataaaagaaaaaaaaatatttctggggaaaacgcaaatgattcataaatgtggaactcaatttaggtgtaccaaaatttcagtgtagaacaaacagcgttcgaaaaaaaggtttagacggttgtttaggttccgagtaagccttaattgtttatgtgacatctaaacaactgttaagtccggctaaaatcatatatatattttagtatatttttttagtttttaactaagtttatatttataaaaatgttcatataatatttgatataattaaataaatattttatctaatttttgtttacattttaacaaaaaaactttcagatattttacataatatttaggtataaaatcatatttatactataaatatatgttttaaccgcttaaaattgtttaaattccgataaaacgttcaatgcgctaaatattaaatctccgtccgtttagcgctttgttaaacaaaacacttagagcatctccattggaagtatttcaatgagatacccaacaaaacaaaaaaaatttaaaaaaaaaaagtacgagagagatgaaaaaaagtagaagagaaggagagttaagtttttcggaggagaaactttgagaaactattctcatccaatttggacaggtgtcatcatattattagtttaactattaaataataattaatatatctgttttgattaaaatattattattttttttttttagaaactttccttatttttattgatggagatggtcttacaataaatggctgagatgcttcgtgtatattattattattatgtcgccaagtccagcagggtttgcattagttttgaatttgtgtttcgtatattgtttgtttttttgttttttttttgcagctgacattaataatttagcaagttattttccttcaattatactagttttgaagaacttacaaaaagaacatctaaacgttaattaaatgcatttatactaagctttttttcttcataaagtgcaactatactagtattaggctgattttgtttcttagaaataattatatctgaagaaaattaattaattacgtagcgctaattaagttattaataatagtcgacatgggtttccggacaaatgtcatctgacaaaagttctttgcggaaaggcggaggaagaaaaggaggacgagtacacatgagcaatgcccaattcactccttggaaaaatggatgacgtttcacggccgttgcacctagagatgaccctaaccgtcggctaggatccttggcaagtagctgagagatcagatccttggccgcgcttggaatcgttggttctttcgggaattcgagtgctcgagccacgatattggcaagggttagctcgtggtccattcctttgaacggtgttgttccgtagaacagctcgaacatgaatatccctaatgtccaccagtccactgcactaccatgtccttctcctgccatccacattttacgtttcatgttaggataccacatcggaaaattatacattatataaacttccctaagaagaaaaacgtttgacataaaaatcattcaaatcgaaacaggggaaatgagaatgaggaagatttgaagaatacctgaaacaatctcaggagccaagtactcatgcgtcccaacgaatgacatggaccggacatctacaggttcagccacaagctcaggaccgttgttacggtgatcagttttcttcttacgccttcggattctcgggtggaagcaagagacagcagggacaatacagttagggatcatgcaagaggatgatgtggtttgacggtggtccatgccttggttctcgttctggtcagacgagccattaggaagattgttccggttcagcactatctgtggtgtggaagtcgattcatcacattttaaggagagatcaaaatcagttaacatgatgtgaccatctgatcgaaccagcacgttctcaggcttcaaatcgcggtacacaatccccaacatgtgaagatattcaatcgctacgatcacttccgatacatagaatctgaaaaaatagtaaagagatgttgattagtaatctgaaaagaagggacaaagagaagaaaacatggtagtgaggacaaaacgaataattgagattttacaataatttaacaagagtttgttttggaattattggtttacagttttaggtgttgtgacaaaacagcatttgtttggatttggagacaagaagatgatgttttgggtttgatgtcactatacataaggaacaaaagaggacctacgaaggttggttggcttaacgaactcttttgtctaatagagaattctggtgctaagacattatccaagattcctctagctgaccctttttgtcttcacgggtccacaatcaacaaacatactccacacaaaacagagtcatagtgtacaacagacgaattctaagaacaagttcacacaatcttattcggttcatgtatgaatttccgtagagccattgttctctatatcatttaaagaaaaatcagaatctaaatgagttcaaaggaagtaacccattctatatgaaaaaatgcagctaagtggagagaaatggggaccttttttgtaggacaaccttaaaaaaagaagatatatattaaggaatccctacaatacatgttttggtcccaattctaaatcattttactttaatactaaagaagaaaccttataaaaactaagtcctgctcatgagtaaaacacacagatacaagtcgcgagagtgaagcaaaaatgctcaaatggtaatgaccttgacttcacttgtaggatctttaacgtgtaaaccactactactatgtcaatctgacaataacttaagaacacaaataaatcagatttaacatcaaccaaaaacaacaagatccggttttcaagtacttaccacgtgatacaaattggtccataaatggttataaaagtggctaactcaactaacaaatgatataacttcagctacttcaattcgaagccacagctacttttcaaaacaggttaataatatttcataatttttccaaaaatttcctcctaattgtaggaccaaccaattaataaggaatggcacaattgtaaatattgttatgaagaacaagcttggcacaattgtaaataagaacaagcttagctgggatgttgtttgtactgtaaccacatgcccgattacaaaaaaatattaattttcaacttcaatggcatgctacgtgattttaattcaatcacgcggagtaccactacaagacttacacgtgtctctgagtgatttgttattatttcaaagtcaaaccccactcgttttgactttttattaatcgttatggcctacgatatgcccacacatgtaagtaagatgcacacacaacttttgttaatcgtgcatacatctgcttacaaaaataaaaataaaataaaaaccatatcttatacaaatggttttatttaaaatatactttttagtcccttttctcgtgtagcgtaaatagacttttcctagtttataaaacaaaagcatttatcgagcacatcaatgaataatatatagttattggtgaaaaataccaaaaattcggattaaattacggaaattaaacctcgattgtgtgtgattttcactaggattattattattacaagtaacaaacttaacgggcctatgatataattagtgcataattgccgttaaaaagtatatattataaataaatcgtcactttatggttttataatatacactttctagtccctttttgtgtggcgtattattattacaagtaacaaacttaacgggcctgtgatataattagtgcataattgccgttaaaaactatatattataaataaatcgccactttatagttttaattaataactaaattacactttctagtcccttttcatgtggcgtatatagacttttctagtctatctaaaaatacactacactatcgtgcacatcaatcaataaaaacatatattccaataacaaatctggaaaaattcatttcaattatataagttaaggttactgaaaactgccaaaaattcagaagaaattacggaaactaaatctcgttactataattacgatgtaattaccgttaaaaaggcaataaatctagtactagtgattaattaacggtgccattaaattcagttatgtgtgttttaagtgttaactacgagacaattcgccagctggcgagtcccacttccctgatttcatcaggcttttatatttattcactgcttcatagtaataattacttcccaaaagatttttttttgaattagaaactgaatatttaaaaaaataaataacttaacggaaactgttacctgacggcggattcatggaaacgtttatgagtctgtttttgacggagaacgtgaaggtcaccgccgggacaaaactccgttaataaacagagccatttcggagaatcaatggcggcgtaaagcgtcggaagaaacggatgatcaagagattcgagaatctctctctccgtcttagctctaccttctttgcttctgctcgcgagctcctttttatccataactttcgctgctaacagaggtaatttaacggcggtggtttctgttacggcggttagggatttgaattcggctaagaaaacagagccgatgtcgccggaaccgagacggagacggaatctgagatcggagagtgagagagatgatcggagtgaaggagggagtttcgaagatgagaatgaaccgtgagctgatggtgctggtgttaaagctgcggcggaggaggaagagcgagaaccggagcttgtgcttcgattcacggtggttccggctgatgtaaagcttacactctgtaagtcgtcggttaattcgtcaatccatggctccattttccgatctactgagagtgacgacgagagagagaagaagaagaagaagaagagagggagagaaagagagaagtaactgtgagattttgcctttttggggaagagaaaaaatagaatcaaaagaagatggcaaagttgtaatttaagggttgagatatggtgcgtttcgtaatttaaggtaatagttcgattgttaaggagatgatgatacagtattctataattgagatgttttatttatgtaaatagacaataattagggaattatttgagagggatttttgatttctctatgaatttttaagatctttggtataggatttgtttcaaaagagagaaacaaagagacatataaatctaggcccctacagaattaagataatgacatatacatatcttgtgtttgttctatttcagttgtgattactagtattttcttcgtatggtacaattataaataaatatctaatcactgtcttttgaatattatgtcaccaagtacaaggatggtgttattggtgaacaatttgtatcgtgaactcaaatccctattgcacgaacctcaggttagtggtcgactggtcgctcggcctcgttttcatttcctttgaaaccattatggtttagatattggtttaactcaattgcatatacctaaccggtttgactcgggtgaatatgttagataaggaaagtgtatataacccttgtattttctcattaatgaaatcagcagaaacattttaggttggataaggaaagtgtctataaccatatcattgaaagacaaattgcttgggtcgaaaccggttttgttaagtccggccctggatatattaccaatttgtaacactcgtcttaaaccggatattttctagtcagaccgaaaaaatacaagtgaaagaggttcaaataaattgataacttagaacattcataacaatgaccaaaacaaatcttttcaatgaggtttgtaaattgtaactatatatccgaattaaaaaataatcgtcataagtactaactgtttttcggagaatgaaatgggctatctgttgaaaaccttaggcctgagtttaaagaccatctgtacaattgggccaataagtaacgcattatccatcaacaaagtactgaaacatgagacacttagaccatctccatcgggggtttcttgtaagaatttctcacaattaaaaaaaaaaaataataaaaatgaaggaaaaagagtgtagaaagtttctcacttgagaaactctgagatactctttacaacccatcatgataattctcttctcattattggttcaactttttaacaaaaatatttttttaatcaaaaaatcaaattataatataatattaattttttgtttgtttgagaaactttgtgggtttctcatggataaaaaggcccttaacttgtcatagaagttacaacacaacatgaaagttaaacatcgccggccaaaacaaaaatatttctgtgaatttacacaaaattatttgcattaccgaccataatgttctcctcagtaccttcaacacaatacaacaatacattaacaaaattggtcttctagcattagcctcgtctctaaaatctaacatcttcttctactcctaatccaacaattgtttatgtatattcccaattatacccctctattactttgcttattacggaaaaggagttcaaagagcagaagaagaaaactcgtatatcccaaatctccaacttttcaggggaatgatgatgtactgtcccaacctcacggcttctctaacaatcccttcatatttaccattttgccactacactagacaatttcgtccttctcatttccgatcatctgataaaaacccgaatctcgtttctatcatccgagcaaaacccagaatttctcattcgcttaggtgctttgtatcatcttcaatggcgactcctcctccgacgcagagcagcgaaaccaaaccttactctgttctttttgtctgtctcggaaacatttgtcgcagcccagcggctgaaggtgtctttagagatatcgtgaagaagagaggtctcgattccaaattcaacattgattccgctggaacaattgattatcacgaggtatgataattagttccaaaacaattaatctaattttagggtttatgagagatgcttgattcatggttgatttgaaatattggtgaatgatggttttgtatgtagaaaggtttggttttggttttaggtttttttggtggatgtaatttggtaggaatacagagttatagagactttgaaattcatgtttctgaatcaattttgatgtgaaattgctcttcttactagggaagagcaaaaacagtaatctatttttatggtgattgatgctttgattggaacaattaggcaatggtgctttcagattttggtggatgtaatgtggttgtaaattaggagcagtggagactttggaatttatgtttctgatttgtgaaaatgttggttttttaaaaggggaatatggcggatccaagaatgagaagtgctgcgaaacgtcgcgggattgagataacatcactatccagaccgatcaaggcatctgatttcagagaatttgatctcattcttgcaatggatgaccagaacaaaggtagctgatagagtaatttattcaacctttgtagggtctgatcgatttctatgcaaatgggattcaacataggatagagacttttgcaagttgggatctgattagagttatatatgtagaattgaaataagtatgagtttgaatgtttgatgtttgcagaggatatattgaaggcttataatgtgtggaaagccagagggaatttcccgcccgatgcagataagaaggtaccgttggtgtgtgtttgctggactttggaactctatttagttgatagattttcgttgaattttcaggttaagctaatgtgttcttattgcaagaaacacaatgacaagtttgttcctgatccatattatggtggagcccaaggttttgagaaggtaattaccattagactctaaagaagctgaatgcagatatttaatttggttcataccattagaggttgtctatcaaaatggttgagtcagtctataagactttaaaatggcattaccagtgtcactcccaagtaacttttccattcccgaattttagtgttttatgtggacaaaactcacttggaaacatgaatcttgatctcttacttgttctttcacaggtactggacttgcttgaagatgcttgtgagtctttgctggatagtatcactgcgcaaagttgatgatactacaagtacaaagtcccaatcctagaacctttgttgtttttgcacatagaactgaaaagttctcttattatatttaagtgtcatcagtgatgacaatagagtgagaactgatgtgaagcttggatcttgatcttgttggtgttttccttgaaaaaccctttgttaaatgatctactgatggatcattattattgagattgatagcttcagtgatgtcaatagtttgtgaggaatgatcttcctgattcttaagaatcatagagagtggcactctttacacgcttgaataatacgaattcttttgttcgatcattattattaggaaagaaatagatttaaaaaaaaaagaatgtgtggacgtgaagtgttgttgtttgagatgataacagaatattttctcttatcattatgtggcttccgagaaattaagtgaatggtggtggagcatatggacaatgattttgtcgtttgcaatattttccacgaaatctcactatattttccatgaaacatcaatggagtttttctgtgccaatagactcgtcaacggtctatatcctcattcacacaaattgtttgaactaccaaaattccattaaacccgtgtgattcttcaactctctggagatttctcatcgttttatgcatcggtgagattttcatttttttactcctcactgtctgaactaagttccaactatttttaagttttgcttaaggttttatcactgtggatttgaattgatttgatgataatgctttatttgttttcgattagtgttttgagcccatttcttgattatgtgttcttgatggtgggaattaatggttgcagcagtgaatcatcaataatctaagttctcatgggttctgcaatgagcttgagctgttccaagaggaaagcaacgagtcaggatgttgattccgaatcttgtaaaagacgaaagacatgctcaacaaacgatgctgagaattgcatattcattccggatgagtcatcttggagtttatgtgccaacagagtcatcactggtctgtatccattcacataaaggccatcttaaatcttgatccactctttaccatactaatgaattattcttatttcccttggctcagtggcagccgtagctttaacaaatttcagattccaacaagataaccaagaaagtaattcttcttctttatctcttccctcccttgcaacttctgtgtctcgaaactggaaacacgatgtcttcccgagcttccacggagcagatgtccgaagaacctttcttagtcacatcatggaatcgttcagaagaaagggaattgacacattcattgataataatatagagaggagtaagtcgatcggtcctgagctcaaagaagctatcaaaggatcaaagatcgcaatcgttttgctctcaagaaaatatgcttcttcgtcttggtgtcttgatgagttggccgagatcatgaaatgcaggcaaatggtgggtcagattgtcatgaccattttctatgaagtggagccaactgacataaagaaacagaccggtgaatttggaaaagccttcacaaaaacatgtagaggtaaaccaaaagagcaagttgagagatggagaaaagctttggaggatgtggcaacaatcgccggatatcattctcacagctggtttgtcttcttgatttatattctccttaattaatatttccttgttaaagtgtattctttcagatcttcgtgaccattttatcgcaacgattgtatattgatttgatatctatcctctattgtcaggaggaatgaagcagacatgattgagaaaatagccactgatgtttcaaacatgttaaatagtttcacaccatcaagagatttcgacgggttagtagggatgagagctcatatggatatgctggaacaattgttgcgcttagatttggatgaagtaaggataatcgggatttggggaccgcctgggattggtaagacaactatcgccagatttctgcttaaccaagtctccgacagattccaacttagtgcaatcatggtcaatatcaaaggatgctatccaagaccttgtttcgatgagtacagtgcacaattgcaactacaaaaccaaatgttgtcccagatgatcaatcataaagatatcatgatttctcatttaggagtggctcaagaacggttgagagacaagaaagtgtttcttgttctcgatgaagtggatcaattaggacaactagatgccttggcgaaagaaactcgatggtttggtcctggaagtcggattattatcacaacagaagatctaggagttttgaaggctcatgggatcaatcatgtttacaaagtcgaatatccatcaaatgacgaggcttttcaaatcttctgtatgaatgcctttggtcagaaacaaccacacgaaggtttcgatgagattgcttgggaagttaaggctttagctggtaaactccctttgggattgaaggttctaggctctgctttgcgggggaagtccaagccagagtgggaaagaacactaccaaggttaagaactagcctcgacggaaaaatcgggggcattatacagttcagttacgatgccttatgtgacgaagataaatatctatttctttatatagcctgcctttttaacggcgaatcaacaaccaaagtgaaagagcttcttggaaagttcttggatgtgagacaaggccttcacgtattagctcagaaatctctcatatcctttgatgaagaaatctcttggaaacaaattgttcaagttcttcttttaaacaagttctcgcatgtgaggcatacgaagagaaacaagtcgcaaataatacggatgcatactctgctagaacaattcggaagagaaacttcccgtaagcaattcgttcatcaccgctatacgaaacatcagcttttggttggtgaaagggatatatgtgaagtgctcgacgatgatacaacagtaagttttgccattgcatctccccttgttatttgataacacatcatcattactaatatttcttttggctcatgtttcaggataatagacgttttatagggataaatttggatttatataagaatgaggaagaattgaatataagtgagaaagcacttgaaagaatccatgattttcaattcgttaaaatcaattacgtatttactcatcaacctgagagagtgcagttagcactagaagatctgatttatcactctccacgaattagatcattgaaatggtttccttaccagaatatatgtttgccttctacttttaatccggagtttctcgtcgaactagatatgcgttgcagcaagcttcggaagctatgggaaggaactaaagtaagtgattttgatgaaaactttcatttttttttttaaatctataatttgattccgtaaatgtttattattgtatcaacatgatcttctttgtcaaatgcagcaacttagaaatctcaagtggatggatttgagtgattctagagatttgaaagagcttccctcctctattgaaaaactcaccagtctccaaatattagatctccgggattgctcaagtcttgtgaagctcccaccatctatcaatgccaataatctccagggattgtctctaacaaattgttcacgtgttgtgaagctccccgctattgagaatgtgactaatctccatcaattgaagctccaaaattgctcaagtctaatagagctccctctttctattggaactgccaacaatctttggaaattggatatcagaggatgttcaagtctcgtgaaacttccatcctctattggagatatgactaatctcaaagagtttgatctatctaactgctcaaatctggtggagcttccttcttctattggaaaccttcaaaaattgtttatgttgagaatgagaggatgctcaaagctagaaactcttccaacaaacatcaacttgatatctctccgtatacttgatctcacagattgctcgcagttgaaaagttttcccgagatctccacacacatttcagagctcaggttaaaaggaactgcaataaaagaagttcctttgtcgatcacgtcgtggtctcgtcttgctgtatatgaaatgtcatactttgaaagccttaaggaattcccgcatgctcttgacatcatcaccgacctacttttggtaagtgaagatatacaagaagttcctccatgggtcaagagaatgtctcgtttacgtgctcttagactcaacaactgcaatagtctggtatcactcccacaacttccagattcccttgattacatatatgcagataattgtaagtccctcgagagactggattgttgctttaacaatccagagatccgtctctatttccccaaatgcttcaaactgaatcaagaagccagagatctcatcatgcacacatcaactcgtaaatatgcgatgttaccaagtatacaagtgcctgcctgcttcaatcaccgagctacttctggggattacttgaaaatcaagttgaaggagtcgtctcttcctacaaccttgagatttaaggcttgtatcatgcttgttaaggttaatgaagaaatgagagatgatgagatgtggccgagtgtactcattgccatcagggtcaaacagaatgatctcaaagttctatgtacagcaagcatatatccagttttaacagagcatatatacacatttgaacttgaagtagaggaggtgacttccacggagcttgtctttgagttcacaccattccacaaaagcaattggaagataggagaatgcgggatactccaaagagaaacgagatcattttgccggagctcttcgccggatcttccgccagaatcttctcgtgcgttctctctctctctctctcactctccctttctatctctctgtctcatggattggttaatgattcgatttctcctaatgggtttcaggtgtgtttctagctaggaccactgtttgagaggtaagaatcatgggtttgatttctccttgagtcattcgattattggttttattttgtgtgaatgggaattagctgtgaaatatgtggtagccacatgtaatgattttgtcataaacattgtgtctagcaaactagacattgattaatcatttgagtcggatttggcaagctaatctagttatataatgacatgtgacttttaaaactgctaatatttcttgcaaatgttttcttgcgtttgatttatttgcgtatgttattggcatttctggttgcaggttttgtttttaatgaatctgattggtcttttctaaatactaatcgacttcatccttatcaaatttgattggtttcatcatttgagctaattctatctgattcttgtacattattttagtatttgtctctgtttgatgacatatcattgatgtgataaatgtaggtgaatgaaaatctttaataggagctgccattgtgtgttgattgggtatcaagtactgcttctaagtgatccaaatcctgcttcagcctctggacttgttctttcttctaagtgacccttttgttaataattttccatctgtaatgcgcttgattgcttgcagcgttttctttgtgtctcttggtgtttgttttgtttctttttctttgtgagagatcatcatcacaagtcaatgaatagatcatgtgtttcagatatgctcgtttcatgcgtatgtatcatgttttatctatgtttggtaaaaacttatattgttgttgcttcatctgttttagcatatataagactggagttattaagattttttggagtttctttaatttcataatataggcttatatgctttggtttttatataaaaaacaaaaaaaaaaacatgaaaatagaagtttaaatgtcaaatataataatttgaaatttatttgattgtaaatattgatttgatcagtaaaataaaaattaatatggttagattaagaattgaaaaataatcagatgaaaatatgggcattttagtcatttttaatcagaagcatctagatggatcatccaactgaacaaataagcaaagttttttttaaaaaacaattagatggatcatccaactgaaccacaaaaaatggaaacgaacatcatttagatcgattagtcagatgaatcatttggtggaccatttggatggacatctaaatgagcaaacgaacacgacctacaaggtacaaacaacaacaaagattgaataaaatttggtgtatcctatcaattctagaaattttcttacgtaatgaataagtaactgtattgaatcaaaacacaaacttgttccaaagttagttctgttgtatccattgatatagttgagaaacttaaacaagatttgagaattgaacaatgatccaaatccctacaaatgtagattagaccatcaaacaaacacgatctgcaagcattagtgaattgtcaagaagaaaatttaaaaattgatagaataaagagaagattggattgcgggtaagtgaaattgaatatttgacctaaaggagaagaaaaaagtgaaggatctctgaaaaatagaaaagagagatagagagagcttctcttaaactcggatctgaagcgtggaatgaagttagaagaagaggatgacaattttctactaattggaaattacgatattattcctatttttttgccttcgtgtcgccttcttcgttgtgtctgacattgcctttggacatttctacggaggttttgtgtttaccagcgaattgattccagaagtcgaagatggacccgtcgtttttacaggaattgttgtggatatgggccgggggaagccgaaaggccaattaaagaattttaaagaaaaaaaccttttaatacaaaaaacccctcgactttttacaaaaacccctcaactaaaaaagtcgaatgaaaatttctcttcattggtcaatataaaaattctaactaaattattaatgaaaatcaccttttaggtacgaaattttattaaaaatactcctttatttataattaggtaaaactcgcctaaataggagggtgaaaatattaaactattaaatatttttaaatcgcaaatttcaatcttacaatttccattttgttatatattttaatcttacaattttcattttggtgaggttttttgagcattttccattaaactttgagcataagctttatgtgttagtatcgctatgacaactttgttccatatccattcaaggttttgaaaaatgtagaacataaagaacaaaatgtagcccatagaagttgaatataacccaaatttatcaatgcaagtgcagaacctagtgttgttataattcagtagagaaattttatggatagaagtggatcacaattttgtgtaattaaaccaaattaacgaaattaattgaaatttatttatactaaaatttagaataaaagtacatttaaacataataaattatatagtagattgatgagtttatttttccaaaattatcccacaattatgttgtgtgcgcataatacgttcaactgtccacaatacaaaataatagagggcgccaaattgatgttttttatctaatcaattgaagcttcatatatagattgaggaatatcaaataatgaatcatgtttaattataacaagaaactcagctttaagaagatcttacccctagactttgattggaacatctaacgaaaactaaaaagaagtagatcacatcgatcaacttagataaaggagtctccttgaacatctccacccatggaaatgatacttgggaaagtcctttctcaaagtaaaagtgcaacgcaagtaaatcactgcccagcacagactatgaacaaacaacaagaacaaaaaaaaaacaaagttgtgatttatcaattaacattagaatttattaaacaaaacaagcagagtttcaaattgcatgcacttatcggtttggcaaagaaatctgcaagatgtgaaggatcgatcttcacagcagcttcgagcaaaacaactgactttttcagtttcttattcttccatacaccgggaccctccgattcatctttcacaacggaagtaaccttgccggatacgctgtcacttccctcagatctgctggtttttgcttctggttacgcttccagctcacgacgtgggagttaccttttttaagccaccgaactccatagatttgatcacttccattagttgtactaatgtttttcgctttatctgttcccttttatttcttaattctctatgcgacattaaaattagatgctagacggtgtgtaaatgcaagaggagactcagatgctgagtttaggtttaattatataaactgtcgtttgatttgaactgttacgatcgttaaaagagcctagtcctacccaaatctgaaataaatccgtcaccagaaatcggaaaaaaacttttatctattttttttaataaaaaaaacaaagtaacaaaaagtagataatatatatatatatatatatcgggctgaaacagttttaattccttatagaacccgatatatatatatatatatatatatatatataaatattattttcggtttacataaaaacaaacacattctaacaaatcatgacgaggacgaagcagagtctataaaggaagaagtggcgatggagaacgactccggctcgtgttatacaactccgaatgagctctccactgctgagatatatgatggttacgaaaacgacgacgtcgtaggatgaattcttcggcgatctgggtttcgcagagagagcggcaagattctcgtgtttcagtagccgcagttttaatggcagaccaaacttagtcgttcctgattaatgctcacccgtcacaaactaattgttgcctatatatatatagttaaatttcagaatctgttttagcccatttggttatgtatgcttagaatgttctaaaggttatgggttcgaaaggtaattattttctttttaaaatatgataaaacaacgtcgttttgataatctatatacagacttatgcggtttgcaaaatctatacacgtctaaaggtaatattgtgggtgacatttaagatcgtggtattgacctgcatttatttgacatggaggttaagttgcaaaaaaaattatttatacggtttttttgcataaaactcaactcaaaatgaaacaaaatgtaacaacattaggttttgaatgaatgttatagatgaaactaactaaaccggacgaaaatcatattttttgtggacaataatcagtcgtgacccatatttattttaggaaaaagtaatttgaagtttgtttgaccaaattttttttttttatttttttcgtcaccattaccatttaatttaatggagatttgtaaaaatatcatttttcagggcatttccatcaaggagaatccaaaaagtttctcaaacaaaaaaaatatatgattaaatttttagtttaatgaaaaaattgaaccaattgaaaggagagaaatgtaattatggtttgtagagagtatctcctagtttctcacttgagaaacttcttacactctctcttctcatttcattatttttattattttaatagtgagaaactctcttgacagactaccaatggagatggtctcaatgtctttttgcaaaaataccccattccattgtccatttttaaaaatactcattttcataaacaaatgactaaattacttttcatctaatgagaacataaaattataaattgaaattttcccgccaaaacatttttggctccaatttttttttttcttaaaatttatgtttcctgccaaaattatttcctaacgatcatctgcaaaaatattcccgccaaaatttgtattttaaaatctttgtaaatttttgtagaaccctttaaaaatccttgttaattctttaaaaaatctttctaaaatttttaaagccttttaaaacatttgtaaagttgttaaaaacaattgcaaatcattttaaaacctcttaaaatccttataaagtcttcaaatacacatgtaaatactttaaaaccactttaaaaacctttgtaaatattttaaatccttgtaaatctttaaaaaccattgtaaaagattttaaaatcatttacaagagttttaaagaattttaaaaggatgtacaaggatttttaaacctttgtaaatccttttaaaattcttttgaaactcttataaagtcttcaaaaacatttgcaaatcattttttaactcttcgattttttttttaatatttttaaaacatttttaaatctttttgaactattttaaaattcttgttaaccatttactttaaagatttttggcgggaaaatatattatttcattttattaacttaaaatattttcaaataagggtaaaattatcatttaaaatttaaaaagttataaataaaaatagactacataatgaagtataataaaaaaaatggtcatattggaaggatattcctaacaatttgtttaatttaagaatgataaaaaaaaagggtctaatccataggcggttttgtctactttatcaactaaattgatcccttggattctattttccaaatttgaaaatcctaaaatcttaaataaattgatcggacaaacttgaaaacttcaaaatccagaaagaaaaattagaaccataccttttaaaaaaaaaatctcatatatttaatggaatatttaaaattataatgttaacttaaccatagttaacaaatttaaccctagggcttagattctgaccacctctatatagaaaaaaagaaaccctacctcgtcgcagcccccaataaatacctctgcaccaggaaaacaattcttttcagtctctccattgcttatcattttctctgtttctttattcatttatgttttcgttttacattctttctaatgagtttttatttaacatcaaatccatttgattgcaaatgatgagttaaatcaccattgataaaagaagctcaattgagcactgttgaaaatcaaaaatttccatgactctgatgcaattcaagaaaaatcaaatccttagatctctttttttctgttctttctcagtttttgttaataaccattgaatttgcttttcaattgtatttctgtttaatcttaatcattctctgcgtatttctcactagctttttttaatctattttttatattagtctttacaaattgtactgtacaacatttaacgaactgaatttgatcaaaattgaacttggcccaaaaaaaactaaagtaaaaatcaaaactgtaacaatgatgagaaagtgtacaaaagatgaagaagatggaatcaatcagaagtggttatggtgccccaatagccgttgaaatgttcatatcattacaaatcccataactaaacaagaaaattaaccaacaatttctaagaatagatgttttacgatgcatcgttatcgttgtctccatcgaaatattcatcatccctctggatctgcttatcccgtgaacgctctgacacattcaaaccgtttgcaatatataacattaggggggtttattggttcttacatttataatgactttaaaatctttataaatccactgttattcaatattgaatgtttaagactttgttaaagtcttgtgttattggtttggtattttaaaaattgtttttacaatcattacaagtcatgcgttattgggttaaagattttaaaaatttaatcaaagttatgtgttattcaaataaaatgaatttaacaaactttatgactctatttaagtatagtgttattggtttattgagtttaaagctttttcttcgtataaagactcttccaaaataatagatgcaaccttgatatttcgaaagttttgtaaaatgattattattaattccacatcaagcacacaacatactcgtacacctaaaaagtatcatgattattatcccctacctcctaaaaagcaaacgccacacaaaacaatagagaagcttttattaaaaactgtaatggtaatgaaaaactcaagaatcctaaacggtaatgaaaaactgtttcgtcacaaaaaaaacactcatcaagctcctgtagcatccatccacatattatgagatattgtgtctctccaattgttagcatattctctttgttgggattccagaattccaacatctccattttcttcatagttgttttcttcattgtcatcgctattctcttcattaatacttgtttcaggaggaaactcatctgatcgacattcttgatgaagaaaattatgtaatccagcacaagcaagaactagctctgtttgagtcttaaaaggatatggaggtgctgatttaaaaatcagaaaacgagatttgaaaataccaaagattctttcgatgacattcctcaaagaagcatgacgtagattgaacaactcattctgggtttttggatcgcggccttgacctctaaaatcttgaagatgataacgagtacgccgaaatggagccaagaacttgcggcgatttgcatatccacaatcaactagataaaattttcctgaaaataaaaaaatacaagataaattattcttcttaaataaaatatagaagaaattatggatacatagaaaataaataccttctggaacttgtagcctgttagtgttccttgttaaagcatcattaagtacttttgaatcatgtgctgaacctttccatccactaaggatgtatataaattgtagatcaaagttgcaagcagctagaacattttgtgatatgaaccctttccgattacgaaaactagctgcatcacatgttggtaccattgcaaaaatgtgtgttccatcaatggctccaatgcaatcctatatattaatagaaattttttatatgctagttaatttcaataaatagtaacgttatataaataaataccttgaaataagggtaaaagcttgtactttctcttatctttgcaggtactctaacttcaggtttagccatccaatttggtgcgacgaaagctaatgccttaagtgccttatgaaatttatgcttgtagaataacttgatctctgaaatgtgtccattgtataacagtatcttgagttttggccaaccgtgagtaaaaaagtagccaaaatttcttcgacgcatatatatcgtgtatctcttagccatgtcttcactcttacaacatcacagagtttatgaaacacttctggttccatacgatataactggcggaaatgcgcaggattaactgtaagagcagtttggatataattatacccaactcttgagacggatcgacgaactggacgatcaataaaagtactcgttgttgcattttccaataacaaaacatgatgtccaaatctgactcaccatcttctgcttcaattttttctctgtcatttaagttctcttcttcgtcaccaatgttctccatgttaaacaccttcaaaagaatatatttgttaaatatgttcatagcacgtagtaagatattaatatgtacatagcacgtaccatcatattagacgtagcacatagcatgatattaaagaagacatcataaaatgacaagtctcgagccatcttaaaaaaagaaagaaagtattattcataaaccaaatagaaaaaccaaaaagaaaaactaaaacaaaaaaccatgaaacaaatagtgtaatgatgaatgatgataaaaaaggcaaacagataaaagtattgtatcacggaatctgacatattctcacaatctttctcattcttaaggatatattattgtagagcatgctctttaaataatttcagtttggcttatgctttagttgctcaatctctatttaaagagcatgctctgttcttctttatttcaggtttattaaatttagagaacgttcttttcaaacctttccttgatctcattaccacttttgctagctgattctgatctttgcgaataatatgcaacgtataaatataaaatttgcgtcgagttttcagaaatagcaaaggaagcatttacgtttgacacctaaactgaaaattaatgatgtgaaaaaaagatcaaagaggactcgattaatgcttccaaagatgatccgtggtgcatttctctcttagaagatagcctttttcattaatgcttcttaattactcaaatggatccaaaattttgtaaccatcgattatcaagcattccaaaaaaaattcctttttttttttttttgaatagaatattaaattatactcaaaagaaaaaataacgttgttacaacttgtgcatcgagtaatttataaagagaagattaaaaacagtttgaaaaattgatctaaatatcaagagcggctgtggagccacgcttggaagcatgcttcgtatctattatccttttgcctttgaattgtggtgatttgattcctgacttgtatgtcgatccattgaattaattggcctgcagtattcggtgtttcgccatgtctgcttctgtttctctccctccaaatggtgtatgcagtggcttgaaggatgtatttggtgaggaagctctcgattcgacaacgcttgtgctgcgtagcataggtgatgatttgggaccagttgtttgagtggtttgtgttgaagacgcctttggcaagagctgtccagactgccgatgtgtagctgcatgaaaaaaaggtggtctcgagtttcaatgccttggcgacaaaaggtgcagtcacctgtttctcctcggttccacttgatcatgcgggctccagtggcgaggcggtcgtgtgctgcaagccataagcagaaagagtactttggtgtagcatgtgggaaccaaactcctttgtgccaggctacctcgtttgatgttgtccggagataattccaagtgtttttggtggagaatttatctttgtagatgtcattcttccctttccataagacacgaccctgctgctgctgctgcgttctcttttgatgttgagtggacaacacttcttcaatcgtgtttaagatctcttgtcgatgatgtcgtcttcgacgagaagtccatgcatccgctacagacattgtgcgactaatccccatgtcaatggtgcctcttatccctgcaacatcaataagtcgacccaaaagcgaccagtcatcaaaccaaaaggaagtactttcaccatttcccacctcagccttacaaaaacgttttgcaacccctctgtatttgagaattttcttccatatccaagatcctagatttgcattctctttgacaatccaaaaaatctcgcgctttaacaagttgtgttctacccatttgacccataacgaatcaccatgagatataattctccagaccagtttcaaacaacaaacatcatttgcctctttcaaactccggaggccaagacctccctctgattttggcttgcaaacttggttccaagaaatttttgccttttttgaattcaaatttgttcctgaccaaaggaaacttgagcagagcttctctatttcttggatacatgcacgcggaagttggaaagcacttaaccagaaattacaactactccagatgattgaactgatcaagttaaagcgtcctgcaaaagagagaaatcgagatgaccatgaccctatacgttttcttatctgctcaattaacggagcgtagtccaccgatgatagtcgctttgtcactaaaggtagtcccagatagcgtataggtaactccccaacttcaaaagggaaatgagtgtggagctgagcccgagaagtactagagagaccagccgaaaaaatagtggatttctccatgcttattttaagacccgaccattttgaaaacagatcaaagacctctataatgccctcaattgatcgacattgaccatccgtgagtatcattaaatcgtctgcaaagctcaggtgggttaaccccatacgcttacaatgagggtgatagccaatacgtcctattcctacaaccttgtccaacaattttgagagaacgtccatacaaatcacaaaaagatatggcgagagagcacacccttgtctcaaacctctagaactctgaaaaaacccagccaattctccattgacttgtaccgagaaagaaggcgtggtaatacaaagtcgtatccagtgtataaacatttcaggaaaatgcatcgcagtgagagtgttgatgaggaatgaccattggactgagtcggaagccttagagatgtcgatttttattgcacaacgctccgagatagaatctttatggtagtctttcaccaaatctgttgctagaaggacgttttctattagtagccggtctttaacaaacgacgattggttgcctgcgataaactgtggcagcaaaagctttaatctattagctaagattttggagataaccttatacattacgttgcagcacgatataggtcgataatctttcatctctttggactccagtttcttagggatgagagctaggattgttgagttaacacctttaggcagaaaccccaaagcaaagaaggattgaattgctaaaataaattcaggacctaaaatctcccatgactccttaaagaattcagacgtgaaaccatcagggcctggagatttatcattaggcatagagaaaaggaccttttttatctcttctgctgagacaacacgggtaagcatttgttgatcggtttcggtgcagcgaaaaggaacagaccgcttattttctccactgaaacaccttcataatctgtaggtatgagttgtaggaactctctaaatacgaaatagcatgtcctgtcaggggggggggattccgtctgacacgcagagacatagagaagctcgtcagctcgtccgtctcaagaagctcgtcctctcgcctgcctcaagaagctcgtcagcttgtccgttcaagtagctcgtcagatcgcccgtctcacgaagctcgtcagctcgcccgtctcacgaagctcgtcacctcgtccttctcaagaagctcgtcagctcgaaacataattttgtcattttcttataaatttcaatattataaaatttgaaacttaaaaaaatacaatatcgacccaaaattcatcattgaattttgattgttatatttaagatttttcctgtaatatatcgtctcgtattaatatattttttatatatttataatatttaaatttcttgtaaaattcaatttataatttttaaaacgttataagttttaaaattataaatatttaaagcattttttaaagataaactttataaaaaaaaattaaaattataatatttaacttttgataaagttataatatttataatttcttgaaacattttaaagtttcaattctttaaaataaaaaatccgagtaaaatcggataactattttaattttggacgcctgataaatcaagcttcctgcttattcgtaattagaatcattttggtccttttataatatgggtctgaaccattgtccaatttttttaagcgatgtgggacattgtacacatattatttcttcataggttgaataatatatgtccattttaaaaaatttgaattacatcatattcagaagaaaatataatattttattaactatatatattttatataaattcaaaataaataaagtataaaatcaaataaaaatgaaagaagaattatatatttatgtttaaattaggtagaaatattttaggaaattagttaaggtaaataagaaatatggttagtttagagatattgtttatattaaatttggtaattaaatcattaattttcgtttttaattattagtttttaggtaacttttccaaaaattaatgttatccaagatcagaacaaaattaaacatgttatccaggatccgaacagagttaaaccgggtaaaacccacccatttgaattaattgttgaattatggctcaaatcttcaacattatcttcaaaaacctcctacaaaaatgtatatatagatatctcacgagagttatatggtgggacgggtttggatcgatattaatacaaatttataatatcatcaacaaaaagtaataatacggtttaaatcttgttttaatattttatcagcatcagtttttttaattgtacatatataaaattattaactttaatacacaaaaaaatcgtaaaatctaacattattgtctatactaataaaaaaaatttgtccgtcgtaccacatgttaaatcctaaaattgtacactaaattatatatatatatataaggtttttatattcaaaaaaatacaaaataataggttatataataatgataatcaattaagcatattacattttgattttttctaaaataatatagccccgcggtataccgcaggttaaaatctagtgttcattaaaagttaaaaggctataaataaaaatagactacataatgggtagaattaaaaaatgatagtcttggaaagacattcctaacaatttgtctaatttaaaaatggtaaaaacaaaaagtataatccatagacggttttgtccgctccatcaactttaatcgtttcagaccttaggttatattttccaaatttgaaaatcctaaacacgaaaaataattgatcagacaaacttgaaaacttcaaactccaaaaaaataaataaataacccaaacctttttctataaaaaaatctcatatatttaatggaatatttaaaattataatggttaacttaaccatggttaacaaatttaaccctagggcttagattctgaccacctctatatagaaaaaaagaaaccctacctcgtcgcagcccccaataaatacctcagcagaaggaaaacaactcttttcagttccattgcttatcattttctctgtttctttattcatttgtgttttcgttttacattctttctaatgttttttatttaacatcgagtcttatgttgctcgatatatatatatccatctgattgcaaatgatgagttaaatcaccattgataaaagaagctcaattgagcagtgttggaaatctaaaacttccatgactctgatgcaaattttgatcaagaaaaatcatatccttgatcttttttttctgttctttctcagattttgttaataatcactgaattttgcttttcaaatgtatttttctgtttaatcttaataattctctgcgtatttctcactagcgtttttaaatctattttttctattaatctttagtgttttttactaacaaggctgcctaaaaataaaattgaatttgatcaagtgcaaattgtactgtacaatatgtaacgaatttgatcactatataagtcacaatgatgagaaagtgaaccaaaaagcttcattcatatacaccaagacgaaaacatgaagaagatggaatcaatcagaagcggttttggtgccccaatagccgttaaaatgttgatattattacaaatctcataactaaacaaaaaaattaaccaacaatttctaagaatcgatgttttacgacgcatcgttatcgttgtctccatcgaaatattcatcatccctttggatctgcttatcccgtgaacgctctgaaacattccatatataacattagtcactaagaaaacaaagggactaaagtagagccttgaaggtggttatcgatacttacgatccacacgtacatccgggttttgttcgtcttcatcaaaatccggtatgtagaaatccggtggaacctaagaaattcaagtaaaaaaactgatcagtgtaagattgataaaagcatcaatgtgtcctatgatgatctgagtttacctcctgcatctgtacgcttggagcgtgttgaatgtatcgcaaattctccaaaatctgcactttgatcgaactgatgtacgatttggtattaagattctcctgttttcatttcaaacacacaaaatgattctcaatctctctttagattttgttaaagcaatgaggaactataagttacataagagctccttacaatgtgaccacccggtatcttcaaagaaaaatccggcgcaaaatactttatgtagtcgttttcaggaatctctgcagaaacaattaacccctgagccccaaaacattaaactttctctgacaaaatattgaaacaaacttttactaaccattaggaagttctgtatccaaaagaatgccagtctcaacggtccaacaacgagctacattctcctttgtgtatcctccacctcctgtaacctaaacaacaatcggaaaaaaactgacttattcgtagagaaattaaacacattcagcatgtcctgtgaaaagcatagagaaagccatttcaaaacccaattcgcaaagaaattagcaaacgggagattgaaagagagaaagagattttgattacaagaagaaaaagcaccatcaatagagagattaaagcatcctagtcgataatatgagtttgaatgtttgtagaggatatattaaaggcttataatgtgtggaaagccagatgcagataagaaggtaccgttagtgtttttttggtttttgctggactttggaactctttttaggagatttttcagagcattttcattgaatttttaggtctagctaatgtgagtatgaatgtttgatgtttgcagaggatatattgaaggcttataatgtgtggaaagcgagagggaatttcccgcccgatgcagataagaaggtaccgttgttgtttgttgttgtttgctggactttggaactctttttagaacactttcattgagttttcaggttaagcttatgtgttcgtattgcaagaaacacaatgcaagtttgttcctgatccatatgatggtggagctcaaggttttgagaaggtaattaccattagagactaagccagttgtggattagtaactttttggtttaggcagatgctacctataaaatttcagctatgttgtcttttcaaaatggttgatttggtttataagactttactatggcattagcataccattgttgtcactcccaaattgccttccgttcgagaattttgcaagggggaatgcttatatttcctgtttgatctattttgttaggacaaaagtcacttggaaagttgaatcttgatctgttacttgtctagttgtttctttcataggtactggacttgctagaagatgcttgtgagtctttgctggacagtattataacagaaaaatgatgtgaagcttgaaacttgctgatataaatcttgttaaactgaactctttacacgattgaatgatatgaactctttacaagattgaatgatattaactcttttgttttatcattattattattaggagagaaatagaaagaaaaaaatatatattgtgtggacgtaactttgtttgagacagtgaatggtggagcatagggacagtaattttgtcgtttgcaatattttccacaaaatctcactatattttccaggaaacatccatggagtttagagtcgtcaacgatctatatcttcagtcacacaaatcgtttcaactacaaaaattacactaaacccgtgtgattcttcaactctctagagatttctcatcctttcatgtatcggtgagattttccaactatttttaagttttgcttaaggttttatcactgtggaatcgaattgattggactggctcttgatgattatgctgatattgatgctttgattagtgttttgagctcatttcttgattatgtgttcttgattttatattaatttcttgattcatcgataatcaaagttctcatgggttctgtaatgagcttgggctgttccaagaggaaagcaacgagtcaggatgttgattccgaatctcgtaaaagacgaaagatatgctcaacaaacgatgctgagaattgcagattcattcaggatgagtcatcttggaaacatccatggagtttatgtgtcaacggtctgtatccatgacactcacacagaggcctcttcctctttgttaatccttcatccatcttaaatcttgattcactttttactaataaattattcttattttccttggttcagtggcagccgcagcttttacaaaattcagattccaacaagacaacaaatatactaaatcttctgctttatctcttccatctcctccaacttcagtgtctcgaatctggaaacaccacgtcttcccgagcttccacggggcagatgttcgaaaaaccattcttagtcacatcctcgaatcgttcagaagaaagggaattgacccatttattgataataatatagagaggagtaagtcgatcggtcatgagctcaaagaagctatcaaaggatcaaagatcgcgatcgtcttgctctcaaagaactatgcttcttcatcttggtgccttgatgaattagcagaaatcatgaagtgtagggaattgttgggtcagatagtcatgactattttctatgaagtggatccaactgacataaagaaacagaccggtgaatttggaaaagccttcacaaaaacatgtaaaggtaaaacaaaagagtatgttgagagatggagaaaagctttggaggatgtggccacaatcgccggagaacattctcgcaactggtttgtcctcttgatttctactctccataattaagatttacttgttaaagtgtattcgttcagatcttcatgaccattttgtcataacggttgtatattgatttgatatctatcctctaatgtcaggaggaatgaagcagacatgattgagaaaatagccactgatgtttcaaacatgttaaatagtttcacaccatcaagagatttcgacgggttagtagggatgagagctcatatggatatgctggaacaattgttgcgcctagatttggatgaagtaaggatgatcgggatttggggaccgcctgggattggtaagacaactatcgccagatttctgtttaatcaagtctccgacagattccaacttagtgccatcattgtgaatatcagaggaatctatccaagaccttgtttcgatgagtacagtgcacaattgcaactacaaaaccaaatgttgtcccagatgatcaatcataaagatatcatgatttctcatttaggagtggctcaagaacggttgagagacaagaaagtgtttcttgttctcgatgaagtggatcaattaggacaactagatgccttggcgaaagaaactcgatggtttggtcctggaagtcggattattatcacaacagaagatctaggagttttgaaggctcatgggataaatcatgtttacaaagtgaaatatccatcaaatgacgaggcttttcaaatcttctgtatgaatgcctttggtcagaaacaaccacatgaaggtttcgatgagattgcatgggaagttatggctttagctggtgaactccctttgggattgaaggttctaggctctgctttgcgggggaagtccaagccagagtgggaaagaacactaccaaggttaaaaactagcctcgacggaaatatcgggagcattatacagttcagttacgatggcttatgtgacgaagataaatatctccttctttatatagcctgcctttttaactacgaatcaacaaccaaagtggaagaggttcttgcaaacaagttcttggatgtgaaacaaggtcttcacgtattagctcagaaatctctcatatccattgatgagaattccttatatggagacacaataaatatgcatactttgctcagacaattcggaagagaaacttctcgtaagcaattcgtttatcatggctttacgaaacgtcagcttttggttggtgaaagggatatatgtgaagtacttagtgacgatacaatagtaagttttgccattgcatcgccccctgttaattgagtttatttgataacaaaccatcattacttatatttcttttggctttatttcaggatagtaggcgttttatagggataactttcgatttatttgggactcaggattatttgaatataagtgagaaagctcttgaaagaatgaatgattttgaattcgttagaatcaatgctctcattccaactgagagactgcagttagcactacaagatttgatttgtcattctccaaagattagatcactgaagtggtatagttaccagaatatatgtttgccttctacttttaatccggagtttctcgtcgaactacatatgagtttcagcaagcttcggaagctatgggaaggaactaaagtaagtagttttgatgaaaactctcatttttaaaaaaaatctagaatttgtttccgtaaaggtttattagccaattgtatcaacatgatcttctttgttaaatgcagcaacttagaaatctcaagtggatggatttgagtaattctgaagacttgaaagagcttcccaatctttcaactgcaactaatctcgaagaattgaagcttagagattgctcaagtttagtggagctcccctcctctattgaaaaactcaccagtctccagagattatatctccaaaggtgctcaagtcttgtggagcttccctcttttgggaatgcaactaaacttgaggaactatatcttgaaaattgttcgagtcttgagaagctcccaccatctatcaatgccaataatcttcagcaattgtctctaataaattgttcacgtgttgtggagctccccgctatcgagaatgcgactaatctccagaaactagatcttggaaattgctcaagtctaatagagctccctctttctattggaactgccacaaatctgaaggaattgaatattagcggatgctcaagtctcgtgaaactcccatcctcaattggagatatcactaatctcaaagagtttgatctatctaactgctcaaatctggtggagcttccaatcaacatcaacttgaaatttctcgatacacttaatctcgcaggttgctcgcagttgaaaagttttcctgagatctccacaaagatcttcacagattgctatcagagaatgtctcgtttacgtgatcttagaatcaacaactgcaataatctggtatcactcccccaacttccagactcccttgcttacttatatgcagataattgtaagtccctcgagagactggattgttgctttaacaatccagagattagtctcaatttccccaaatgcttcaaactgaatcaagaggccagagatctcatcatgcacacaacttgtataaatgcgacgttacccgggacacaagtgcctgcctgcttcaatcacagagctacttctggggattcattgaaaatcaagttgaaggagtcgtctcttcctacaaccttgagatttaaggcttgtatcatgcttgttaaggttaatgaagaaatgagttctgatctgaaatcgatgatttttgatccgatgcgtgtagacattgtcatcagggacgaacagaatgatctcaaagttcagtgtacaccaagctatcattttataaattattttatcatttcaacagagcatatatacacatttgaacttgaagtagaggaggtgacttccacggagcttgtctttgagttcatactagacaaggaaagcaattggaaacgaaattggaagataggagaatgcgggatactccaaagagaaacgagatcacttcgccggagctcttcgccggatctctcgccggaatcttctcgtgcgttctctctctctctctcactctctccttctatctctctgtctcatgaattggttaatgattcgatttctcctaatgggtttcaggtgtttctagctacgaccactgtttgagaggtaagaatcatgggtttgatttctccttgagtcattcgatggattcgattattggttttattttgtgtgaatgggaattagctgtgaaatatgggttttgtatggattttatgagttttgtatttgtcgtgtatttagaaagatgaaacattgatgttcaaagcttgctatttttttatctgtatagatagctccgaaggattatcttaaagatgaaacattgatgttcaaagcttgctattttttgtctcgttcaatatctctacagtgtgttttttgttttgtcttttgctatttatctaaccaaatgctttgaattggtttttgtgaaagtgattgggatcatcaataagacttaagtttagccacgaaagtcgtgtaaagctaatgtagttatataatgcttgattgatggatatctctattttgctggtttagggtttagggtttaggattagatagatcatcctactgaaccaccaaaaatggaaacgaacatcatttagatggattagtcagatgaatcatttggatggacatcccaaatgagcaaacgaacagacctacaaggtacaaacaacaatagagattgaattaaatttggtgtatcctatcaattctggagatttacttacataatgaataattaactgtattgcaaaatcaaatcacaaacttgttccaaagttagttctgctttatccattgatatagttcataaacttaaacaagacttgagaattgaacaatgatccaaatccctacaaatttagattagaccatcaaaacaaacatgatctacaagcatcagtgaattgtcgagaaggaaattttaaaatcgataaataactcaagaaagctcaaatcattttaaattctaatttgaatacactctccaaagagaagattggattgccggtaagtgaaatagagtttttgacctcaaggagaagaaaaaaagtgaaggatctctgaaaaaaaagataagagagatagagagaacttctcttaaatgggtctgacattgccgtattggtgccgttggacctttctacggaggttttgtgtttaccggcgaatcgattccggaggtcgaatatggacccgtcgtttttgtagaaatcgttgtggatatgggccgctgggaagcccaaaagcccattaaagaattttaatgaaaaaaaccctaaacttaatttttaatacaaaaacccctcatgtaagaaagtccaatgaaaaaatcattcaattaataatcagtcaatataaaacatcttactaaattattaatgcaaatcacctttttaagtacggagttttattaaaatgacccgtttatttataactaggtaaggcccgcctaaataggcgaatgaaaaaatgaattagaaatttttatttatgatatttgaattctaaataataaatactcatccttacttttttgatatttaatttattaaaaaataaattgaatttcaatttcacaatttcctttttaactatttatactttcatagtaaaatgaaatttaattttacactttgatgatatttgaattttaaatagtagttcacacaattttctgtatttattttattaatttttttaaaccaaattttaatcttacacatttcattttgctataaaatttaattatctatttcatcataataaatccaattttgattattctcacctcattttaatggataagtgttgtatcaaaataatatgtatatcatatcaaatctatatattagctcatattaaaataactaacaaatgacaaaacataataaacaaaacaaaaatgaataattcaaaaaatattttggaaaagaaacattgttaagatatagttttgctatatgccataatctcataagttagttttacctaatgtcaaactaatttaaatgacttcaaatttattaaataatcaaaaatcaatccctctaaaccatattttcctaatttttggtgttttcactaatgacaacatgcgttgaaattcttagactaagacaagtatgaatatactaatattctctctaagtattaaaataaaaatattatattacattgataaatacaattgaaattaattaatttaatgttaattaaattattttgttatttgaaacttcaatgttctttttaattagttaatatccatactaaatgattttgttttatatttgatacatgctaaaaaaaattaattgaccaataacacatataaaaacaaatttgttaatttttcgtttttgttagtaaaaataaatatttttattaatttatagacatagaatttagtaaatataaatttgtttctttttttaggttttctatttttataagagaataaaaaagttaaatcttaaataacacatgtaaacatttgatcgataaaattgacatgtgtcacgatcttatgagttactaacttcgaaaaccatactttatatggtaagattccgcttaaatatattttgtttaatcaattttgtgttaatgcttattaaaatatgtaaatataaatttttaaaacttggtaatgtcgatttaaaaatttcatcgtcgtgttaccgtcatccattaaatccttgtaagtctttttaaaaccactgtaaaaggttttaaaatcatatacaagagtttttaaaatccttataactcttataaagtcttcaaaaacatatgtaaatcatttttcaacttttcaaaaaaattattataaatattttacaacatttgtaaatatttttgaactattttaaaactcttgtgaacccttataaaaggttttaaaaagatatacaagattttttaaagagtcggatttacaagagtttttaagagttttggcagaaaattattgttgaaatatcttttgcgggaaaaatattattttattttgttaaccttaaactttttcaaataagggtaaaatctacatatacatttttgcagccattttaacaaataaatcttggacttggaacttatttacgactcaatgccactgaatatatttttttcaatcgacattttaaatcaaatatttaccaaacaaaaatattgcctaaaatctctctatattaactccaccattacttcaaaaaaaatctagcattacttcaaaaattatcattcctaaaatctctcataagtatttattaatttttggttttaatttgctgttaaaaaaaatcggtttcaataatacaaaatcttttaaggtatgattttctttccatatttatttaatatttcgttttttacagcatctaatatttcgtttataaataacaaattaattatttagcattcaagaaaatttcttctaatctatcctttaattatattgactttattgattttttaaatatatatgaatagagattcaaatcttccatatatgtttatcatcttctaaggaagttaaacaattattttctgaatctaaactaaaatttaggaaactaaatatataaataaaatcgttttaattattttctaagctaaactatattacactctgatctttagtttgaatcattcatttacagtgtaatataaagaatcaatctcatattttcagttagtaaaatgtacatgtattaagataatattattgcttcaaataatgtacaaaactacccaatttaggctattaaatgacgtgaaatacaggtagtccaaaaactcaagtacatatcaatcacaaattatgactaaactaaatatttatttataacattatctacattaaaaaaattgaactacattttgtagagttattttgtttagtaagaattacaaaatatgtcattacgtaaaaggcaaaaaaatattaatttttgaaatagattattgaaatattaaaacttataaaaagtaatatctcacgagagttatatggtgggacgggtttggatcgatattaatacaaatttataatatcatcaaccaaaagtaataatacggtttaaatcttgttttaatattttatcagcatcagttttttaattgtacatatataaaattattaactttaatacacaaaaaaatcgtaaaatctaacattattgtctatactaataaaaaaaattgtccgtcgtaccacatgttaaatcctaaaattgtacactaaattatatatatatataaggtttttatattcaaaaaaatacaaaataataggttatataataatgataatcaattaagcatattacattttgattttttctaaaataatatagccccgcggtatatcgcaggttaaaatctagtgttcattaaaagttaaaaggctataaataaaaatagactacataatgggtagaattaaaaaatgatagtcttggaaagacattcctaacaatttgtctaatttaagaatggtaaaaaaaaaagtataatccatagacggttttgtccgctccatcaactttaatcatttcagaccttaggttatattttccaaatttgaaaatcctaaacacgaaaaataattgatcagacaaacttgaaaacttcaaactccaaaaaaataaataaataaccaaacctttttctataaaaaaatttcatatatttaatggaatatctaaaattataatgttaacttaaccatggttaacaaatttaatcctagggcttagattctgaccacctctatataacaaaaaaaaaacctacctctctcgcagcccccaataaatacctctgcaccaggaaaacaattattttcagtctccccattgcttatcattttctctgtttctttattcatttatgttttcgttttacattctttctaatgagtttttattttctctgtttctttattcatttgtgttttcgttgtatattctttctaatgtttttttatttaacatcgagtcttaagttgctcgatttatatatatacatatacatccatctgattgcaaatgatgagttaaatcaccattgataaaagaagctcaattgagcagtgttggcaatcaaaaacttccatgactctgatgcaaattttgatcaagaaaaatcaaatccttgatcttttttttctgttctttctcagattttgttaattatcactgaattttgcttttcaaatgtatttctgtttagtcttaataattctctgtgtatttctcactagcgtttttaaatctattttttctattaatctttagtgttttttactaacaaggctgcctaaaaataaaattgaatttgatcaagtgcaaattgtactgtacaatatataacgaatttgatcactatataagtcacaatgatgagaaagtgaaccaaaaagcttcattcatatacaccaagacgaaaacatgaagaagatggaatcaatcagaagtggttttggtgccccagtagccgttaaagtgttgatatcattacaaatctcataactaaacaaaaaaattaaccaacaatttctaagaatcgatgttttatgacgcatcgttatcgttgtctccatcgaaatattcatcatccctctggatctgcttatcccgtgaacgctctgaaacattccatatagaacattagtcactaagaaaacaaagggactaaagtagagccttgaaggtggttatcgatacttacgatccgcacgtacatccgggttttgttcgtcttcatcaaaatccggtatgtagaaatccggtggaacctaagagattcaagtaaaaaaactgatcagtgttagattgataaaagcatcaatttgtcctatgatgatctgagtttacctcctgcatttgtacgcttggagcgtgttgaatgtatcgcaaattctccaaaatctgcactttgatggaactgatgtacgatttggtattaagattctcctgttttcatttcaaacacacaaaatgattctcaatctctctttagattttgttaaagcaatgaggaactataagttacataagagctccttacaatgtgaccacccggtatcttcaaagaaaaatccggcgcaaaatactttatgtagtcgttttcaggaatctctgcagaaacaactaacccctgagcccccaaagaccgcaaacattaaactttctctaacaaatattgaaaacctaaccattaggaagttctgtgtccaaaagaatgccagtctcaacggtccaacaacgagctacattctcctttgtgtatcctccacctcctgtaacctaataaacaatcagaaagaactgacttcgtcatcaatgaacttaagattacagaaacgcgtcatacatatatataagttgagagattagataccagtaagggaagattgaacttcttcacgaatttaacacattcagcatgtcctgtgaaatgcatagagaaagccatttcaaaacccgattcgcaaagaaattagcaaacgggagattgaaagagagaaagagattttgattacaagaagaaaaagcaccatcaatagagagattaaagcatcctagtcgatccctggctagtgaatctgccccgcattgaagaacaattgcacccggttgatatatctcaacaaccttggatattatctagagatcaaaggaaatgatgaaacacaaataaacggtgaacgcatcgagaatttttcattgtttttagttaaagaacttacagtcctgaaaagacggttgaaactactgtcatcgataccatccttcagcggcacattaatggcgtaaaatttcccttctctttctcctatttcctttttaaagaaaaaacatcacaatgacaattcaaccaaacacattgaaaccgtcctcacaaatcaggaaaatgaattctgaatattaccttaacatcgcctgtccctggaaagaacttatccccaaacttatgaaagctaacagtcattactctaccaccacaaaatttaaagatattggcaatcagtttctatagtaacagctttcgagaagtagtgttatggatttgtaactgtacctgtcagtgaagtaaaacgcttcttcaaccccatcaccatgatgaacatctatatctatgtatagaacacggggatggtgttttaacaactcaagaattcctagcacgagatcgttgatgtagcaaaacccagatgcatcacattttttggcatggtgcaacccgcccgcccaatttatagcaatgtcacagagtttgttgtttaacctgcgtgcagcatctatagacaaaattctcggtcagtcgtttctctaaagtgacaagcaaacatgaataccaactgtgtatatttacctatggttccgccggcgtaaagttgacaaaattcaaacaaatcttcaaagacaggacaatcctctcccagattatctgcaacacagtaacttaatttcagcttaacatgtagattacaaaaacaaattaatgaagacacaaaacttacatctagccatttcattggggaacaagttctggttttctggattaattcgttgcaggaactctacatagtcaggagaatggaactgagccatctcgataggatatgctttgtgtggacgctgaaacaatagagaacatatacagatttcaatcgagatgtaccgtgatatcataaacaaaaagaataaaaggatcaagaacaaaaacaagaaacatatatgatgagcaagagacactaacataaacttccatcttgctatgcaggccatatgcaaggataagatgatgggtcatacaaagcctgtgaggtttcatcgggtgattcggaccaaaatagacactccccacatcccctgcaacccaaaaaaaaacattcagcataacatcacaatctcatataaactgcctcaaaggctccaatcatcaacaagaatataatctgaaactcgcatcagagtttgaatcatgcagaaaatctgaagtacgaaaatgaaagttatataactatcaagtctataaaagtttctcagagaggaatctcgaaagaacacaatttcaaacattatatgcaatgccaaatttaacaaaagttctagggtttcatattttagcaaagaaataacaaagacttgaccaaaccaatcaaagaagtcaacttcacaggtactagagtcgtcttcaccacaagaaggcttctatcttaagcttaaactcaggccaaagaatcgaaaaaatcagaaacttcacctaaaacccttgttcttttcatcaaaaaccctactcaattctggagtatttccaaactaatcgtaaccctttacttattctagactatagatatgaaagatttcacctttcgatgcatcgattgagcaataaagacaaaaactagtgcggttcaagtggataaaacttgctcaagagttacatcaatctcaaggattttggagtttctttaccataaataaagaagaaaagggaaagaaatgaatataccatcataaaagtaagagattttgtccttggaacgcatctcttaaagaagaaaagacacgaagatcgtacgaaatcaatcttaaagaaagattatacagagatatttcaggtctgcttagattcagtagagagatgagacgatttcttcattgatgaagtcgcagagatttcacgattctccggcggagccgagaagagagcagcaacgaagcgaaaagaagaagagagaagagaagaacaaggggagagtcaaaagtgaaacgatgtcgttttagtgttctgatgacatgacagatgacgtcatttaaagtgtatttgataaaaagcggttttgactcatggttttataataccagaccggtagctttccatcatttgaaccgaatcgaaattgaatttgatactgtgtatataaatcaatcgatttagttatatcttcttctttctcttgtctggtttagtatacatcttcaatttcaaaacatgtaaactgaatcaaattcgaccaaggaatgatcacaatcaaaatgagaaagaaaaccaatttcgagattataatagtaagaagttgttagattatataaacttgttgagttatttacttgttgatctccgatgtcaatgtcactaccagagaccaaaaaagaccaacgtctcgtaaccactgtctacttgattgataggtcgatacaaaccaccgaccaaacaatctaaaagacagacaaaaatctcaacattttaaagtcaagttcaacgccaaaagaaagcatatctactaaccaagataatatcctccattgccaaaaaacttcaatccttgaatctgtttctaacctttttcagaccaaaaaagagccgagattacaactttaggatccttcgttttcacacccatcctttgaaaacctaggagcttttctctctcaatcttgtttggaggaatcaacaatgttgagagaaatgatgacctcaggagaggtacctcttatgggacttaccttttaggtttgggtttctaacctgatgcagtctatgtttcacatgaacacgtgaatcttcttcaacacgcccacctaaccgctcctttgcagataatcgacggcgtcgagttgatgtgtgatcaacattaccagaattcctttcatcagctgagtatcggaattgttctctgcttattcctccatccactgcatagttccctagcttgtctctgtaatcatatgctacttcatgttcacggaaccttttactatctgccttctcataagacattcttgattgcttagcatccctgtagttgtaatcataaggcatattctcatgcataacctcacttgcgttgtctctaagaccataatcatctcttgtacgcaaaattgaatcattcgaatgataaacctcttgtctaccatcttgatatctcatattggcataaactttaacatcaccaccattacgtcgttgcaaacgctcatcatccaagtagacttgatctcggtcatcaaaaagatatctcctgcctcgaagagcttcctcatcttgcttgccagctgatgatctactgacatcaggatgcatcaccccatacgaatcaatttcatgatctcttaggagttgctggctttcatagggcaaataggcttcccttccgtcattcgaggacattcctttacgctctagagctctagcacctcctcggtccacaatctctgctttggtgacagcaggatacatcctctcatcaatgccagagtcgtagtacttcagttgttgtttattgtaatgctgataaacatccttgctttcattatccaaatacgcttcatttctatcaatgaaggctactctcctaagctctagcgccttggcatctccatggtctactataatatctgacgagttgacatcacgatatatcctgtcatcaatgccatagtcatgatctttcttaagttgttggctttcgtaatgcagatatgcatccccccttttataatccatgtatgattcctctccatcatcgaaggatcctcttctacgctcaagagctctggcttcttccccgtttacaagaatatctgatttattgagactgggatgcatcatgccaaaagagttagtttcatgatcttttaggagttgctggctttcactttgaaaatatgcttcctttcgatcatttaaggatactcctctataccttagacctcttgcatcttcatggtctactagaatatctgatctgttgacatcaggaggcatcatgacataagagtcagtttcataatcgtttaggagttgctggttttcacattgcaagtatgcgtcctttttatcattcaaggacactcctccatacctccgacctctggcatcttcatggtctaccagaatatctgatttgttgacatcgggatgcctcatgacgtaagagtcagtttcatgatcgtttaggagtcgctgcctttcacattgcaagtatgcttcctttttatcattcaaggaaactcctctatacctccgacctctgccatcttcatggtctaccagagtatctgatttgttgacatggggatgcatcatgccataggagttagtttcataatcatttaggagtctctgtctttcacattgcatgtatgcttcctttttatcattcaaggaccctcctctataccttagacctttggaatcttcccggtcttccagagtatctgatttgttgacatcgggatgcattatgccataggagttagtttcataatcatttaggagttgctggctttcacattgcaagtaagcttcccttctatcatttaaggaccctcctctataccttagacctctggaattttcccgttcccagtctgctagaatatctaatctgttgacatcatcaggataaatcttagcatcagagcgagagtcataatctttctccagttgttggattttgtaattcagataaacatccttcctttcattatccaagtatgctgcctttcctttgtttaagcatcgtcgttgaagctgcactcctcttccatcctgatctaccacaatatctgccatatctacatcagaatgtatcctaccatcattgccagggtgatactcgtttctcagttcctgtcttttatcatctgaaaaaacagcatttctctcattatccaaatatgcttccctttctttatttaagcaacgtgttatgctctgtgaagctttatcatctcgatctactacagcatatggttcactgaaatcaagattcttcttactgtcaacaccatcatatagataatcctttctcagtacttgacatttgttatccaaataaacaacctttctttcttcgttacggaagttcctgtagtgatcatctcgttcatccaccactcttgatcccaactccacaaaaggataatcttccttcacagactcataatggtcagccatcctctctttcctgctaaactcaagatgggtatcggccgcatcaacatcagctatatttgaaccacagacatgggattttgataaagatcctctcctctgcataaaaagatcattctctctagccacattattgacctcatgcctaacactgggaaactctctcattgctatatcagagcctatatgataattatcccgagcttcatccactatctctttgacacacctgctcacaactggtgaatcatggtctccacgacttaaatctctaacttgttgatcccttggtgagtttctaccaacataatcatcgacacgtctagtacgtagaacctgtggtacacaaagattcccatcataatcatgtcttcttctctcatcggaatcattcacacaaccgaaagatctagaatctgaacttacaagcctagagctttcatcttggaaatcagcaacactagacccaacttgtgacagaggggatgattcatatctataagtatctctctctctaccatcttcactatgacgagatgaatcactacactcacgagaaatcgattccaatcgtttagttttatcgttccttagcaacacattaatcttcccatgagatggagaatactcatcatcatgcgatgtgatgaatctagagggcttaggttcgtcgctcaatctcgatggatgatcatgcgatgtgatgaatctcgatgattccggataacgtttgccggaatcttcctgaagatgataatgtttcgtataacgttcatcgtctctctcttcttcttctcgtcggtccttattagaaaattcagtgcttctttgaatctctacatcgtacagatcagaatcttgccggattccgtcaatatcgtgtttctgttcgtcgactctgtgagaaaccatatcgattttatcggaacggcttgaaacatcgccgagtttaatcatgctcgactcgttcccgtcacggtcactcgtcggagaaggtgacgacaatcgttgaggcagagaatcgcgaatccgctctctcattaacataaccagagattgcaatcggaaaaagttgacagatcgctagagaacctgaacccttaaaaaaagctaaccgtcgaggaagaagaagaactagggacaaaaatataggctggtctggtcctgggcctgggcccaagagccgttttacaacattaggcttgtgcatgtaaaatagttcgtcctcttgaatttttttgtttagtgtttaatttgaataaagattttatcttataaactacgatagattttaacgaccatctcactaattaaaacttttagccatcacattataattaacattttaaaaatataacattttctatactaagatattcataaaaaggagaaaaacacaatatatgtgacaagaagagaaaataaacttttgaaaaaagcaacatatgaaaataaaaaaataaaaatttaggtattataatatactactaaactagattttaacccgcggtataccgcagggacaatttattttttaaagttagtatttataaaattttgcaaattctatctatctatttataaaatatttttgttttatagtttacaattgttattaagtaacgtcctgtcaaacccgtcccgccaactcgttccgtaaaaaaaacttatcgatcttatttatgatatatttatgaatcattgtctaaatattttgtaattttgtagtaattaaatgctatcaaatatctctgcggtttgatgattataatataattgttatagttatgtagaaaaacaatataaaaatgataattttgtagtagttaaatgatattaaatattttgaaagttttattttacagtataacctctataaattaatactcgataaattaataacctctataaactaataaaaaaatgcggtcctgagttgggaccagtgtaaaaaatgacacaaatcgataaattaataagataataattattttaaaatccctatgtaaatatattgtcccattaataacataaattaatagttgtaaaaacttcttaaaatatatatatatataagttatatgttagaaatattagtaatatatgaatctgctattatttttatttttattatactaattcttagtaatgttcaattttaataattttactacatcgaaaacacttttttgttattttatagacacgataatttagtcttatttgcaattacttctagaaaaataatgattataaataaaaacaaattattttaaacataatattttttaaaaattacaaaattagtctaaactctctataaattaataattattaatttattgataaattaatacctctataaattaatagaaatttatggtcccaacattattaatttatagaggttttactgtagtaaccaatcgtgtggttaatgtggagagattttgggaagattgtcaaatattctgtcattgtaaataagtctcaactacaggatttatttcacaaaatggctgcaaaaatgtatatatagagatttagaaatatagaaaattataaatcacaaaaaataatacatttctaatcaacttttaatatgttttcttaatatgtatgattttcctttaaaaaaagtgatacatgtattataaccaatagcaagtattgtattgccatttctagccaattgagataaggatgggatttgtcgaaacataatggttactttctctgcatatttgtacatgaaatgcttctataggcatgagacataactatcatgcatcttatcatcgtagcacacaatacttggaaattaatgagaaattcgctactcacccttcatcttttcttttcttttgttctccaggtcaagatgagatttttgagtagttatgcaagtttgtctcgctcttggtaaattttaggaatcggggtgttacaattggtgctttcccaagtccgataataatatagagggaatatcgagagacaagaaacgacttaaaataaaaaaaaataaaaaaaaagaagcaaagacaaaacaattatctttaaaaatatgtaaaaagatgcgagtctactaactacgaggaaataacgaaacaagaaactacatattaccaagaatgaatttattggatctctactctgtatagacctcaccagtcacttcggaggacgataataggcatacactgcaaagacggcttgtaatgtcgtgagaaggagaatcgtcaaaccagtgcaacatgaaagacatgtgcgaggagtatcgtaagtaagctgggtattcttgaataccgaccaatatgcatgccatcctcgtgaactatattcattaactccttcgaaaacatcagctaagtaactcgcgttgagataaaagtggctatctgtaccgatgaccttatagaattgagagatctcattcactgatccgatacagtttgttataattcctttgcggcaaagcaatctcgcatcgtcctcgttttcgagaagacatcccatgaaaaaaacgtagcttgttatgtgcttggtacaataagcataaaaatcttcaaaggcaacacaattaaagaagaacaagatgagaaattcatcaaagatcattggtggaatctcaagaagatttcttttgtgtcttatatccaatagcgtttttgcattgttcctcagttcgaactttatccccctaaaccgaagatttgttgctgaggggatcagttttagaaaagggcggccgcgacgaaggtagcgaggaagacccagttcttgtttttcttttttaggaataagaggcatggtaattattcgaatcagatcaagaagatgttttgcctctaattgatggtcttctaaacaatatggtatatctatggaaatagaaccctcgaagaaactaattgttatctcaactagccctcttgacgtcccaatcttcgatttgtcataaatagtttgaagaagaaagaaaggaacctgattctccaaaagtagtaggtcactcctttagccgttaaaatccatttcattccgaaaataggatccttcacacgctcagggtagctgacttttctagctaccaccaggaacaaaatcagaatgaaacaacaatcaagaaccatcatatcaatcaatttcttccgaccagatacatcaccattataaagactctcggaataggactctcttatatcttcttccaactctgacactgcttctatcaaatccttcatatccacacccttcttttgagcttcatccatgaagatcccgagaaatcgatgtttgtgctcttgaatcatttggagatgttcttttccatgatggtatggaccgattgagagaacccttggttcgtaagcgtccttgtagttgttgttccggagtctctgatggattctaaagatgcaacacttttctccaccggctgatttcttgagaagcttcgggaccgaccctcctgaaattaaatcatgagatttttctacaactatatctataccaccgttgtcttcatcattgtttgccctctttgcttcttcacgatggttcattatattattctcactctcttttgctggaaaaatcaaggaagacgactaaaaattgtatcaggacccggaaactcagctttaagaaggaaagaacaataaaaaaattattattggccagagagaagagcaactagtctaatacatttaattggagagctcaactacaatgaatattaacggttttaataagatcattgacctctaaaattaataagaaatgaccattgaataatcactaaactaatagtagtcattataaagtactaacaagtgagtaccctaaaaaacggatacttgtgggttacatctaaattaaaatagttacattccagtaaatactcacttgctaaaattaaaatatttaagcttaagaagttagatttaaatttaaaaatattgtaagaagttgtttaaacttcaaaagttatataatagattaagtgaagcgtaataattattaagtagaattgtaaagactttacatccatgcatgatcatcacttttatttaaaagaattgaggaacaaatatattaagaggaaattgttatttaatattctaattttagctattttaaatataaattttatattaaaaaactatttaaaacatcaactaaacgttgactgcagtgacatctgggttgacatggcgaatacatatatgacgttaaaatccaataaaagaaccactaacggtcgttatcaagcgttaactgctatattagtcaaatcaccaactttcagatttagactattttaaacatgaacttcgtttcatcaactaatcgttatctgccatattgaacattagattgtattgacccaagccaaaaacgataggacgttaaaatttgataacataaccactaacaaccgttatctgttgttaacgaacaacaaaactaagacaaaagaaaacactatccaaagaaccaagacacaaaccaaacaccaaaaacacaagacactagtaaccaaaaatgagaaatttgttgttaattactagtgtgcagatgaatggtgagatcgaggtaaacgttagacattagacaattattaaaaaaaattgagaaaaatgaatagatgaatacttaatttgaggggaagcatgatgaagctacataacatatgtatgcaaatggaacaaaatgaagatattatctcgatataagtgagtttgtcgtttttgaattctatagattcttttttaaaggaggaatgctcatatataagagtgtttatggtgtggaattcacctagatggatgtttagtgttaggcactaaatgaaaaatttgttcttggtggttagtggttaatctttgataacgatcattagtggttctgttatcagattttaacgttattgtctatattggtcaactcgatcaacgcagtctgatgtttaaaataatatatcataaatttatatttaaaataggcataatttaaatattggaggatgaaatgatatttttcccaaaatattttttaaggagccaatttgacattgaaaagaaattaaatttgcccaaaaaagaagaaagaaaattaaatatttaatatggggcagctgcccattcgttctcctagataagggtgaagatatcaaatggatccagtcaataagactgtacagaatttaattaactaattaaatgtcaagttgttgagagtagcatcatacattcatatattctatattcacgttagccaagccacaccaaattaacaaacaaactcacaactcaatggttatagacttagaaactagtttgagtgttaacgtagcaacctttcttcttcttcccatactatgagcaagagtgcagatatcaaaacggatccagccgaaatacaaacgaggtctgatctttaatgatccatatagtttttgatgtaataattaaacgtatagtataatatcattcatgatactatttgcaaaaaaaaattcttttatgaatttagtgttaaattatattcaaaagaaaaaatcactatttgttatattaatatgcatactttccatagaaaccaaacatacaaaattctatccttgatttcttcttgtttcaaaaccatggtacaaatgccacctttgtaattcaagaggcctccactcgtaagcgtgctgaaccagttttgtaaacggcctgagcctaagagcgggtttacaacattaggcttgtgcatataaatagtttcttttttttttcttttctttttttgtcaacacacatgtaaatagttcgtgctttagaaatttgtttattgtttttaatttgaaaaaagatttgatcttctaaactatgatagttttttattcgtaaatcgtaactacaaatcataaatcgtaaaaaggtacagtaaaacctctataaattaataatgttgggactgtgatattttattaatttagaaagatattaatttattgataaattaatatttattaatttatagagagattttcctaatttggtaacttttaaaaaatttctataagatttctttcattagaaaatatatttctagaatcagttacaagtaaaacataataataatgtctagaaaacaacaccaaaagttttgatacgataaaatatgaaacctatagtcaaacaaagaacaaatatgaatttaagcaaaagtatattataaatatattttaaagaaattttttacttataatatatatatatatatatatatatatatatatttgatacatttatacaattattaatttatgatattgatgggaccatatatttacatagaactttcaaaaaaattattatcttattaatttatcgatttgtgtcactttttatattggtcccaattcgggaccgaaaaaatttattaatttatagaggttattaatttatagagtattaatttatagaggttatactgtagtttttttaaaccacacaatttaaagttttccaaaattttaaattttacaattgaataaaacaaaattaaatatcatttaactcattcctttgcaaaatagtagatgaagggttgaacaatttttctttataatttgggaaaaattacatcatttgccatatttttcaaaatccttatgcaatctgctatatttttcagggtcttacaactcatgccacatttggttggaaaatgtccattttgtcctcatcatttcttctctattttatctctctttcctcgatatccgtgcattttgaccatacaccattatctttccgaagacaaaacgaaacgttttagtctctctatcactttccctgacaacctgcacagattctctacatgtaactttcaattaaatttgtctcccaattttattcatcataaattctctgttgtatctagatcttgtccccgattttatcatctttcaaaattatcatataagatggcaaaaatagatggcaaaaaatagatggtttcagtttcagcatctctgtgaagacaataacgctcaactaatctgtggaccaaaatagatggcgaaaatctaaataaaattctaaattctaaaatgagaacaattgcatataagatgtaggattcataataatagagaaacatgatgaaatcgaggacaaaacgtagatgcaacagagaatttctattcggagacaagatctggagactaaaacaaaagtcttcctccaattgttctcctctaacaggtaatcatgtcccctaatgcattatatattacgttgtcccccaatattaggtaatcatgtctcctaatatattatatattacgttgtcctccgcagaattttggataaccaatttgcttaaataagtcatttttaaatactcaataacaaccgtagaagccacctgttctccaatattctgttccctaatcctttatgcttccatcatgatttttcgtcatgtatcatcacatcagccaaaagttgttatgtcaccatcttcgtcagagcgctgacccaccttaaaggtaattttgtccacgaaattccacgtataattaaatgtggtagattttgtaaggcaactgaaaatatgacatggattataatttttgagtggaatatggcaaattttgcaagattccctataatttattcatttttttcagtttttttggttaaatagttaaaaattgagatgaatagtcatttaacattttcaaccttttattttacagtcacatccaacatctaccgccaaaaatctattgccaaaactataaagcgacaactggaaccaattagcgcagcattttttctttttctttcttttctgaatttatttttaattttcaagtaaaaagaaccacatgtgaatcgaaaagtatccaatataaaaaaaaatcttgacacccggttaaccctagatagatccacaggctaattaatgactaggatactaatttagtaaataaataaatttaccacttgttacttttttaaattgatcttatacagttgaggacgcacctcatgaatgacatgaaacaaagacttgagattataaaaatgtaacctccacgtcaatgtgtgatgtgaaccttacccccaaaaaaaaaaatatatgtgtgctgtgaagcgtagtcgttattaaataagagtatgaagtctttaattaatgaactaaaatgtgaagtgtcggagcacatcatacatgatacatccataagccatgacttctaacgttctatatatatacaacaaacaactcacgttagctaagaaataccaaattaacgaacaaattcacaactcaatggatctatacttaataaccactttgagtgcgagcgtagcaacctttctttttcttcccatactatggataagagtgcagaaatcgaaacggatccacccggaatataaacaaggtttgatctttaatgatatatgtagttctcaacatactaattaaacgtataatataccattcaaactactattcaattactttataaatatctcttctgattttctgagaatttttgttggttttgaatttctctcaagaaagtttctctattctacgtagtagctatggaaacttgcttcggttttgttttttttaactttttaaaaaatttccagttttcaatctcgtaaatgaaatttacatatatattcaagtgaaagaaaactttaaggaccatttttagctaagaggttttcaaattaactttataatttaaagcactttgatacgtacgtttctattctactagaatctgatcctttcagtcgagcggatcatccaatagaaattatttttaaaaaaaagaacaaaaacaattaacatacaagaacataaaaaatagttaaataacctcttttatgaaaaatgcgagtttatgaaaaaaaaaaaaaaaagataaagaagaaagtaaacaaaaagtatataaacaaagaagaagaaaataatactacgtgcatgcttcaccgtaatcgaaagagatgaaaggaaatggtcaaatgtctacaataaagacgacaactaccacagttttgatgcttattatttggtatttcagccacaaaatttgttgtgttgattatttttattaacaggaatcacgatgggattaattcttcttttcgcacttgtggtattatgcacaagagcatatacggagtatgcatactataccgatatatttcaactaggtttgtgaatgtctcaaatattccaaaatattcataatctcatttgatcgcgatcagttcacacacactttttgtgatgaaaatagctacacttctcgtttgtgccctactcttcatgttggtaacaagaaagtgttgcggagaacgaacgaacaaactaggtatacatgccaaagcttctctgtatcgattagttttcattttttttatcattatgtgtagtcatatatgctattcacatttaataagaaaacgtatagtatattagtatatattattaacacgtacgtataacacaactttgcaatactatatgcttttttttaataagaaaaaatatttgcaggaataatgatatcggtagcagttatcatgctcatgttggtggtaatagcgtggtggggagaacgaatgtacgaaataggtatatatgccaaagctctttatctcttttctttgttcattttctatcattatgattagtaataaatgatattcacattttaacaagaaagagtatagtaaattacaaacacgtataatatagtactttgcaatactatgtttcaaaaaaaaaatgtatttgcaggaataatcataccgatagcaattaccatgttcccgttagtgtcagcttttgcgggagggttaaccccaaaatactcacaaggtactaattaaatagacaaaatacttatacatattacatattactattgtgtatggcactaatgttcatttgagttgtgataattctgaacgttttcttattgcaactaattatataattttttgtactttgttcttcctgattttccgtaaatgatcaatagagacgatatcgccctctgctgtcacgtgcaaacctcccgagaacgcggccatgtacgagccctctgctgtcacgtgcagacctcccgagtgcatggcggccatgcccgagccctcgaaaatgctggtgaatcaattgatttacggcaaaatatttaacattataaagataaaatccaaagtgtagtttcttgtgtgttcgttgccttatgtatgtgtcttctatgtggagactccataatggagtgtagagcggaattgatctacgactaagatgtctacttccatatcgtttttacggatgaattattcgtaaacaatctcatttatatgttttatctatttaatactttcgaatattagaagtttagaactctttatgcagcacaataaaacatatctacaggtgcgatggcgaccttttgtgcgattttttgtgcgattgtaacttctctttggattggattttccgtctctttgaagacggttgttggcagtttcgccggcgtcgtggggcagtttctcctctttggtcgtcaggcggttatctccacgtcgtggctgatcccattacgtgcaaatgggacagtttatgagtttgacggtgactatatattcgaggagatgcctcacccttcaacacttgcaatccaatttctccttctcatcactacctttcctcttcgattctataaaaatctggcaaaaatgggtgataacttaagacgagcggttcaagacattgacttgggggctgacgatgttccaatcgcaattccggcggatgtggtggccgttgctgcagcagagaaccgtttcatactcatgggtcggccggtgataccaagacggcagaatgtacgctctattatagcgtctatgcctcgggtgtggggccaatcgagccttgtccatggcagaattgtgggtggtaaccagtttcagttcatctttccctctgaggaatccttggcgacggtcatgcgcagaggtccttgagccttcaatgatagaatgttggtcctccaaagatggactcctcttgagaacccaccgttaatcgacttcattcctttttggatccaagttcgtgggatcccgtttcacttcctcaatcgcgacgtgctcacacacattggccggtctattggtaatcttctggatgtcgactatgatgcagaggcggccgctagggtggaattcgtttgcatccagattcactgggacattcaacaaccgctacggtttcagagatattttcaattccaggtgggggttaacactttgcttcgcttccgttacgagcgcctccgaggtttctgtgagatctgtggcatgctgacccatgactccggagcctgcataattccaaacggcggtgctgaccacatcccagagggaaacgatgacgacgatgctgcaatccctccacctgaccgtgctcctattgcagacatcaacgctatcccgagggatatcgatgggaatgctgaggacgaagcgagggctgacatggatgatggagaggccgaagctgatgcccttgatgacattgaccctaatcatgatgcgttgggctctcataaagagatggaagggagagccggggtttacaattggtggaatgctgagggggaaacaagcagtgtcactcatcccacttatgcagatcttatcaaccgtatgggccctctcccaactcctaaccttgacgacactgctggggttcgctcctcggaccgtggcaagagaaagagagaagactcacctgacgagactgtgaagattgaaaacgtgacgatggtcatccgggagattggtgaaagcagtggctgctcgggtgaagcttctcaccctggacttgagcgaggcgcggtgggcctagaaccacctcttccgccatgaggacaaccgcttggaactgtagaggactaggcaatgacctcgcagttcgacgtcttaaggagatcaaacgaaagttttctccagacatcatttgcctcatggaaacaaagcaaaacgacgaccatgttcgtgatgtttgtgctgttttgggatatgacagagttataactgtcccccctgtaggattaagtggaggaatagccttaatgtgaaatagtagtatttcagtttctgttctttttcaatccccaaaccttgtagatacccatgttcaatctaatggatttgctttctatttgacttgtgtctatggcaatccaaatccttcattaagacacttggtttgggaaagattagaaagaacagcaactactcgaaccggaccatggacggctattggtgacttcaatgagataaagaataacaatgagaagcgtggtggtcctcgaagaccagaatcatcgttcatggattttcgccgaatgctacagatatgtgactttgaagacctgaagcactttggtgatccatttagttggattgggaaacgttatacccatgatgtggcttgttgcctagacagaacattggtgaataatgaatggctcgctgaacatccggcttcccactctgagtttttggaatttatagaatctgatcaccgaccagtgataacaactatctccaatgacttcactccaagacaaggacaattttactttgatagcagaatgattggtcaggatgggttcaatgatgcagtgaagatgggctggaagttgagaatgaggggtcatcatgaaggcattggatctcgcctaaagaattgtcgtacggaaatttctaagtggaaacgaagatatcgccggtctggctgtgatgaaattgtcttgcttaaacatcgtctggataaggctcactctgttggttcatctactcaacaattaagagatctgcgtcttcagctaactcgggcttatgaaaatgaggaagaattttggcgaatcaaaagtcgaaaaacttggctatcgagtggcgaacgcaatactcagtatttctttgcctctgctaaaactcgcgcagctaaaaacagactgatctcccttatcgatgatcacggcacagagcatcggggtgatacgcatataggagtggtggcggaacagtttttcacgaagctttttgaaagtgacttaaacccacagaataatcactatcatgtcctacacgagttccagactagagtaactccggagatgaacgccaatttgataaaacctgtgtcagaagaggaaataaaacaagctgtgttctccattggatccacgaaggcgccggggcctgacggattcactggtgcgttttttcaacaatattgggaggacataaaaacagagttaatagaggaggtacaaaacttttttgaacacggttcctttgacaagtctttaaaccacacaaacatttgtctgatcccgaagacgtctgaggctaagcatttaagcgaatatcgtccaattgcgctgtgcaatgttagctataaagtcatttcaagggttttggtagagcgacttcagcggcatctctcaagcataatctctgaagagcaagcggcgttcatcccggggagggtaattacagacaatgtcctcatagctcatgaagtaatccacgctctaaaagttaaaaagcgatgtgcaaactcgtttctggcaatcaaaacggatatcacaaaagcgtacgaccgtctcgagtgggattttttgcaagcgactatgttcaggtttgggtttgatgttaaatggatcaaatggatcatgacatgtgttcgtacaactacttattcggtgaacatcaacggcgctcctcatggtttcattgaacccaagcggggcatcagacaaggcgaccccctttcgccttacttgtttattctttgtgcagaagttctcagccatatgatgaaaagagcagagaggaatggagctatcaaaggcattaagatcagtaatggtgggcctgcgattagtcatcttctctttgcagatgactctttatttttctgccaagctaacaagaagtccgtccaagaaattaaaagcatcttataccaatatgagcaagcttcgggtcaaaaagtaaatactcgcaaatcagccatcacttttggtaaacgcgtttcagaggctaccaaaacgcagattcggcgatgtctacaaatattaaatgatggagggtgcagtaaatatcttggaatgcctgagcaatttgggcggaaaaaagttgaactttttcaatacattgtcgagaaggtcagggaaagaactaacgggtggagcaataaattcctttctcagggcgggaaagaagtccttttaaaatcaatagccatcgcaatgccggtgtactgtatgaattgcttcaagctcccgaggagtatatgtgatgagatagaaaggcttatggctaactactggtggcaaacaaaccggaatgattcaccgactcattgggttgcttgggatcgactgaaacatctgaaaaaggaaggaggattaggcttccgtgatattgaaaaattcaatgagtctatgcttgcaaaacaagcatggcgaattcttcagaatccatcttgcttgctagcacgggttttgaaaggcaggtacttctcctcttcaaacattttgacggctacaagaggttcaagaccatctttcggttggcaatccattctattagggagagatctcctaaaaaggggtcttcgcttcaccataggaaacgatactacaatccaaccatgggtagacccctggctcccaattcacccacctcgaccaccgcgattaactagtccaacgtctatcactcgcgtcaatgagctcttcctccaccatcaagcagcctggaatgaaacactaatcagagcagttgtccaccccgacgatgtgtcccatatcctacgtattaagatcagctctcaccaggacaaagactaccttggctggcattattcagatacggggatatattccgtgagatcaggttattggctagcgatgcatctaccggatcaagaagtcttgccactcccaccgcatggagacccgcagttaaaacaaagtatctggaaaacaaaaactgcaccaaaaataaagcactttctatggaaacttctatcaagaggtcttcccacgggtgaggagctcgaacggcgtcatatgattactaatgggccctgccgacgctgtgttacagaattagaaaccacccatcaccttttcttcacctgtccgcatgcaaccatgatgtggcgagcgtctcatgtacctattcgcagcatttttgatcctgtggtttccttggaagctaaaatcagggcaattctcgactttaacaatcaaaaagatacttctaatcatcttacacatttacctttatggatcttatggaagctttggcgaagcaggaacatcctcaccttccaacagcgttcaagtaattggcaaaaagacttacgagaggcgaaacaggatgcaacagaatggtcatctctcctgctgccctcatctcacaatcgacatacgacacatacgggtcatcagacgcgggttgtcacatcgaagacctggaagagaccgcgggccggattggtaaaatgcaactacgatggcggctttctcaacagcgaacagagcgttacaacggggtgggttctccgggatgatgacggtgactacaagggctcagctcaatctactggtttcatggtcacgtcggcggtggaggcggaatgtcaaagtctcattactgcgatgcagcatctatggacaaaaggttacagacgtatcatctttgaaggagacagcaaaattcttgtatcagttcttcagtccaattctatgcgctttgacttattcaactggcttaaggagataaagcactggcaagcacgctttgaagaagtcgaatacgcatgggttccaagaacagcaaacgcacctgcagacaagcttgcacggcatcagcgactttcacaaacactctttacttttcataatttaattccatcatgtctttcacgtgctctgtactcagattctattaatcaatgaagcagtttagtgttaaaaaaaataaaataaaacatatctacatgaaactgaatacccggttttctttcattcaataacgtattttgctttatcagcgatgtcaaatgtttacactttaatcacagtcagaaaaaaacaaaatcaagaaaacaatttcgtatataaaaataagtaattgttgtaatagctaggtcctacgcagtaactggtgactgagagcattctcaattgagaacttttagataattttcttaaatacaaaaactattattattttaatacaatttaattatataattatattaaaattttaatggaaaaattgtaccaatatataagataagtgtatatctttttacttatataaactctcaaatatcagagcttttacataagagtttttcttagtctctttcttctttttcaatttttttaaatcgttttttacagacaagaatcatgtaagagccctccattgaaaatgttctctgagcttatttcaaataaaaaaaagacctgtaagaaactgtatgtaagactttcacatgcatgtatgtcaaagaagatgtgtgtggttctagtttactgtgaaacgtagtaataattaaaagaaaactgtatgtaagactttattaatttataaatgaaaggtcaagtagttgagattaacatcattccactacttcgacaggtctacaactatatatataatatacaatatatctaatattcacgttagctacagatcagtgagagctttacctcaataaactctgatttgtataaacaaaagaccagtacaaaaagcttcgtcacatgcatgctcgtcaataacatgtgtgtgggttctagtttaattaataagactttgttaattcattaatgaaatgtcaaatcgttgagatcaacaccagaacatctctattggggtttaaatatccccattataatcacaacaaataaagaaaaagtagaaatagatccataataatccattacttctgcagttctatatattactataaataaacaacaattcacgttagcttagacacaccaaattgacgaactaactaacaactctgctgcattgaatgttaatagcaatggcgaaatcgtggctacgtatctgctgcatggacatcagctatatttgaatcacataaataggattttaacaaatatcttttggtttggattagaagattactctctcatgccatcatgcatgcctaacagtgggaaactctctcaatgctaaattatcggatactcaattattatccacaagtagtagtattgtgataccttttaggtcaactttaaaattacgaatactattattttgaggacaatacaaataagtaaacaattgaggaggagtaacgtattagtgcatccacgtaaattgtaatattgtatatcacttcacataatctaatttttttttttgttgttgatggctgtagaaaaagatttattacattttggaaagaaacattattgtgcttttcgaagttcgatataatattatagagtgaattgaatatcaaatattagccgaatcaaagagaccaaagacgaaataattatttctgaaatatgaagatgctactagtaaaacaaaaaaacatgacaaaactctagcaggaaatagtcttgttcccgacctcatcaatcacttaggcggatgaaaatagccatacgctgcaaaaaaggcttgaattatcgtgagaatgacaagcgtcaaagcagcgcaagatgaaagagctgtccaaggactatcaaaatgggtatgcttgaatcccgcccattgtacatgccatccacttgaagtatacttattaactccttcgaaaataccagctaagtaactttcatcaatgtcaaataagacatctttaccaacaaccttaaagaatcgggagacttcatcccctgacccgaaatagttctctagaatccctacttcgcttagaaacatcgcatcagcctcgcttttgagaagacatcccatgaaagctacatagctcgtcatgtgctgcttggtacaataagaataatactgttcaaatgcaacacagttaagtaagacagcaatgagaaagtcatccaagatcaatggtggtatctggaggagtttccccttatgccttatgtccattagtgtttctgcttttttcctcgctttgaactttatccccttcaactgaagttttcttgctgaaagaaccattttcagatgatggcgaccagtagtactatcttcttcttcgagcgaatctgattttggtattccttcttccagcatggaaatatccacttcctgttttcctttcttgagcatgacatccaattcttgttttgattctctaggcatacatatcttccggatcatcatacaatcaagaagatgatttgactttttttcttctttaggaacatcaggcatgtaaatatttcgaatcaaatcaagaagatgatttgcctcaactttttggtgttttaaccaaaacgtatttgatttttgtaaggaatagttgaagaaatgaaatataatctcatttagcccactcgatttttctatcttcgatctatcaaatatagtttgaagaagaaagaacggaacctgattctccaaaagtattaggtcattccttatagccggtagaatccatgggattgcaaaaataggatcattctcaatctcagagtggctgactactccagctaccaccagaaatatcatcaggatgaagcaaccatcaagaaccatcatttcaatcaatttcttcccatcactatagaggctctccgagtacgagtctcttatatcttcctccaagactgaaactgctttgatcagaccattcgtatccacaccctttcttttggcttcatccatgaaaatcttgaggaatctaagtttgtgctcttcaatcatctgtagattcttttttccgtgatggtatgggccgagtgatacaactctaggttcataagcggccttgtacttcttgttttcgggtttatgagagattttaaagatgcaacacttttttccaccggctgattccctcagaagctttgggagggccgattctcttgaaaataaatcatgtggttcttctacaactataccaccattgtcttcatcattgtttcctctctttgcttcttcacgagggttcattatattattctctaaatcttttgttgaggaagacgactaaatttggtttgagcaaatttggaattccggcgtgtaccgtagcatgaaaagaataaggcaatctaaaatataaaactaaatattaatattacagtaaaaacctctataaatttaatattgacatcaatgtattatagtgtacatgaaataagatctcatcaactaagatgaatattaacggtttagataagacattgacctttaaaattagtaacgaaagaccactgactaatgatgaaactaattaatagtcattataaaataataagtgcttctcgtttccctgatcgaagttccgcattgaatagtttaatagcacaaattggtatttctttatattttcttgacaatatcaaccgttagatattaacgttaacttcagagaaatcttgtcttcttattctaacgttaacttttattttaccaaatatctttttacagtattctcaatcaagatcaactgataaaaataaattactcacttttgacttaaatgcagaaaatatattaaggttttgaatggtgacagtgatttagatagtgtgggacaaatagttataacaacaatgtgatgcgataaaaaaaacgtatgcagaacaaatactgttaatatagaagaagcagtgtaaaacatttagtgtaggtttttattgtaaacacttaaactttataaaatgtggttcttactttgtgataaaagtctgactagttgtaaaaattgtgactgtttgaattcctctaattcatttgtctgcaattctaataatttattataactgtgaagaaaaaaagagaaccattaatacatcatgcatccaatttcctagatagataaatttattttactagttgatataaaatatgcatttgctggtaattagactatttttgtagtaatttttttttaaaaaacttgtctatatatatatatatcagatttttggcgcttatataagagattaaacaacaattttaattaagatgaatactaacggtttaaataagactattgacgttttcttaaaaaataaaataaaacaaaaaccattgacgttggaatatagattgttagaattcaattttacatatgtggctccggccaactttccggcgacttttccggtgatgtatgtcaccggaatcacccgattatggagtctttgaatttcttgtaatgagttttgaccagaagaataaagaccactgcataatatactactccataaaattaccctcagatccagctagtaaaaattatttttcgttatcaaggatgtgacaaagcttgcttaatcaagacccattttacatgacatataaacatgtttcagtggacggacctgaatcttgaggttgcgattgtaaaactaatatttagggttggtgtttttagagttgcaatccttagaacaacaaaatataagaaataagctgcgataatatttagaaacataaattgattggagaaaatgttgtacttaaaagttaaaacgttaaaaaaaactacagcttgtaaagtctaaataaactaatcatccccttaatcttgttatagttatggatttgtttaaacgaatttgtccactttgattataacactaagcttgggctaaaaaaccggattcgatacccaaactaataatcagacaaaaaaaactggattagagcgggttaagattttaggaattttattgggtagaattttaataaactcatgggtatctggtcgatccggagtttacccgttattcaaataggctacatgaaaaccaatcatataatttaatatcccaaatattaattatatttaatcttagtataataaaaattatctaaaattataatcataaatctacatatgtcaattaattttagacctaaatatccaaaacaactaaattattccaaaattatttgttatatttatcaaaatttaataaaatatattcaaatgtaactaaatttatttaaaattaacaaattttgtaagagtttatttgggaacccgatatttacatacaaaatacccgtttttattttttgagtatttatagggtttgaaactttttatccaaactgacttgagcccgattgaacccgatccgaaccggaaccgtatatttagatctactctagtggtaggatattagatacccattaaatccgaactcgaactgttttatttgattctgcaaaaaaaattattactggttgaattaactttaaataataaatagttttaatataatatataatttatgtcgtttattaatctgtgtgtaaatatcataaacatcatctatattaagtactatatatctaaacacgaaaatcagattatttttttgtttgctaaacttattagcagagtgaactagcattaccagaacttataccagatattatagagaataaatagcatctcatccaaaccacatgtaacaagaaaaaatatcgctggcttctcaactaatatagagaaaactaagacgttcaataggttaaccttagatccgattaccaataaattaataaaattaccactcgtcaattttaaattgatcttgtttcttgtaccattgacattgagaacgtacttcattaaacttatgttttatataaacaaagaccagagattaaataaatgaacaaaaactgtcacatgcacgtcaataacatgtatagttctactctaatgtgtatcgtatacgtagtgggtagtaattaaaccagattgtaagacttaattaattaatgaatgaagaagtgtcaagtcgttgagatcaacatcatacatccataatccattacttctacagttgtattacttatatatataaacaaaaattcacgttagcctaaacacaccaaattaacgaactacctcacacaactcaatggatttagacatagaaaccagtttgagtgtgagcgtagcaacatttctttttcttcctatactatggataaaagtacagagatcgaaatggatccagccgaaatataaaagaggtatgctcttttacagtaccatttaaaataatatacagtttctttataactgttgattttcttaaaattcttgctggttttgaatttgttctcaagaattttttttctattctaagttgtggcgatgtaatatttatgcactcttcatttgcgtcttttccagttatgtctacattgttttttgttttgttttttcccccaatgttaattaagctgataaaaacaaaagactagtaatttttctttttgggcctcacagaaaactttgatgtttgttccattttttgacaggagtcacgatgggattaattctccttttcgctcttgtggtattatgcacaagagcatatacggagtatgaatactacaccgatatatttcaactaggtttgtctccaacattccaaaaatattcataaccttatttgatcggactcacaaacattctttgtgctgaaaatagctacacttctcgtttgcatcatactcgtcttgctggtaacgagagcgtgctggagagaacgaatgtacaaactaggtatatccacgccaaagttctttatctcattctctttcatttagtcatatatgatatttacatttaaatacatagtacattagtatcgcaatttgttttttttataagagaacgtatttaatttgcaggaataatgatactcgtagcggttatcattgtagcattagtggcattttttgcgagagaggtatctccaaaatactcacgaggtatataaatagacactaatacttttgcatattatttattcttgttttgccgacgatgcatgacacatatatactatgttcattgagttgtgtaattctgaaaaaataatatcgcaacttatagattttattgtgtttttctttctgatttgcgtaaatgagtagagacgatacctcctctccctcccatgcccatgtccatcatgcccactccaagcgcgcccatgtcctcggaaacgctggtgaacaaattgatttatggcaaaaaaattaaaataaaacagataacatccaaagtgtgctttcttgtatttgctgtcttatgtgtctgttatggagtttagaaagggacattgtttacgactgagatgtatacgtccatcgtttttacgtatgaactattcgtaaacaatattttctttgttttgatctattcatgtaagactttgccaatattagaactctttatggaacacaatgttacatatctacacgaaactgaatacccagtttttttaagaaatacaattcagacagacacagtgaataaaactaagtaaatgatgtaatagctaggcgatgactggtcattgagagcttaccgcactaaactattgtttatataaacaaagaccagtaaaaaaacattcatgtgcatgcacgtcaataacatgtgtctacttctaatttactgtgaagcgtattgatgattaaatgaatgtaggaaaatatcaatcgatatgcatagaagatgtgaaaattagatttttactattaataattcaatattagatatgtatgaaagaaaaaaaaattaaagtcataactgtcattcttactttgttaatttaccaaatatgtcatgtatcaactattttatagtttcactatatatcaaatatcttaccatatttatgtaaatattatttagatatttaatatgttagcacgatatattcagtataacatgttattataattttaaattgatgatttcatattaatttgtatgatatggtaaatggtttaatatgatatatataaatttatcgtgatactatactagttaacatgttaatcaaatagttatctgtatttagcgcgatattatatacttgttaacattttaatcaaatagttatctacataaatcataaatgttttatgcaatccaatgataaatagtgttgtaaattttggatgaatagtgtcgtcaggtgtaagatgaacaatatcatgcttacagtatccggtaataaataatgttgtgagacaatggcatattaggtaaattaaatagaatataaaagatatttatgcctttaattttattctctttcatacttacttaatattaaactatttataataaataactaatttttaagttttccatacatatacattaatataacccttaaatgtaaagtctcgcgttgagattaaacatatcatacatccatcacccattacttctagagaaatatcaatggatatgcatagaagattcaaaaattaagaatctatgcatgatttttttttatttagttctctttcatctgactcaatttaataacaaaatatcctttgttacatatccacgcgcgataacaacaaaattatcagataaaagtttaggaataatatgctcattaatttatctttttaggtttaattttggtgtcattcttttttctcatcactagattacatgatcttttatctcttatttgttttctggtaacaaaacatcatatttgatgtaaatctgattttcaaagctttgaaatcgacatatttacttaacaaaaattttatgctaacaaaacaaaactgtgagatattttgctaaatgaaacattagtacgttacaattatttttaccgtacttttatgtcataatgaatgaaagaaaaagaaatattgaaaagtttatatgatatattgtataacttagcatattaaaaataaatctaacacattactaattgtatacctctttaacattttttttatcgcgatatcatatgttttaacatgatatatttctttacttacatgtatatatattattatcacgttaacttaatagataatcatcaatttataatatgttattcctcaagtatttgatgataagaatatcgataactattttattacattgctaaataatttgatatatgtgatgagggcattttcgtccaacttacataaatatagagagagaactaataatacaaaaaacaatgatatattcttaatttttgatttatctgggcatatagattaatatagcccttacttctataaacaacaattcacattagcctttgacgcaccaaattaatggactaacactcggtagtcacaactcgatgatattagacatagaaactactttgagtgttaataagagaggcaatatagccacgaaaatgttgaagaagttgagaagaacctaattatctcttaaagatccctaccattggacatgataattttaaaagcttcaatgaagatcattaactttagaattttcaaaatttaaaattagaaaattggtaagagcccctcatgacctcttaccattgcggattgtgatacgttcatgagaagttggcacgtgtgagaactaaagtgagagattggagtcacgtgtgaagaagcttataaatagtaagagagagtagagagaaaaggatcctgcgtgatcattgatgtgtaaagaggattagagctttatgtgctctgttcttgggagataagattgaagaactgtaactccaagcttatcgatttagggtttgtttcattgtaattgggattttaaggataagaaagagagattcatagtttcattcttatcaaatggtgcgttagtgtgctcggatcgaatcgaacgcaagaagattagggtttcaaaagttggggatttttgtcaatcgcaatgtgtcttgagggatttcccaccttcaatggtgtgactcatgaattgcgatcatggatttcatggttggaggatttctttgtttgggagaattttacggacgacgagaagatgaatcttgcacagagtcttatcgaaggagaagctgaggcgtggttttataggagacagaagatgattctttttcgatcttgggaacatttgagggattgtttggtgctgagattcggcgacagaaaagatctggaactaatcagattgcttgccaagcaagatcaatttttaaaggaaaggagagacgaatcgaagatccggaggatgaagaatacatcggtcgatccacaagaagcaactccttcaatggccacgattcaagaaacgattccagtggagaaattacataattctctggagatcactgacaaatctttgaatcaagttgatgaaatctcagttgagaaaggatcgaagaatgatgcgacattgctaagtccacagctacttgtttctgattctgaaaatttgaggaacaacgaacttatggcaataaattcagtggtggaaaacttagaaactgtagtgattaagacaaagattcagaagagcagtaaaatggatgtggttaacggtgatgttgggagaattcaacaagtgagtataatgaaaagttgttctgcacacaagatgttcgataaaatgtctccacttaaagaacgactggaaacgaagaagaaaatgaaaggattaaaatcttggatgttcaaatacaaggctgagaagagaagaattaggaaactacacaatcagggctggttacgcacttggatcaaaagcttgaaatacaagtttgagaaaagaataattgagaaacgaaacgatcatagctggttatacaattggagtagaagagtgacttgtaggaaaatcaagagtgcaaaactacaggttacttcagaactaaaggaatctaattcattgtgggacaatcgagaagttttggttttgtgcgcgcaaaaggaaatgcagactgcttgttagctttggagaatctactgcaagagtgtttaccatacaccaaatttttcaagctccacttgagagggcaattcttcctacgaagggacataaacaggttctagaacaattaggtgacacacttggagaggttgataaggtagcgttgcaatctgatattggcgctaatgtctctaaatcaaaaaaatattgtgagtcaatcacatggattaaagaccatagagtggaagacattaatgagcaagctgttgcttatggagaagctttcatgatatctctaactgagacggatgtattgcagtcttcttgggaacaccaaatgaattctcacatacctacaagactactaagtagaaggaaacagaggaagtgctttaagtcttggagatttaagttcaaacaggtgaaagaaggaaataagcaacaacacaatctcttccgacaaatgggtactataacgatcttgtggtggtggcttcaaaatggaagcaaggtgcagtggcatatcttgattgtcaagagggtgagtgagatttttggggagttaaaaagggttcaggccagcaatggaatcatctatgttctgtcctatggcaatcatcattataagttgtcatggcatttcaagccatctattggcagtttctgtattcttttaagactgaattatatgaagaggctgtcacaggaactgaacacttccaacatcattagcaagacaagtttttaacgacttggttgctcaagtttgataagccatgcgttcaaggggaactgattgcttatgaaggggagattgtcggattttacacaacaattggggacagagacatctatttttctgtgtggcattgttggagaaagaagaaactgcatatcattaacctacaacaattggccacagttttgcacatctatgagaaaccaaaactaggagacttcagtcaatcttatctactagttgctgcaacactttggagtacaaagatgcaacgtgggattgaaagttaccatgtttggcaccgctggaaagctcggtatttgcagatatttgagtataagtttgatgcaggatcaaatccgaattgtgagttggcaacattagtgcaaaacagaggcttgaagttgtcgcatgtccatgaacttcagagaaggggtcaccacattcttcaagaattgtcagaagcttgcagttcgtcaatgcggtacactcaatatcttagagacaatgtcagcttgggatgaattagtagagtaaccagaggttgatacataagggaagccgtcatggtggtactagaacctgtcacagagattcttcattcattttcaagctt

SEQ ID NO: 1058 - DNA, 88010 bp, Arabidopsis thaliana
aagcttgttaaaaagtatagaaatacagcaaaaacaccaccgcaactaaaaaattcatgtgaaaatgtttgttaactagattttaacccgcggtacaccgcgagaataatttattttttaaagttagtatacataaaagtttataaattatatttatctataaaatatttttattttatagtttataattgttattaagtaacttcctgccaaacccggtccgccaacccgtcccgtaaaaaaaatatttattttattaatgttgattttatttatgatatgtttatgaattattatctaaatattttttaattttgtagtaattaaatgctatcaaatatctctgcggtttgataattataatcgaattattataataatggagaaaagcaatatcaaaaatgataattttgtagtaattaaatgatattaaatattttaaaagttttattttagtaactaatcgtgtgttaatgtggagagatttagggaagattgtcaaatctcaaatattaaattcgaagatttttttctaattatcaaaaacaaacattaaaatctagtgacagccattgtaaataagtctcaactacatgatttatttcacaaaatggcttcaaaaatgtatatgtagataattagttctcaggttataacctactaaatggattaaaatcggattagtcgttgaagcatctatctaatgggccatacgtatcggcccatataaaccaacaaccactaagaaaggatcgtcctcgggtgatgaagaggaagcaaccagagtactcctagccaccatcataaataaaacatttttgatttctcaagactttacttaaaagagggcaaaaatgcttattttcaagcctcgttttgttttatatactaaaaagagagcaaaaatattccaacgatctctttgttactcacatagtttgcttttagggtttacgctattcagcaaccacctagtattaccaagaataatatatggtaaagacgagacattagcaaatacatatttagaatagaaggtacgaacgagtgaacgaaaacaaagaccattattcataatcattattacatcaaaaggaatagaacaacagcataagaggtagtcttattattacaatgcacaaactcagaatttcaaaccagagttttgaagtttctcttgaatgatcatgtcgattttgttctccatttcaggagtcaaatagttcttccaatcaccaacttctcctttacggaaaaacattttgttttctctaccagaattcaattttccggtcttattgatctccaaactgctcagattacgtagagaacaaagatcgataatctcatccaccgatccgctctcttcttcttccttagtaaaaggacaacctaagaactcggcaaatttcttgatctggtcacgaggttctgctttcatctcttcaaacttcataaaaagcacatggtttggatcttccaagcttcctctccaatagcttaagacatgatcccaaaaaggcccgaaaatgctgactcccctacaaaacatctcaaacgtatcctcgaaactgcttattattttttcatcggtttgtttcttagtaaagaaatgccaatatgaaaccaatgtgtcttttacgtttctagatatatacacaattttacaagtagaacctttgagaccttcttgcaacgtatgtgacggcacgtgtgtcgaaaacagcctcggagatgatgagaacttggtaaggtcaggattttcgctacgtagatagagatctatctcaaagtagggtacaagaacgtgtggattattagaaagaagaggatgatcatcatcatgagaaggctgttttgatctatgaaggagtgcgaatgtaagcgccttgagccaagtggtgccgcatttagggaacgaagcaacgatgatatcggtgtcttgaggcttgaagcttttctggaaattgaggacagcttgaagaacattgtgagtataccaacatccttgatacttgcaaatagttttcccagtgaaatctttgtctgaaggaagtgaagagattagagtctttgtttcttcgtttaggtcttcaattctcaagttcatctccatctttttcacatccattacaaacaatgattctactatatataacatcatcactatgatttgtattgttttgcaaaatgcagcgttttcaaccaacattagtttgtttatttgtcaataattgtggtagctaggatttgctacggtagtagttttgtctgcttatatttttaaaatatgttttgatataatttgagtgatgacttgtgtgtagtaagaagtaacttttgttataaatgtgatgattatccatcatgttacttcttttccaaacaaaatagcctccaaacaaatgaataatattatctatctctttttataattttattagttatttgggcatcaagtttttttactttataaatacatgtaagaagaagataacatacgtatgtgtgtgaagtaatataagcttcgtctctttactctttatatttctttcttatacacacaaacaatagaataatattattttcttttacgttatattttacaacagctttatatttttcatctacattatgatttgtgttatttgcgaaatacagctttatcaaccaacattgatttgtttatttgtcaattattgtggttgctaggatttgttatcgtagtagttaggacttttttgtctgctaattatcaaaaaacaattattcgatataatgtcagtgatgactgtgttttatagtagtttacatttttaccaaaggatttaaatagtaacaacaacgaaatctgcggaaaaactattttggatttaacaacatttaatgatgatattttttagcagagtttggcaaatgatcaaattatttaaacaacacggtttgttgaacttgaaacatcatgcaaaattcttacaaacataatttattgaactttacttttagttgaattggggaagttaacttaaaattatagaaagtcaatcgtaattattgtggtaatagatatctataaagatcatggagaaggaagtctcgtgtattgtgtatctaacagtgtcagaaagaattgtccatggtaaaatcactatgtaagtgttttcattatttacaataaataaaaaattcggacgtttttaaaaaaattgttttgataactagtttcataataccaaaatagatcaaaacactagcctagcaacctcctagtgttaataatatataatatattcaagtccaaaactttataaatacttcaatacaaagtataatatggtaaagacgagacattaaccactatatatgtagaatatataaggtaagaacgcttacacgagagcatacagaaggaatataacaacaacataaaaggtagtcttattattacaatgcattaaagaaaagctcaaaagcacacaaactcagaatttcaaaccagagttttgaagtttctcttgaatgatcatgtcgattttgttctccatttcaggagtcaaatagttcttccagtcaccaacttctcccttacggaaaaatgttttgttctctctaccagtactatgcaattttccggtcttattgatctccaaactgctcagattacgtagagagcaaagatcgataatctcatccaccaagccgctttcttcttcttccttagtaaaaagacatcctaagaattcggctagtctcttgatctgctcacgaggttcttctttcatctcctcaaacttcataaaaagcacatggtttggatcttccaagcttcctctccagtagcttaggacatggtcccaaaaaggcccgaaaaagttgactcccctacaaaacatctcaaatgtatcctcgacactgcttattatgttatcatcggtttgtttcttacaaaagaaatgccaatatgaaaccaatgtgtcttttacgtttctagacatatacacaattttacaagtagaacctttgagaccttcttgcaatgtatgtgacggcatgtgtgtcgaaaacagcctcgaagatgatgagaacttggtaaggtcgggattttcgctacatagatagagatacatctcaagggagggtgaaagaacgtgtggattatcagaaagaagtggatgatgatcatcatgagaagggtgcttcgatctacgaacgagtgcgaatgtaagcgccttgagccaagtggtgccgcatttagggaacgaagcaacgatgatatcggtgtcttgaggcttaaagtttttctggaaattgaggacaccttggagaataggcggagtataccaacatccttggtacttacaaacatttaccccagtggaatttttgtctgaaggaagtgaagagattagagtttttgattcttcgcttaactcatcgtttctcacgttcatcgtaatctttttctcatccattacaaacaatgttttttttttgttgatgtattcttaagcgaacatcactatgtatttttgcaaatcgaagcatttccaaccgaaactaatttgtttatttatcaattattgtggtagctaggttttgttatggttactacttaccaataacaaaggatttgttatggtactaattaggaattttttgtctgtttattttttaaataatatattttgcgatgagttcagtgataactacaaaataagtaattttatatgtttatcaaaaggtctaaaactataaagtaatgtataatatcttcattatgacatgtgttgtttgcaaaacgcagcaatctcacccgaaattagtttgtttatatgtcaattactgtagttgctaggatttgttatgaaagtagttaggattttttttttttgcttgatatcatttcagtgatgactattttttatggtaataagtaactttacatttttatcaaaggatttaaatagtaacaccaaaatctgcagaaaagttatatttgaagttaacaacaatttaacgatgtttttttagcagaatttggcaaatgatcaaattatttaaacaacacggttagttgaaacatagggaaaaatttcttacatacataatttattgaactttacttttagttgatttgggaaagttaactagttaaaattcattaaaaaaaaaaagtcaacagtaattgttcttctaataggtgtccatcaagatcatacataattaagtgttagaatcactattaagagttttcataatttacaataaataaaaaatcaagactttaaaaaaatattgttttggtaaacagtttcaaaatagatcaaaacactagcccaagagttgaaataagtgagactattaatggtgcacagagatgtatgaaattagcaaattttgttttacacttcaatgagttttggaaacctaagctacctgataggttaaaacacaaaaaaaaaaaaaacggaaagaaaaaaaaaccagaaaaccacaggcaaagaggtcacggggcactttagagtactgaatcagtctggttagccaaaatctggtcatctatgattgaaccatgtttcccgacaggcggaatactaagtgaacgtttcctcatcttggctttatccgaggcggctactcccattctgtttctgtattcactcgtgagctcaagggattcagtcaatggctggttcgttgtcttgaggaaaagatcgaggttttgggagtatttgtcatctttgttggtctttgaagcctcgttgtggttgttttgcgataccatggagattgtgtctcgagactcttcttcttcgttgtctgtccagtaactcttgtcttccattgccagatcatcgtactcttcatctgactttgtcgattcctcatccaccgatccaatctggtttaagattacatgtgagagtcgtaaaactataccgaaagctacactaaaaacatgataaatggcattaacatcctcccaatgactaaagatttggttacctcgtcgcggttgcgctcgtcattgttatcgctgagatcttcatcagaatcaggctcatgaaaatcatcgtcgccttcttcatcatcttcatcgctcccattcacagactgctcctccatcagctgcatggaggatatgtggtaaggtaaacaatcttcacaaaatgcaaaaaaaataagtgtctacacattgattaatgcaagatttacctcttttgaaggcccatcagatgtccgaggcgaactgcagcaagaagagtaatgcctgcttccggtttcaataatatctgctcttaagtcatccacactcccggcgtggctagttgcgccatcactaggccaagcgctgatcccaaagtgaccaaattgaagattcactggttcagctttatgtagttgatgctctgttccatcatccatctcagtattcacgacgggcttcctgatcttaccaacggaagcaacaggccaagtttttgctaccgtaccatcagtattgcaaagagccataaatcgcctagaggagccttgtctttggatcacctgaaacattcccttggaagttaatgaattggctgcacattggttcctatgctcgtcgtcaataacagaaacggtgtttgtggttgtatcatagagcttctctccagtttcacgtctacgcaggcaaccaaagaccgtcgcgtggattgtagccacgctcttgtcgacatttgtgttgtttatcttaggaacgagatgtttgtcagctcgtttgcatagataatcctgtattgttctgatgttacgtatatattttacatacttattctttgctgggtccaatgtcatgtacttggctcggacagcaaaccgttccaagtgtttctcctcgttagcgatgtataccatgaagggaacaatcgaagggtgctttttcatcagtcccatctgcaaaaaaggaaagaaagaaaaagttagattgaaaagacctagtagccttaaatgattaaataacaacatgtaatgaaacaaagataagacttaccacaaagttgaggcttaagtggactccttcaacgactactgactcattcctctcttcccaagtggtaatgagcctatcaagactgtcaatcaccatctcactttgtgccttatacccttctatagccatctgcttatgacttagcaactcagtggtgctagagtttgatccagcatccgtcttttgggcattggagtttacacctcgagagcctttcagttttttggcttttcttttggcttttgactcggcaactgccacagggtcaaggtactctccagcatggtatgttgaagcccacagcaaaggattctgcttctcatcagcaaagctcctcatcatgtgccttatagagtcagttgataccacagtcgtaatacccaacctgctaccctgtaacacatatttagatattgcatctgattaagaacacattgaaaccagttacaccgtacgaattgtatcactctgaaaaacattgaataagtacatagcctaggagttcagtatacaaaaaaacaaaagacaagaacttcttattgtcaatctaaagcatataaatggagggcatagaaatttaccagcaatgcagacaacgtagatttaccacagccgctggtgccacagagcaaaacagttacagattctttcctttctcggattctgcgagtgataataagaattaaagacaatgtttgaaataaaagagaaaaactacagttcaggacaagatatatgaatgggaaagtagcaaatccgaggcacaataaaatcaaagtacagccgtccatgcattactaatgtaataggagcactaaaggggattaatgcaggaacgtatgaagataaacacgatcataacatttaacagtcagacaaccacaaaccacattaattatttatgtgaaattcatagtgacaaggaaaagagagaacagttgacatatgggaaaatcaagagcagctatgattctaaatgttaatagagacatgtgcatgataacaactctttattggccattcaatagctgaacagtctagctactatttctatcacatagatacgctagataccctgctaaagaatctattagaaatggcataaaaaatatttaatgcaatttttcacatggaaaatatattttatgcatttaaagaagaacaacagacatatgcagattctatatgccatctctcttttttgacaatacataccaagatatattccaaaagtgaagaaatttacctgcatgccagaatcaaatctgccctttggtcgcgaccaacatacttatattcagccagtgcatcacacacaacatcaacgaatatctctcgtgaaacaacaacagttgtccgtcttttgtacatctcaaatggcttactcttattcttgtcaacatcaccagcaacaaccaaacagttaagtttctctacacaagttgaaccaccaacttccttagcaaattcaggttccttcccattctctggtgaagtattacaagatccctcacttcttattaactcaaaaaccctacggctgatctgccaacagagacaaaaatctatcaaggaatgcaaaactggttacttataaatatttacacacccaaagatcatcaaaggacctcataataagtctttcacatgaagaacaattcatgccagggcaaccaaaagattttacataataactatatcaggcttgcagagaaaagtaacaggactgagcacaaaccacaccaatcttgaaatatactacgagtttaagaaaagtcttgtccttaaccaaatcctaaaaagactattagagacattgataaagacgtgcattaactaactctcacagcagaaagctcaatactagtataacaaaatttccaaatttccaaactatgtaagatcaagtttagtcctttcaagatccaaacacatcattgatctaaccaatacaaaaaaagtctcttcataagattgatccatcaaaactaaaatcagaaacaacattcaatgagacaaaatcgaaataacaccttgaaggcgtgacgagctttgcaacccataagctgaagagtactctgcaaaacaggacgcgtatacctaaacgaatcatctccattattatcatcatcatcaccttcttcacgcaccactatatacaacaccttcgtcgcctccgtcatcatctctatacaaaacaaaaacaaatctcacaaaattttcagagaaaattcaaacgatcgggaatgcagatcaatcggtaacataccggagaagagaaaaatcggagatcggagaagttagagagaaagagaaaaactgttggaaaaatttagggtttataatgaggatcgtgataagaagaagaagaataagaagagaggaaagatattttcgccattgttgttggtcactcgcctttcttcaacgcatcgctcgaagagagccttcacgacttcttaaaagataccttcttcttctctctctctctttctcacgtttctcttttacacagacccaaaatataaatgtttgaactcaaccaacattttacttttcttgacaaagacgtccctagattttgtttttagatcaaattggtccatcttaatttcgtgaaattagaatctaatttttggttgccaacttgtttagaagcaagagattaaatctaaatcaattttaataaataatacaacatagtaaattagaaaattagaggatgaaatctaaaattgaaaagataaagtgtgtgaatttaagagataataaagtagagggggtttttaataattttattttttttggttattttggtagggttttctttgggtcaagatttcagttattagaagtttcaccgactcatttgatcaggtctttgtcagcaatttaactatatgttacaagaaaagtagattcgatatctaaccataagtgtaataatctcaaatcgaatctaaccataagagtaattatctttaatatatatatatatataaacataagtgcatatatatatatttataaaaacttaaaaaactttagaaaaagttatatcttaaacccgaaagaaaaaaaagctatgaacttggttttggttatgttactagtgaatcttttttttccatggaatataatatatgcacttgcttatctaattgaggtggtaagaattttaaaatagaagaataggattttacttcgattgagagaagaagagtatgaagatgtaccttcacaactgttttgtttgcacaggttctatcgatttgcagagagatgggattggttttcttcttgtgatatgatgtaaaccgtatttatagcgtttaagattctgaaatatatttagttttggatttgtgtatcgtgcatcattaaattttgtattttaaactacacaaaatcaatatccaatattgaacatatgtttttttttttcacttgcttaaattcaaaatataatgataaaattgattaatcagtattgaaggtcttaccaacattatataaaataaattttaaaatagtcaataattataattatattaaaaaggttatttcaacttaaaataattatttattcattatatatatatatatatattgaaataaaatatttagttatacaaccaatgagttataacttataaattttaaatttatttataaacaaaaagttgtaatttaatttttcacaataatgtaatactagtttattttctcaccaatttgagtatatttcattccatacaaaatcatggcaaaataaagctctagtggaaactacaaaaacaattaatttagtaaatggaaagagaaaaaacaaaatctaaaacttaatcactatcacatgattcagattcaccgtgtggaccccaaataaacaagaatcaacaagtggtaaaagtgtaaatctggtgtgggaacaatggtaataaaaagttttcttctgtgaatgatttgtactttgtcgggaaagaatctctaaagggacaaagaaagtgggttccatcgttaaacaacaaaaattccaaacgttacatccacgaagttttaagccctctataattggtcaatatattttcttgttaatttcctattgaatttaaaaaatacattataagtatctaccaaaactaggataaaataaaacatcatgagaaaaaatcgtctaatcattatatattgttatatcatagtcataactcataacacatttgaatgctctatactggtcggatgatgagaaatagtctcatgaaaaagtctatagaaagaaaaatgatgaccggaactttaaatgttcaataggaatatagttatgtgaatcagatttcagtattgactaaatatcactatacatttattaatagttgtaaccgtttttggtaagtgaaatcttgaaagaattataacttgtatatatatacaaacaaaatctttaagtttttttgctcaaaccatcatctaaactagactataaaaagagacgaaacgcatgtataacttcaccatcaaaagcagaaagaagtagaaaaatgagaagcatttcattcaaacttttgttattggtttctcttcttgtcgtcgtttctcgtaagtatacataccctagctaccaacagtatcattttcaaacaagccaacaaaattttacatatctcttcacaaataattgaaagtaatctttgttaaaatccattttataaaagaatcgagtctgaattttgtttaaacaaactttatattcgaaatcattttctagttaattattttcttaccaatatgcttgtatttaagataattttcttatacttttgtttgtttattaaggatacactcttgcgtatgaagattcttgttcgacagatgaagaatgcagaagaaactgcctatgtgatgtagcatattgcgacaaaagccgtgataagtgcgattatggatttatgaatagagttgatgtccgttttcccaaacatccttatatttcaaaaaataaagatggtagtggtagatgatctccactgcagtgattgaaattgtaatgatacaagtgaatgtatgtcgtactcgtatctaataaaaaaaagttattttttgaaaactatttttaaaattttttttttttttgatgtgtttaatatgttgatgatcataattcatacatatatgaatactgcctaaagttataaatgagattgattaaagtcacataatatatgaattctctacaaattttgtttgatcttaaaaataatttttgtaagaaaaatatatattcatgatggatatatgtggtttattgtgaattagataattacttacaacattataaatcattcatttatttaacaaatatttatataaattttgttggtttgttttcgttttaaaaataggttaaactaggccaataatagttttcaaaacacaacaaaaaagttaaagttagtagtgaagaaaattcaagaaagggatattaaacatatgtaatgttaaagaagaaatgcttgtccatagttctcttttcctctcttatctctctaacatcctttagagagaaaaatcttttcagcgtcgttttttgatttccgatttcagtcggatctgtttatactcttgcttatatgcaagcttaataatttccggtcttggatcggacttttgtttccggttatgtccggtctcctttctcgcttatagcgagtttagatcttcttatcctctttggctttaatcatcgaagtcttcgattgtcttccaacttctctccgatatctccaattgctcgaggaataatatcttcgtcactctccttttgctcaaaatcgatgagcaacgaaggatcttagtctacatcaaattgggtgtagctggtggtggagcctccccggagttggtgcttcccggagaaattttgaagcgatttcatctaaacccggtagatttcgatgctatcttatacaggattgaagatcggcagaaggaatgaagaccccagcgttctagggctgacacgcgacggctaatcagcgcttgggagatgagcggcgaattatagacggtggtgcttcatgaaaagacgcgtggtttcaagggaaatacgtcttctccacgtgtcatatgctaactcataattatcatgatatgttaatgttaattatgtttttagtttgggccgtttaattcgcttgtactcttcttggaccttctgtatgttgccctttgggcatataaatgaatttggtcgacaaaaaaaaaaaaagaagaaatgcttttttgggcaggacagaacgtttaagtttttggatctgaccatgtaatggatggataaagctaaatatgtgggtggtacttcaagagggaatactggactagcagctgtgaggggagtaatgaggaatgaggcagaagactggtgcaagtgttttcactcaacattggtatatgctttgctctgttagcagaactttaggaagtatattatggtatgaacattacatgggaaaagggagttcaaaggctagaactcgaggtcgattcagagattgtagttggttttcttaaggtagagattattaatactcatctgctgtcattcctattatgtttgtgatatggctttttattgaaggactggaatgtccatatatctcacgtgtataggaaaacaaatcgacttgctgacggtttggcgaactatacatttacatttccactaggtttctatttgtttgaacctacaccagatagtgttaagttactttctttgaaaaatgttggcgaaactgcgtttcggagatatgtttgcttgtaattttgttttggtttgaataaattggggagacattagtctcctctctcctaccaaaaaaaaacttctcttctcgtttttttttataaaactgaagcccatcttcctctataaaacataaccaactccttctgattaaaccgagattagaactaaacggatattaaaacaacaaagattaatgactaaatcgagatttctctctcacccttttttttataacaaaaatatatttataaatccaactgggcatggtcaggcataacaaagttacagagaattgacgaatcaatgcaagagaagatattgagtatcatcaaaagccaatggagtttcttccatgagaggatagccaagaacaacaatctcatcacttttgggattgaatttggagaaggaaagaaacagatttaataatctgttggcgagtaaggcttcattatcgaaagcatcgtggaaattcacttctccatcgccttttttattaatcgattatgtattaatggattgaaagttaatgaattccccttgagaggatcattgtattgacaagggattacaaaatcatatatacagaatatataaaacaaattgtaacagaacatccctatattctatcaccctccctcagttgaagcggccggttgaaggacagttaaactggttcggaactcattaaacagacacgtaggtaagccctttgtgaaaatgtctgcatattgaagggaggatgggacatgaacgactttgacctcgccaacaactaccttctctcgaacaaagtgtatgtccagctctatatgttttggcctttgatgcttgactggattagtagcaaggaagaccgaactgatgttgtcacaataaacgacggaggctttttatcgtcaaatgaagttctaacatcaagttttgtagccaacatagttcagccacagtgttagcgacgcctttgtattctgcttctgagcttgatcttgagaaagtaggctggcgctttgcggatcaagagaccaagttcggaccgagaaatacgcaatagccagatgttgaccgtcttgtgtctgaacaaccgccccaatccgcgtctgaatatgccgtgagacaatctatttggcctttaaccacctgcagtccatgcgttaatgtgccttttatatatcgaatggttctgcacaaagcttgaaaatgtggttgacgggggtcgtgcatgtacaagcatatttgatcgacatcgtaacttctatcaggccttgtaaaagtcagatactgtaacgctctggcgagactccgatacaaagtgggatctgaaacaccatctccgatatctactgaaagcttggactttaagtcaacaggagtcgcaataggtttacaatcactcattcatgcacgttccagtatctcctttgcatacaaagactgactcaagaacaatcatttgtcgttgtaatctgcctttattccaagaaagtggtgtatctttcccatgtctgtcattggaaattcagctttcagtgaagcaatgatgtttccagaagtttggtcgaagaagcagttaggaggatatcgtccacatataggagaatgtatgcaaggtcaactccttttctgtaaacaaacagcgatgcatctgccctgcttgtaacaaagccaaggtgggtgatgaattttgcaaacctggagttccaagctcgtggtgctttcttgagaccatagatcgctttgtgtaatcgacacacatgattgggagagtttgtaacgcccgtgtcccaagttagggagtaaacaagatctctcacccgccaaattcgaggacgaattcagtgtaacggggtagacttgtaacgaccgcatcccgcgttcataaagaggcaggtttgttttaggagaaaactagatcatggtcgaggaatggaacaaaatactaagtaggaagaacgagaaagtataagctaaaccagctaggtgagctggacaagctgtatgaactagctaggtaagctatgtgagctaaaccagctggaagactagctagctctgctaggtgagctgaccgacagctcaactgagctcggtgagctgatcaagtactgacccagctgggtggtccggtcagctgacactcgagctggtggactgtggtagctcacgggtgaagaggtgtctcggccaaaaggtgtaaggtcgagcgggtaccaacgaacggttgcatcgcccaaaagatgcaaggaacatatgtgacctttcgaaaggatgcaaggaacggatgtgacctttcggaggggtgcaaggaacggatgtgatgcttcgggaagcatccattcgccccctatataagggaggacgcccaaggcatctcacatcatctcacaacatccaaaacaccataaaacattcttaaaggagtcccaacacatcctagagttgttggtcggaaagggggtgcggctcggcgagtataactcgaccgaactgatgcgcatgctacctcccggtccaacggttcgatggagtgtagaggatggagagggtagaccgttcgtcttagagacgaatcggatccgatagaccgatcgttggatcggatcggccagaccgatcatcagacggatcggatcggccagacggatcggacagaccgatcgtcggacgggtcggatgggacaggccgatcgtctgacggaacgggtcggacagaccgatcgtcggatgggatggatctaattgacgtattggccaatcgagaccaacatgaacattgagaacagttcgtattgtcgccggcttgaccatcggactgaacgtctctgtgaaatcaacaccggcttcctgtgattttccattagcaactaatcttgctttgtgacgagttatgctgccatctgcatcatatttatgtttaaacagccacatagatcttacaatattgaccttaggaggtctaagcactaaactccaagtcttagtcttaagcatagcatctatctcatcagtcatcgctggtgtccaatttggatcagaaaaagcatgaatgtgactttttgggagaggcgattttgtggtggtgagaagtgagatgacctgttttggttttcgaatcccagctattgcacgtgtcatcattgagtgacagggctgaatggaaataaattgtgtttgtggctgggttctttgagcaggaacactagtaggtgttggttttgagtaggaaatggagtttgaagaataggttgcaattgagaagaaggaacatcatcatcgagaaattgatactttgtgtctttttgatgtgtttcggttgccggaaaaatatcctcatcaaagtatacatgacgagatataatgatcttattagtttttagatcaagacatatgtagccacgatgttgtgatggatatccaagaaacaagcatggacttgatcttggagaaagtttatgaagattggaatgatttaagtttggaaaacaaaggcagtcgaatactctcaagtgatcatagcttggtttcttattaaaaagacgagtgtaggggatttggttttggatggcggaagagggaagaatgtttaataggtggacatcgacatggagagcttctacccaataacttggcgagagttgagcttgaaagagaagagctctaatcgcattgttaatggtgcgtatcattcgctcagactttccattttgttgagatgtgtgaggacaagaaaaacgaactgtaatttcatttgaatccaaataattcttgaactcatggttattatattttcctccattgtcgcattgacaggattttatttgggtattgaattgatttttgacataagccgtaaattgaagggatttttgaaccattaccaacgatgaccgagtgagtgatgttatgattaagattagagtgaagattacctgctgtgcccgagagatgtgcagtggcagccgaatccatgacccatggtgcaccattaggatcaaccaaagtctttatcgtgtaagcttgtgtgaagtcagtcgtcgactgaatttccgtcagatgggcttgttgaggatactggtgtatttgaggaaagacatatgggcctcggtatgagcctagttgagagttgggtccccagttcgcaaattgattgggccacagattaaatggtctgggccagaaatttgagtaagtctaattttgttgattggggtgaaactgattgttgttcttgtttcctctgaaatgattgtttcctctgtagttgttgaatttatgcggctgtataggcgaggttgttgatggggttgcagagacggtgagagcagtggatgataatgagttatccttgtgtgttgcggaagctcggtgttactttttgaggcgagtttcctccaattccaacattgacttagccgtctcaaaacttggaaacagctctttgtgtttgattacgttgacgatgtaatcatatttgtcattgagcccgttgaggaggtaagtgaccagatgtatctcgttgaccggtgcatcaacattggcgagcagatcagcaagcgatttgagtttttgacaataagcctgaatcgtttgttctccaatctcttgattacgcaattcattatctagttggatcgctcgagcctctttgttgttgcggaattagttttcgattcggatccaaacgtcacgtgcagtgcctccagtcttgaatgatgagcggaacagatctggagcaagagttccatagatccagagtttaacgagtccgtcgcgtttcagccaagaaccatcgttatctccactgggaaacatagtaccatcaaggtgtcctagaacatcgaacgtcagacagcgtgtctggaaaagctctctccaagcatcataattgtgatcattgagatcgagaattaagagtatgtgggctttgatatttgtaaccccaaacgctcgctctatcgctggaagttgagcagccattggagacttttgaagaagaaaaaagagatgaaagaaggaaagaaggaaaaaaggaaagaagaaagagaaatgagagaaaaggttaaggagcgatggtgctctgataccatgaaagttaatgaattcctcttgagaggatcgttgaattgacaaggctatataaagccaatgttgttacacaaaatcagggattaaaaaatcatatatacagaatatataaaacagattgtaacagaacgtccctatattctatcatggatgtgtactttaattttttttagtagtaaatgaatgaaggtgttaaaaaaaaaacccaactgggcatggcaaagaatgtcacgaggcccaaacggcccacagaaaggtaaagtaaaacgttggccagaaggaagtggagttcggatccgggtcaagtcaccggagacagcgactcacggcctctttggtggatcctcggtggctctctcagcctctttgctccgcccgcgaatctttcccgtgagtcgtcgtctgttcatcagagattaaaatgtgtaacctttttccattaaatcatctaattttctaatttgtcgctttgttgtagaattgtatctatggcggaaccaccaaagcttagggttttaatggtctctgatttcttcttcccaaactttggtggtgtcgagaatcacatctattacctctctcaatgcttgttaaagctcggtcacaaggtcagattcttctaagttctaaatcaacaaaagttcaaatctttttgcatttttagccataaagaaatcaaattctcaaaacccgtttatgctagttcaatacgatgtgatcagattcaaagttttaaattcaaagtttcaagctttatcatcaatagctgtaatcagattaaaagtttcaggctttatcatcaatagctgtaataaactaatgtagcatagtgtgataggagcttgaggccaaagtttcattctttatctgctttggggcattggtttgagatactgttggttttgttgcaggtggttgttatgacacatgcttatgggaaccggtctggagttagatacatgactggtggactcaaagtctattatgtaccttggagaccttttgttatgcagactacatttccgacggtttatggaacacttcccattgtgaggactatacttagacgcgagaaaatcacggtagttcatggacatcaagctttctctacgctttgtcatgaagctttaatgcatgccaggacaatgggctataaagttgtgttcacagatcattccttgtacggttttgctgatgttggtagcatccatatgaacaaggttttacagtttagtttagcagatattgatcaggcgatttgtgtttcacacacgagcaaggagaatacggttctaaggtctggattgtccccagcaaaggtttttatgataccgaatgctgttgatactgctatgttcaagcccgcttctgttcgacccagtactgatattattactatagttgtcataagtagattggtttatcgaaaaggtgcggatttgctcgtggaagtcattccagaagtatgccgtttatacccaaatgtgagttacaaaaccccagctcacattagtagcagaatcattctgccatttctcattagtatccgcatttactttctttttatttggtttttgaaaggttcgttttgtagttggaggggatggaccaaaacatgtgcgactcgaggaaatgagagagaagcattctctacaagatagagtcgaaatgctaggtgcagttccgcattctcgtgtgcgctctgttttggttaccggtcatattttcttaaacaggtgtgctgattcttacactttttgtgtttaaaattcacaaaactcaacattactttttatcagttaacgctactatagtcttgatcctctgacagttctttaacagaagccttctgcatagctatattagaggcggctagttgcggattattaactgtcagcactcgtgttggaggtgtcccagaggcgtgtaacattttctataattccttcgttgccctttcgctacatcctcatcgtttctttcttcgagattgataaaatcaggttttcttcacggtttacaggtcttaccagatgacatggttgtacttgctgaaccagatccggatgatatggtacgagctattgagaaggcaatatcaatacttccaactattaaccccgaggagatgcacaatcgagtgagttctgcttcaaatccaagcctaacgtatcagtctacttataagagttaagattctcttctaagcctttgatttcctttttttgcttgttgctaccagatgaagaagctctacagttggcaagatgttgctaaaagaaccgagattgtgtatgaccgtgccttgaagtgttcaaataggagtcttctagaacgtctaatgcggtacattatatccttactcatatagattaataatgtaaaccccacccccttcattttctataccgatgaatatctgatcttttgtaggttcctctcgtgtggagcttgggcagggaagctattttgtatggttatgatcctcgattacttgctttggcggttacttcagttactgcaggtgatctatcattgattcatcttctctaatccttgttttttacaaaatgtaatatctctaaatataatggaatttgcctcagcctgatgaagatatcgaggaggcacccgatatctgtctttgccatcaccgaggggttgaggtatctgagggtctaaggaagaagataaagtgagaaatgggtgagtagagtttcatctccgtcgatatttggcattttgttccttgaaattatacaagtgagctcttgattcattgttttcgtaggacctaagtaacttcataaacttattatctatacagtttccagatatttcattacaagttattgtctttccgaaacagaaataactatggaaaagagagacgatgatgtagcaaagagttcagactcgccaggaataagtggttacttttgagtatcataacattactgagtttgttttactggaaattgtcgtgtaaaaattagttcaccattgcttgtacggtgacatgagccaatcctttcgagaataaatagcatgcatggtaattggtaaggcaaaacaaatagtaatgtattagagatttcgtcaaaatgggttaaaattgatgggccgatccaacccaatacgatccatcaattttattgaattgatgggttttgactataatggacttaggagtcaattcatgggttattaacttattatgagtaagaccataataattttaccctattgagtatggaacaacttgtatttttattgtatttgttttgtgcaaatttcctatataaaccaagtaaaagaaacatattctcactcctacatttacaaaagcaaaaaacagatttggaaaaaaacaaccatcagaattttattatttataaatcaacgtaattttaaattagtaatttttataatgtatataatacatattttcattctaaacgttatttgttccttttgtactatttgttcattttgtttaaacatttttgtctttgaaaaaaactttacaataccaaatatattatcttaattaattaaggattcttataaaaacaattcataacttagatgataattaaaaaaatataaagaaataaatttggagttatcatccatttctagaaaaagtcatgaactaattgagattcatatagaaatataaataaaataaggtgcatgaaaattgtgtgatataatgtattaattatattagctgtctttggtctgtaaaatttttagacaatttccttaaaattaccattagttagtggacctatcatttaaactttcctacataatttttgaactctgactattttttgcctttttcttatatatacaattaatacagatattatttatatttatgagttagttacacaattatttttgccatcttcgccgctacaggtcatggcgccaactctacctcgtataacacctcgaatgatttcatccactcatatatgaatattcataattcaagtaacatgaatcattttggtaatcattgtactaacacaagcggtgttgtttgtcataacaattacaactgtactattgataactctatccattatgcggatacacgtggtgttgttagccatcaccgagagaatattactggccatcatggactggtatttccggcggctacaatgaacggatatggtcctgcaactagttttccagatatgagggaaaatgggcacttgatggtgaatcaaaatagacctgtgacgctacgaccatcaatgtcccagcagcaaccacaaccacaaccactgtctgatgagtataataaggtggagacggggactgctgagcaagtctatgtcccctctcgagactaatgattggcgtcgcagatgtttctatgttcaactatatttggttttattttggttgctatttccattttgtttccatatgtttttcagtttaaggtgaataagagtaactaaatttattttcttttggattcagttaagtttcattttttttcttcatctctagactctagtccattaatttggaaagagtaaaggatgagaattcaaaatagttaaattaaagtatgattggagtataattgtagagactttaattcaaacattagagtgtagtttatatgcttatgttgtgttatagtttttggtggtttatattgctttcggtttttcctccttcttgtattctctgtaaattctgtcaaatatttatgaaaatggtatacatatataacattgatacaaaaaaaaagattagagtgtattttaatttaaaaggaaagaaatcctaatctatggaacaaaatctacaaaatttaagtcaaatgaatatccatttgtctagcaatttgtgctaaattatatatcttaaagtttaaagtgtgtgaaatgtaaaataatagagaaccaagaaacatgtcgtatctagtatatttttttttttcttctgatttagggatgtcaaaatcagttaaaatgcatgggccgactagatacaacccatcaattctaatggatttgatgggttaaatgagttttgattatctatatatttttgaaatacatttttaaaacaaacttttattttggtaaatacttacagagaatgcttttaattatattcatgtattcaaacaaccttacatttcattttctactatccatataaccaaacacaaataaaagatattaacattaaatataaaattagaaatatccatataatgttccattactaataaaatacatatttagatgactttggtaagattaaaataatggttcccttgaaaatggtgggtttatgtctaaaatgagccaatcaaaccctctaatattcattctgcacaatttaatataaaacaaaagtttgaaaccaaataaattgtttaaacttataccaattgaaacacaaactcaaaagacttcaaactacattgtgttgaagagacaagctttgaatccgctttaatgcattataaatcatcctctacttcgatgccttctaatttttttctcgtcatcaagttctatatatataaatcaaatttatttttttctgaattttgacatgtataaatcatataaaaaaatcctaaataaacctattaatttattttttgttcaaaacctttaaaaatattcagtaaatattttaatattgaggaaaaaaaaaaaaaactctatcttaccaagtctaaaagagaaacaaatattttcttaaaagacttttgggctggcccaagccctgtgaggctagaccccaagaatcctttaatcctttagactaaaatttcccaagaaatttcaaatttcatcactaaactttctaaatatattgtgacattcctcagtttattcgaataggaccattaaaaaattatattaggttttaagtcattaaattaactcatacttgtggactcgcaaatattatttaccaggatcatagaataattaaagatattacataaaaatgatttaaaataaaaagacaccctagaaatatactttaaaattcaaattattgtaattgtttttttttgtataatttctaagaatatttatattcacttatttttcaagaaaatagggaagaatttcaaaataaatatcaagatcaaaatgtatttcaaacaaagctcaaaaaattattatttccaactttactaaggataagagcaagaaattagtttatcaaaggataatcatggcattaccagtttctatgtgtatccgtttttatttgacaactatatacgcaaaagtaaaacaaaataagtgaaaaaagaaaagaaattttcacataagtggatgaaaaaagaattgctctcatggtttgtcaaagtcagatatggtctttaccgtttgtcttttcagttgttttcggaccaaaatatctttaatgggagcaaccaaactacacagcacttgattttggtttagtttctatgattcagttttttaaaaaaaaaagaaaaaaaaaactgaaacaaagaaatcaaagaagaagaaaaagagaaagagacggagagatttgagagacaagtagaaagaagttcaaaattcattattcactccttcatatttcgacatctctccattgaactccaaaattgagaaacaaatttcttgttttcagagatgaacaaaatgcaaaaaaaaagttcatagattcaaacactttagctttttaaactaaatatattctaggtttacaagatttatttataaatagtaatttttgagaaactgataaagatgaccgcaaaattaggtttgcagaaaaggatacacatgttggagatgactggaaaattacaattatacccttcatcgaattttttctgtgtacgtatattcaattacagtgtacgtacacgaaattatttattgggacgtatatgagacgatttctaataactcaagctattttattacgtattcttatatctcaataatctcaatacatacataataattaaataaaaatagatggtgaaataatgtttgttcctcatattgaacagttatatacgtatatgtgtaataatgtacgtacatttttgttggtaaatgaatgtatgtacatgtgtaataatatacgtacatctttgtttgtgaattgaattatcaagaaaaatttattgatacaatattaaaccaatattggtagtggctgagataagacattgtttgttgtatgacttttctgttcttaaaaacacttctcaatctatagtgtacgtacattggtacaaaccatgttgacacatacttcttagagtcatagctggtgtacggtcacccgagtgagaaatgttatctccgcgaggtacacgttgacttgtgtacgtacactctgccaatagacgactgaattcccctggtgtgagaatgacgttctcctcaacattccctattccatattcttctacaattacatcgttctacttgttataatcataatcttcgccactaatttcactaccgtcaatagtatgatcgagggtacttcccccaatagatccatcgtcaccctaataagcatcatacccatcaccatcttcgttgtccccctcctcttcatcctcatctgttttatcgtcttcaacgtcgtcttgctcatctacgacctcattattttcatcaacatttgaaacactatcacacacacagtcactttcagcatcgtcaccatgagttctagagacattatttccgagtgtcttgacggttgtaataaaagagacaaacaagttgagagaaggatactgaccacgaataaaaaagaacgtattcaaccccacttgactgtcaatgtagacaggagggcgtttagtatctatcatcactaacatctctcccggctagtgtacgtacaaattctgtgtacgtcatgttttccttaacacgtacacatcgaccaaacatgtcttcttttagttcaaatttccattctttttctttgcatctccactcaccgaccataataaatacgggaatatctattacccaacagcatcataaattcaggagaaacccattaaatgcaactgaaaacatgattatatctacaaaaacaaatagaatttcgatatacatatttataaacataaatatttacacatttagcattttcaaccaacaaaattaaaaataaaatatttctgggtttttctataaaaaaacaaagttgatttcgaacacaatgaagatcatagtatgttataacaaaaaaattctttaaaacttcattacttatacgataatgcttatcttggctccaaacttcgtaaataaacaagatcaacacttcttgagcatcaatgtacgttcgcaattaatgtttgttcctggattcatctttaactcaacaattattatcaataattttataatattataacatgtaatgatgattttgcattaattatgacaagagtcacgtctaaactttttgggtcattaaatgttgatgtcatttcgtttttaatggaaaagatctctcttctaactatatagtcgcgctcctcaacgtgaaacaaaaataacttcaattaaaccggaatagtgtacctaactaaacctgaataactaaaccgtacattaaacagtttctcagctgtagcagtaaggacaaaatggtcaaatttcagctgaaaagacaaaacgtgaaaaccacctttcactttgtcaatcattgaaaataaaacatggtcaaaaggtgtgacgcgcaaattacccaaaaaaaaactcttttaaaaaggttcaagggaatggagacgcgaaaagattaattattctcacaaagataaagatctgagttaacatagaaaaagataaagtctatactcacaaagacaacatgagtttgcggtattctccaagagcccaaatggggaatatgtttctataagctgagtaactgatcatacaattccgattaaagactcctagtatctcctgaacaaaaagtaagaagcaaatataatcaatgaggttagtgaaaacaaaacctgtctatgaatataaaacattttactcacttgttgtgggtaatctccatcttccatctgcgagttgatcagcgattttgccccgcgatgcaatggcatcggatctctactagccttcaaacccaaattatggattaagtaacaccttgcacctaagcaataagacattctatagagaaggatgaaactcacttgtcccgcttcaatgagagccaagagtgcccatgatgtgttcacaatatgcgatttattcccaggaagattggtgtatactttgttttggcaagaaaggtagctctctccccatccaccacaacaaagttgtttggagagcaagaaaccacaagcttttctaatacaaagactgctctcatatgttttgcctgaagccaacatgcctttaataccaaaccatgttgcataggtgaaacacactccccacgagccatacctaaaaatttatcagcataccgatagaaaaatcacaacatatatatatattaaagtaaaaaccaacttagtagcactgaccatgaaccatcaggaagttgtgttttttcaataaactcaactgctttgttgatgcttcctactatctccttcctcttgtagctcgaatttaacgttgtgaataacacgagaccttggatggcagctgacgtgcattctacgtatctgtggatttttaatccttcatcaacaagaaattgttgtttgaaatggaatttaggtaatactagttcgcatcttactgataatctatgatgatatccccaaaagtctctgatgggttgataacctgttatgtatatgcgcatacaacaaatgatatgagagtccactaatcttgtcttgaatataagcataacaagaagaaatggtttaacctctagctcgggatatgatctagttagctcatatgacgcaaatcccccattcttgttctggaagaagtaagcttatagaaaatgtatgttaaaaaatatatccgaaaatgcagaaagtatacctgtaatgataagataaagtttacagcatcaactaaatgctcttcaggcatgggttctccaactaaattaaccggcatttgtgacaatagcaacgccgcctataacaagaaatttcaacatctttagcttgttgagaaaaaaaaaacatatgaggagattaacaaaaaaacatgtaagagttgcatatttagttaagtaaccttcaaggcttcagcagtacaatcagagacaggccatggattgtctccagtggagaaaccccatcctcccttgcacgggtgtcggtaccacaaccccggatctccacttgtgtctttccttatctatttcaggttacgaaacaagagatcaatgaaataaatcagatcacaagagaatatatagtctatatgattaagtgaacaaagtacttgagtgttcttgatgtagttatgggctttcttaagcatcaaaccatagtcatcaaccaaattcgtcgccaagattgcttggaccgctaaagtcacgtcccacagctgagatccgttgtatccctatatggacattatatacttgtgaaatatggttcatatggaccaaaaaaaagaagaagaagaatgataatgtacctgcattttcattccatcctcagccacccacaaatagtctttaatccgcgagaggtgagatttaaatgcctcggaattcgaggactcgacccaacaacaaagcatattcaagaccttaaatcccacaccaacccaacatatatagtgttagccaaaattagtaatttaagtttactggtgcattgagatatatgtaacctactttgttgacaggaccgatacaaatatagtggctgttttggtcttcatagtgaatgtgttgcattactgtctgaagagcatggtttctgaggttattcaatggccatctttcaagaagaggctctccaaatttattcagacaactccaaaggacgtcttgaatctttggatgtggatagtacaagtcctcctacattgatatattaatggaccaaaatctaacaacaaaaacttttgaaaaaatcgctctaccttggcacattgattacgggcggtgtcccaatcgatatggtgataaggaatagtgtagagctctcgtcgaagcgataaaatagttccattagtacgacaaacaaatcttcttccatatagatatgacattggaagataaaccatcctacaatggcaccacattcggcccggatgaaaaggaagactatatggaaggagccatagctctggaggtaaaggattgttcccactccactcataagctccaagaacctgtttcatataaaatcaacaattcattatgtgattcgcgggtcgcggcaaaaccagtacaagattgtgttgttgttaacgtacggagagccagaacttgccccaggagggaataaaagtggcaccaccgtggtggtgaatccaacttctagctgattccatggctccatctccaccgtctaattcttcccccattagtctcagtgctacgtatgagagcactgtacaaaacatggtgctattcccttctacgtgtagtccccatcctccatccttgttctacacgttatatcttgttcaagttagggcttttttaccaacaaatagattggttctttcactacaaaaagattcaatatgttttcttgatctgaaacctgatggttatagagataacgacgaatctcgatttgatgttgcgcagttaaagttccatccaaaacttccgtcacatataagccgatcacctgcgacaaaaatcattaccggtgtatgttatgtaagaactttctttgaagcttttcaaaaccttgcactgtttagtgtacaatcgcattttttttgaggttattgttacaaatttcacatatatcatatctattttttgacaccacacatttttgtttaagaatttcaatttagagagaaagaataattaaagaattaccagagcaggcaagagaaacaaagggccaccataatcaccaggccaaaaaccatcttgtgattgaagtattgagtagaatctcaaacttcttcttaatgtaacattcaccacttcttcatttatcaatctttcttccccctcttttactttcacttgtggaagtctctccattccttttcctttctctttccaacactatacgttcaagttcatgtttatatttcaatccagtattggataaagattttcactttcttttaattaaaatctaattttctctaattatactttaataatctaatagccttggagattaagctaatttttgtcaccgttcatttttttttgttcttattaattaagctaatctcatagcccattttgtttttattcatagccaatcgtacatctttaaattcgtttaaaatcacaaccactattttaaagaacaaagtattatttgaaatagaaaaaattatactaattacgtgatattcacatttttttgttgtcaaacaattttcaaatcctatcttatcatatgttttgtccatatatgtctacataaatgacacgatcggatcttattttctgaaacccaaataagaagtaaagaacaatgactttgactaaaaaacgttaaatctcggccttacagaaatgttgtaaacatgaaagaacaaaataaggatgtgagtgtttttatgcagacttatatgactttaaaatcactaatgcatgatgggataaaatatcattttaaagaatttttttgtttcttaaagtcttcaaaaccttttaaagtcaatattctagtcactcccaaaattagctggcttaaaaaaaactaagacatatcaaaatataatcgtctcaaattttgaaatgttctatagcctttacagctttaataagtgaccttttacatgcaactgtggatcatgtgttgtaaaaaaagtaatctaaatttcacagttagaaatatgctagccatgatttataaaactaagtaataaaattatcaagttttgggtgcacaaaataaaataaaattttatcaagtttaaaatctgaatttaagatagttgctgctgtaccaatatgcgttataaggaaaatgaaaaaaaaaatgtacctgaaaacggtagagaagatcagaactatgcttagaagaaaaccgattgagagtaaagttgctacgaagatggttaatgtgatgtctctcttcagaggttccaaattggttatcatattcccaaaactgtcttccaacatgttgattcacgctctcttcgtctccttccgataactttaacctccacatctctttctttatctatctctccctcgatcttgaatgtgagattctttatattaatgtttaaaataaaaaagacagctcaagaaggcaaatctatatgtgttcaagagacgtaatggactcaccaatgccgtgaaaaatcttgttcacgttgaaagcaatgaagcatgcaagaaattatggatttattatttaatctaattttttacgtgtaacttataatgtatatatgaaattgttaaatcactgaaagtgtttttggtttatatatgtgttgtgattaccagattttatataagcaaatcaatgattaaaataacaatatgatcattttgttgacgtatcaatcacctattttttgacgttaagtgcgagattgacctaataaagacaaattagatttaaagggatctgtcacatggaagataaaagcatctgtctgtattcacatgaaataacattctcaattttttttttatgtcgtaactgaatagctgagtattctattcacataaattccagaattaggttagattaatattagtttgtcaccgacggttttcgagtaatgcaaacccgggagttcaaagtaggtcgagattaaaggctaaactgaagtttaaatatatagccacattgagaaatgaaatgaaaagaaaagaagcgtagtcctaattaggcaacttcatcgaaagaccgccatgtgaaaattggaggtcgtgaccgtctcatccggcttccggtgagttgtgcttcccaaatatttcaactgacacaaaaactcggtttcaagattgacagcaaaattgttggttgcctcttccacaatgcctagttggccatagaaattaaaatgatagctttctcgacattttagaagagggtcttactgttagttttgaagtcaagtttttttttgtcgactaaaataattgaaagcacagttaactggaaaccgaatacggctaccaagacaatccaaatttctcataacagtctttggatgaatttgtctttcgatgaacaaaactatgattattgtaaattttatttttctcaatcaatttttttggtctattgtttcttttgtaaatggatgtgaaaacatagttttcttttacttggtttgcatagaacatttacatataaaaaactactcgatttctctctacttactgatggtaagtttgtggaacttatccacaaacttcattgaccaaaaagatcataataacttcaaagtaagaacaagaagttatacaaacagctcatacagtattcatgcatcttatcttcttcttcttttttaaatgttatatcttacttaaaataaaataaaaattggttttttttacaaaaatagatgataacatcaagtttatttctgtataatattttgttaccatttagtgttactgattttctagtaataattatttattttttcaaatattttattctctctctattgttttgtttttgtaaatggatgtggacaaattattttccttgactttattgatatagaagatttacataccaaagatattaagtactccatttctttcctaaacttactgaccataaatattataataaattcaaagtaagtaaaaataagaatacaactaggtaatatgtttaatacattttatccaaagatattcatgaaatcttatcttatttttattttatattctatcttacttacaaaactatgacaaaatggactttcttacaagtatagatgataacaccaaactaggggataatcgggggtacgaccgggtaatatatgacagctaatatatttcggctatcaaaaaatcaacttatgtgtcatcaacttgttatgtgattataaatataataaaaactattgctttcaattaaacgatctcttacgtatttaactatttatacataattaaaattctcataatttttttcttttttagattagttcataatttttttgctttttagattagttcatgaacttataagttcttctcaaaagaattagtctaccaaaccaaatattcctaacttgtacttctttctgggacttaattggcatttctacgacacaccaatactctatgatttatataactctttgctttttattcttggaattaaacatggatcatcatttcctaaaattaataaaggcagataacgtacattttcctctgtgcaaaacgttttaattttgctatatacatatctacactattatttgagacgtacgttaagtgattctcaattaaaaaaattttttaccttaaaatcatatgtttaaaatattaatatcatggaaaaattacctttaattgagaatcacttaacttacgttataatcttggccattcgattgaattatttgtgtccgttcaatctctcgtcttcacttaaaaaacacgcagatccttttgacccggatttaaacttttgagtcatacgttataatcttggccattcgatttaattaattgtagccattgaatttttttcaataaatcctacaacaagatttttggagagaggatttttatttattttcaattattatattcccttattcaatactattcataattacgtgggtttaaaattggataactaattatactcatatatcaaaggaatttacaatattatattctaaaatattactaatccaattatttttttaaaaatattttctaatcaaatctgctttatttatagatataacattataaatatcgaattaatatgtttgaattcgaaattgggttaaatattctaaatttatttaaataactggaaaataatttaaactaaactattttttatgtttgatatttaaaatagaaaaaatatgtttaaacatttaaaaataagattaattacttttttggtttatattaatttttgttaattatattaattgaattcctttttcagcaactgaatcatattaatttaaaatattcaatgcgtatattcctttcttaaatttgaatatcaattttccataattataggtaatcaaatatttagttggatgtttatttttgaattaacataaagtttccaaacaatttccataattaaataactacttataagataattgttaaacattctcctataattttgggattcatcataatcattaaacttgacttccacgatttaatattttatgcatattgtttacctaaaaaattatatcttataaatactgtacgtctcatttcaaaaattcactcatcagttcctattttcttttaccctcccgcttctttttttattctagcagaagaaaacgagaccatgaagaaaacagaggttgtggatcgacgagaccatggagaaagcaatatatcgaggtgtcctcttacactctctgtttttctctatctttttcatgtttttctcatatctgtttttaaaaatatttatgcaggtaatgtgggagattaaaatgtatacgcacacatgattttgttaaagtatgtcttactttctaattatttatcttttatgcaaagtaataactaataagttaagctttttttacctctctatatatttataagatgagtaattctgattgaattttttgatagggattacggtctttttcttgttaatttgcataaacgcgatgatgatttataatttgactactatcttccaatgaacaacaaaattataaggtatgcaatattttttcttaaatctgatcgatagattctctttcactaatatattgagattgtgtaaatatttttgactgtagtttagcttttaatatattggtattgttaattaaattaattcaattttaatataagttcttattaataattcttttaattttttcttctataattctgattttgataaaatttatttttgtcttattaatttgtcaaatttgataattaatatatatattaataaaatacactaaaccccgacataccatgtatacaactacatatactaaatatacaattatgtattcaaagggatacatcaattctgtaataaattcaatagtatccatgtttcaatgataccaataataaattgagaaacttttaaaatttataaattatacaaataaacatttataaataaacagaatatattaaattcgtaatatatacagaagtgaaactgataaactaattaaagcatgactacgttaagtgattctgagttatttttttttgaagaaaacataatatattaaaagcatttcgtttttccatttacttaatgcaagcttttttaataccagtggagaattatgtaatctattctttttttttcttttttttctttagttatgagttttaagtatgaagaaagacattttccaattattatttgtcaaatttataattcacttacatgttaatgacatacacgaaaatatacaaatcttctatgtgtacaactacatatacaaaatatacaattacgtacccaaacgtacataccaactatagacatatattttccatgctacaaactgaggaaactacatataataaacaaaatatggtttgactagagtaaatatatttagttggtaccaataatacatgataaacatgtttaaagataatgaaaatatagtagagtttctgtaaaatacacataactaagatttgatgattgattaaaccaaatataccgtgcgtagcacgggtactgacctagttaactctctaataagtaaaccatatgatatcatttttctccttagtatgactaccacatagagtcagtttcttgttttctcagactataaccttgagttgcctgccccgttggatgtcttactcttctatgactatgtcatgaatatgagaatgtctttatgatcatgcttttttccacgtctttttccaatgatttgcctgaatgaaaataatttattatacacagaaatgtatttgatttcaaaattcaatttatgtgacctgaatgacaacaaaattcccgaaaacaaaaccaaaccatgagatgttttaaccgttctaagttttgtaacccagccggagcatgtccaatgctccaccttgttgaaaagatatattaatatcatttttttgggccaccttttttactgcaaattaacaattgtttggctatatactccaaaatatgaaaaacaatagttgttttaactacttacaaatttgaggtaactccatgtattagctattaggaggtcaaattattcaaaattataactcaaattttcacgtttgcaaattaattcctcaagttttcgctaccacgcaacatcatgctaaaaatagtcaacgttaacttctacgttttcttatttggcgttgacttttttcaattgtatagtcaatttaaacttcaaaaatttaatgtgcgcacacacagttgagaaattaataagtcaattgcaaatatttaaggaataatgaataatttccctatctatttggtggtttaatctccaacttatcttttggagaatcttgtttcacagttattaactttcactaaaacaaatgagttctttctaaaataaccttttaagttgtaacctaattatagtcatatacacatacaaaaaatctacaaaattctatattcatatacacgacttttgctttctttcttctctaaaaccatcatctttttgtgtagtgaatttgagtgaaattaactttgatacgtcaaaaataattttatttttattcttgagaatttgctaatcttgccattaaaagtatttttgggatatctaaaaactaaaaaaatgaagaatctaaaataatatttgttctacaatatagagtaatctctttttcataacatcttttacaaagaagttacaagcaaaacttgaaataaatatgtggaacagcgttatcaaaatacatggaatgcttatgatgtttgctacataataatttttgtttgttacacattacttgatgttttcatttttcaatgcaaaattaattattttatttgtttttaatcatttatattctgcgctttgttgtctaaatagtttttaattaaaaaacattatgttttaattttgtttttaaaaaaaaacacaattggtttcttaatctatttaatcatcactaatattgaaacttaagaagtaatgttaaaacaaagtagccctatagggtttttatagaaattaatgtaccgttaagtaatagatttcagacatcattgactatcaaaaactaaattttcggacaaaaagaatttcattactattttaaatttgttgatgttaaagagaatagattggctgaagtgattgatgttaagctgaaaaacaatcacaaccatggaaaagtcacatcagcggcaagactggctagtagttgtgtgaggatgaaaggtaaaaaatggccaacaatggcgaagtggctgtcgaattggagcacattcgctcattagcgtagtcgcgtttttttttgtatttttttttttgaagaaaagtaaacaggacctagtgtgactgtgtgaggtcattgattcatgctgatcttcaagaccgatcgaagtgtagcaaacaatcatcctgcatgcaggcatctggttccttgagcagtctccatagctttgatttgcgtttgctcttgatttcaatctattttcacttattatactttaaaagaccttgaaaactcgaaaccaggaatattgaactgatcagatcctggaccactgcaataactgagttcatgtacgtacaaaactaatatgtcacgactaggaatttagcgtcctcgtgagattgagagagacacgtatggtgtcaattgcccgaaggtacagtattagtttgaattgggcaacaacaacaaaaacgtgcgttctctaatactcacttctctagaaaacaacaaatatgataacgtaacctcctttgcttcttttcttattaattaagaccactcgtaactaataaagatgatagatcttttatataaaaaattgtattcgtcaatgctcttttatgaaaacaatagttcaactacccatacttgcatctattagctatctagtattctcatattattacaaacattatgcagattggagataattaccaacatttctatataaacaatccgaatttggtgattataaatacttaattaccattctggaagtaacaatataacaggtagtatctatgttattttggcatgaaaggaaatgatcttaacttctcaaagtatatttcccacttttctcaagaagatcattaataaactaatacctcttcttggacagacatttttgagttatcttgtttttgtttcggtcactagttaagaaaagagaagaaaactcaacataccattttatcacgttatagccatgttcgaattgaaaactaaccacctaaaactagaggatatgatttcttatctattttttggtttcattttaagcaggaccaaaacctaaatggccggttcctccaaaactagttatattttttttttgtataattgcaaattcataaagatgaaaagagctgcattcttgggtatatacatgttaacatatctttctttagatacagtggtcctcctatgcatcacatgcaatatcgggtaaggtcaaaaagatattgaattgtccacaacacataagaagttaagatgtcactcgtggacattaacgtcgtagagtacccatatattcccatggaaattattggtattcgtaactcttggatatttttaaacgttgttaatactttaataaaatatattatattgtctaccgaatcaaacacagctgtatcaacaaaaataatttgaaacttgtataaatagatgaagtggatatgagaggaatgtaagccttatagaagagaaaaaaaatatgtattgtagagagtccttgtcgagtctccagactttgaacgtagcaaagagtctcagctctttgttccctaaacaatcagctctcatcaacccgatctccgctggacgtcgaaacaacctgcctcgtccaaacctcagaagacgatgtaaggtcaccgcttcacgggctaatattgaacaagaaggtaacacagtgaaagaacccattcagaatattaaagtaaagggatacataacggcccaagaagagtttctggagggcataacttggtcgagaggtctcgatgacattgctgatatccgcggcagatcattgctcgtcgagcttattagcgccaagactgaccagcgtgagtacaccttttttttcctttaacgattttttcaatgaaatttaaaataaatagatacaaacatttgtaataaaactagaggccttagaaaagtccaaaaaagcaattgttaccgatctatgtgcttatcaaagagtattaaagacatggaatttttttggtttgtaaaacattacaagttgcgttagtacataaatttatcaaacattagcttatgaaataaaagaagctagctagcacatcaagagtctgtatataaatttatgaaatgatataaaagtaggttaaggctatcaataatgttaaccaatttatacatatttcagggattacggtagaagactacgcacaacgtgtatgggccgaagcccctgatgagaagtacgagtgcgagtttgagatgcctgaagactttggaccagtgggagccatcaagattcagaaccaataccatcgacagttgttcctcaagggggtagagcttaaattacccggcgggtcgataacgtttacatgtgagtcatgggtggcccccaagtccgttgacccaaccaagcggatattcttctccgacaagtcctacttgccttcccaaacaccagagcctcttaaaaagtatcgaaaagaggagctcgagaccttacaaggcaagaaccgcgaggaagttggtgaatttaccaagtttgagcgcatttacgactatgatgtgtacaacgatgttggtgaccctgacaatgatcctgaacttgctcgtccggtaattggaggcctcacacatccatatccaaggcgttgcaagaccggtcgaaaaccttgtgagactgacccctcttcagagcaacgctacgggggagagttctatgtaccaagagacgaggagttctctacagccaagggcacttcattcacaggcaaggccgtactggcagctcttccctccatcttccctcagatcgagtctgttctattgagtccccaagaaccttttccacacttcaaggccatacaaaatctctttgaagaaggcattcagcttcccaaggatgctggcctcttacctctgctccccagaatcatcaaagctcttggcgaagctcaagatgatattctccagtttgatgccccagttctcattaacagtacttacgaacctctatcctttttctcattttagtatttcaattttctgtactgttgagactacaactaaactcactttctaatatcattcacattgattcaggggatagattttcatggttacgagacgacgagtttgctcgccagacacttgccggccttaatccttatagcattcagctagttgaagtaagctacatactaatagtttatgttctgttttttccaataaagaaatatctcttaatgtctaaaagttgttgctagtaaaacatttggaaaaaaataaaaactggttttaaagttaaaaacccgaggtaacgttagggcctctccaacggtactctaaatcctactcgaagtaacattacttgttaatcttattttagagtatactttttcttaatatataaagtttaaaattcatttgtgggagaagtataagaatgatgatgatttaaataaatatgtattaaatcattggaaatggtttaaggatgtcaataatatttatttaattccaggagtggccgttaataagcaaactagacccggccgtttatggtgatcccacctcactcattacttgggaaattgtggaaagagaagttaaaggaaacatgacagttgatgaggtaagttaataataacatgtttttgaaaaaaaaacgcatatgacggattatttgcttaatgaattatattatatatttgtatgcaggctctaaagaataagagattgttcgtgttggattatcatgatttgcttctaccatatgtgaacaaagtgagagagttaaacaataccacattatatgcttctagaacactattcttcctcagcgatgatagcacattgaggcctgttgccattgagttgacttgtccaccaaatatcaacaagccccaatggaaacaagtcttcacgccaggctatgatgctacgtcatgctggctatggaatcttgctaagactcatgctatctctcatgacgccggttatcatcagcttatttcccattggtattggaaacacactctttatttcaaaatagatgatcctctcatatatggttttttcttgacagaaaaagtagtttaaatttttggtacctaatactttatacatgcatgtgaaatatcactaactaggaaagagatgtataaattttacaggttgaggactcatgcctgtacggagccatacataatagcggcaaatagacaactaagtgccatgcatcccatttataggcttttgcatcctcatttccgctacaccatggaaatcaacgctcgtgcacgccaaagtcttgtcaacggaggtggaatcattgagacttgtttctggcccgggaagtatgcattagagctaagttcagccgtctatggtaaactatggaggtttgaccaggaaggcttacccgcggatctcatcaaaaggtgtgtttgtgttttttttcctatatgtttaaatattacaaccacaattacattaaaaatctaatcaaatctttttccattaaaattttccgccataagggggttggctgaggaagataagaccgcagaacatggagtacgtctgacgataccagactatccatttgcaaatgatggtctaatattgtgggatgcaattaaagaatgggtgacagactatgtgaaacattactatcctgatgaagaactgatcacatcggacgaggaactccaaggatggtggagtgaagtgcggaacataggccacggagacaagaaagacgaaccttggtggcctgtcctcaaaacacaagatgacttgattggtgtggtaactacgattgcatgggtcacctcaggtcaccatgcagctgtaaactttggacagtacggatatggaggatactttcccaaccgaccaacgacaacaaggataagaatgccaacggaagatccgacagatgaagccttaaaagagttctatgagtcgccagaaaaagtgttgcttaagacatacccatcgcagaaacaggcgaccctagtgatggtcacgttggatcttttatcaacacattcacctgacgaagagtacattggagaacaacaagaagcatcttgggccaatgagcctgttatcaatgctgcatttgaaagattcaaaggcaagctccaatatctagaaggagtgatagatgagagaaacgtgaacattactctaaagaatagagctggagctggtgttgttaagtatgagcttttgaagcctacctctgagcatggtgttaccggaatgggtgttccttatagtatttctatttgatctatgcattttctttctcaaaaatgctttcattaattttctgtatctctgtcttcttgataaaatgaataaaacaaatgctcctttgtctcctatattaatctcaaacagataaagctgaaaatcccaaaaacctcttagtaattcaaaaaaaaaaaaaatagctgaaaagcaaatctctatttgatcaattaattcgaacgctcaatagtatgtaagaagtcatttacacagtacctcggtaagtgtttgagggttaaatatttgttgaatttttaacatcacactaatttagagtataatctaaattataaggtatacgtatgaaatcatagctcaatgatgatagaattcgttaattattctcgtaaaagtgaatatttgatttaaaatgagtcaaaatatatttgatttgacgaattctaaaagtgttccgcttgagttatagaaacatgctcaaaatgatggtgatgacttttttttagttctttatttgaaaagtcagtttggaaatgaaaacagtaaggctgaccaaacaatatacagtatgttatccaactcttatccgttttaagaaaacaaagtatgtgtaagagtcgggtaatatgatatcaggttatttctaaaccatctgtcttgtaacccatcattttacttggatatattttcttacatacaaataatttattataatagtttagacatgtcaattggactagtccagtctgacaaagtccagaaaattcgaatatattttatttagtctggttcggttagtaaaaattttgaaataaaaaaatttgaacttatatttcaagatctggtaataacagggacaagacttttccaggttttttatgtttttctttccagaaaaaaacaaatttataatttataatatttctgaaagatggatatatgaacaaaacaaatcagttgaaatttaaataaccatgaaagccagtttattttcaaaaaaaaaggtttaaaatcaaaaaaaataatctaatttttttatttaaactcataacaaataaaatataaaatcagaagattttaatctagacagtcgagccaagatttgttttttagatttatagtaaggcacaattgaaaaactaggtttagggttttcaatactattaaaaaaaacaaaaacaaatattccaattaaagaaaaatattaacaaaagaaaagtaaaaaaaaaaattaaaatttttttaggccggcttgaatctggtgggattaagcctcaaaaactttttatcccgaatgggttagcttaagggaattttctggatatatatttttaagtctgaatctctattttcagaattgatagtccggggaatttgaccctaaatgaaatatagtttgataaataaacaaatagacaatatctgaagaacaaattaaccgtccaaaaaaaaatatgcgaactcctatccaaacacctagtttaaaaataacaatataatattttaaataacaatgttggaatatcattaatttctaaggaaaaaaactaaaaccttaactttaaaaaaattaaaataggataaaataggactatacttgtacagttgtatcagtaaataataatttctgtaaactgccagaagaaaggtttattttcctttttttagtggacctatcaattaattattccaatataacttctttttttcaggtccactaaatatattttctatactacatattatattacatgataatatttcattctcaaatatacctatataaatttaagatttcttctatttaccaattagtttaattattagtttgttacaccattattgttttccatacataacataaatagaaatagagttttctgtaacgtttctatataatccaagtgaaacaaacatattttccacttccatttacaaaagaaaaagaaaaaaaaaacagagaaaaatggattcgaaaaatggaattaacaacagccaaaaggcaagaaggactccaaaagaccgccatttgaaaattggtggccgtgatcgtcgcattcggatcccgccgagtgttgctccccaactatttagattgacaaaagaactcggctttaaaaccgatggtgaaactgtcagttggctcctccagaatgccgagcctgccattttcgcagccacgggacatggtgtcaccaccacctccaatgaagatatccagccaaataggaattttcctagttacacctttaatggtgataatattagtaataacgttttcccttgtacggttgtaaatactggtcatcgtcagatggtgtttccggtttctacaatgacagatcatgcaccttcaactaattacagtactattagtgataattacaattccacctttaatggtaatgctaccgccagtgatacaacatcagcagcaacaacaacagccacaaccacagtttgagcttgtgaaggaggagacggcgtcgctgagaaggccaatttggagtctttaaaataaatattggagatttaagagtgttcagttctggacgttttagttcgtttctgtttgctttttctttcctcttcatgtttttcagtttgagagttgaactagggtttgttttagttcgatcggtatccatttgtctttttttcttgtatgctcatgtttttttaagatgaataataatacctaaaattaattatagatgtaatttaaaactgtttgtccatgtttgaagtttagtagagaatttgatttcaacaatggattaaattaaactcttcacaacaaatttgattcattttttcttttttggacacgaacaatttcgttggtattctagaataaataattctgtcataatatttaccgaaacataacttttatgtacagttatttatttccgttttctaatttgtcaaaattcgtttgtctttcgaacctaaaggttccaacggttatgaaaacattaattaaaaacggatatcaaaaactataatataaataaattaaagagataataaaaggaacaattgagtaagaatgtggttttatatctgttaaagaaatttccagctcacacttagctggacaataattatttaagatttgtttctgtatttagcttcatacatctattttaatatttcttaatacacagatatatattttaatatatatatatatatattattttcaagattctcaaggaaaaaaaaagaaaaaaaaaaggaaggaaaactaaatctaaagaataagaaactaatttttgtgtaaataaaaattactttaataaacttttaatagttttcccttaaattcttttactttatagattggttaatatgtatttagagaaaaatactatttaacctttatttagattaaaaaaaaaaacttgagtaagaaaatggtttaaaattcttaaagaaaattccagctcactttaagctagaaaaagagattatatagtttatagtataaaaataaatttaatcataccatgtttaataaaatttgaagaaaaacttattttctttttccatgaataacaagatttttcttaacaattaaaatttcttttagcaacatatattaatactttagttttctgtttttttgttggacatgggttccgccccattccaaaaagcccggcccaaatatagttaggcccataagaaagagacttgcgtttggtccgttacacaagctcagcccattaagtatcgtcaatttgctgggagcagaaaagaaaaatcatcccgagttcatgaccgcatatatcttccctataaaagcggaaaaacactgtcgagaaaggatcccgaatttcacgctgacacatatgtagagagtacatgtaatctccttcgtacaagtttccccattgagttcctaggaagcctttttttaatcgttagtacgtacgaacatctttcgaaccaaacgccttgtccgtcattcttgcacctttattcaaacgagttggatacattgtcttctcggattgtccttgtaaactcgtaccttcaccttgtataatcttgtattcgccaaacctaattcgtcttataagagattatccgtccttctccttaaacctttacatgaattgtatgatttgagtatcaacagtttttgtttagggaactacggtttcagcttcaagcaactctgacggttctaatggtcatcgatggccaaaaaagtgcaagaaagtatttttcaaaatagaattactcagttatacatagggaacaaaaaaaagataatacaataatcgaacataattagacattcttaataaagcattaagaggttcagatttatagaaggattgcctcatattcataggttttatttttataattttttttttctttaacatctatatattcatattgatatcgttttcgcgatttcttttgagttatccaccaccaccacctcctccattattttcgcctccaggtccatagttgtagaaatcttgtcttgggatataatggtgattctccacgctgcttcttgggtgctctattttctcagtagagtcttcttctttccctatgatcatctctcgggacactttttcgctttcttgattagtttcccggggaattatattccttgcagccaaacatgagcttataatgaccatcatcaccataataacaaccacaacatgcttagagtttatccccatattggttttattatgagctgcaaaagaaagaaagaatagtctttacataaacagaaccttgaagatcttagtatattgacatgaaatgagtataacttacctttgcaactaatcgtaacaagcgttgatgggtttagttaagtacccttaaagggaaaaagataagagtttaagacattgatatttatacatgcaggagaatagggtttttgttatggtgggttgactatttgagatcatattttaaaattatacgatttaggtacgatgtgacccccggtgcctagtggtgagacaatcacaagtgggagaggcctcttattggagaattaaattttttcttaagaaggaaagaattgtgatgacaaaatgatgaagttggttgaaaaagggttgtctattattggcactacgaatagggaaaacccacgttactttatggattagcattgtattaagtggtgcttttacaaaagtgtaaaagtaactagattttatcccgcggtatacaatttatctttttaaagttagtataatattttttttgcaaattgtatctatttataatatatttttattttatagtttacaattgttattaagtaacgtcctgccaaacccgtcccgccaaatccgtcccgtaaaaaaaccatttatttatattaatgttgatcttattaaagatatgtttataaatcattgtctaaatatttttgtcgatgcgggacgttgaacccacacattttttgctaattggttaatatatgttcatttttaaaattttgaatcataaaatatgacggaaaaattaagatttttttaaactctatatattatataatgatgttaaaaaattgtaatatatcaaactttttataagtttaaatattaataatgttttataaattttaaatatataaataataatatttaaaaaaataatatttttgtttataaggtaatgacataataactctaaaagcaaggatttagaagatttaaatctttaattaaatattttcattaataaataattaatgtcagtgacatgacattgtaaataaattcaaatacaaaatttatttatttaaacaaaaaaacgtttagtaagaataatatttatttaacaaaaaactttattttaaaatattgttaacaaatatgtttatgctaattttaagggattgatttgaagtttggtaggattaaatttgattcataatatgattgacaatttaaatcaaaaatttaaagtaaaattaattattttggaaaaaagatttaatgctaatggcattagattgtaaataagtccaagtgcaggatttatttgctaaaatggctgcaaaaatgtatatatagattaaaacttttctaaaacacctgagtgattactattcgtgcataggatacttttcgaattgattttttgagatttgctcggactaataggtcgtcaaaggaggcattatttcccatattccacctcccaaagaacatattctagtacgacatttgttaccgatcatcggaggattaaaatccatttgttctctggttgatataatcgctaccctaattggttcactaaatatccagcaaaacgacattttcaccaacacgagttgaagatgtgtttttgtatactagaaatgtctatgaagaccaagtgtcgttagctaaattggtaaaaaccctgggcgaaacttagaggtcgctggttcgagtgacgcttgggacaaaattaatattacatgtcgtggtttcgggcctaggaggattacgggtttcggcccaaaacctcttagtattcgaaaaagaaaaaaaaattgtctatgaaatgactttgagttttgcccctaagagacactataatgcggatccaatgggcgggactaacaatgtattggtcctttcgagcggtcgataaattttaacgtcttgatcatagagtaattttggtgagacttgtctacatgttgcttctagattggaaagaggaaaatcactcacataattacgatgaaatagattagatattcgttttcagaagtttactttgttttagtgcaaagagaaagtaaatgttagcacagtgatctttcttccactacaaaaagttggaatccaattgattcattaataattaacccttgaaggaataaattataaagtataacaaattaataacagattcctggcttttggttagtatcaatgggtggcaacttacattaatttatattagtaggacagtaaataatccgaccatgctgtaaacatttcaccatttgtcatcatttcagggttctatttaactttgtgaataacaaagtggattcaatttatatggtagaatgaatcatcaacttcataatcctcttgccacttcggataaaattatatacaatacaaataaaatacaaaatcatctgaaatagaagcatttagatatacattaaaacacttttcaccctctatttcgtcaaggatgacgttttactgattttctaaatacttgacagcgtttctaatttggttacaagaattattactctttttctgtcaacaaatataaagcatatatacaaaaattgagaaagatttgttgccgagaggatagtgaagtacatcgtaagttaaaacagaaaaagaggtttctatggattaatcaagattcaagattcaacaaatatgaactttctaagttagttcacaaattgctgcaaaaaaataaaaaagttagttcacaaatcaattatgatagataccaaagagctaaagacatatgatgttttagagagttttttttttttcattagatgggatgttttaccgccttttatgcaatgtttattatctcttttaacgtaaaaaacaaatataatctctttctttgcatgtaaatttcattaaataacaacacgataattctgtttatattacatatacattcgaatcaaatactaaattcttatctgtgagaataaagaatctatgtttccatattattcattgtccattaatttcgttttttgcttaggatagtattagtacaataattgttctgaataatgtatatttttatttttaaaaaaggataatataaaaattagatagattgtgtcaaatatttttttatccaaaattcttaggatcggacctaaccggatgaaatttgattaaatcaaaacacgaatagaagccgagccaaatcaaaccattctcacaccccaaacaccgtgaaggcgtgaaccaacctaaagtttgattaactccgacccaaatccgaaaacactctgagagcaagcccttctaaccgtctctagcttcgcccctttgtgtaactcggtttaaattcaccaagccgatcgtaaacaaaccttgttaaccgaaaccaatcatagaaagagtatctgaaatatgccatgcatgcatattagttttattaccttttttattttattattttggttaaaatctttcgaccggagaattctaaggcaaagaaactatccacttcccttataactttatttaaattctatttttgaggatatatatatgagctatatgcatataaagtcaacttttctttaagaaaagaatgtcgggtcgtgaagatgaagaagaagatcttggaactgccatgcagaaaattcccatccctgtcaacgtattcgataaagaacccatggatttggatacggttttcggttttgctgatggagtaagagagatcatagaagattccaatttactagtgagtttccttcaactctccaaaacatgttttggttttgaataaaaataaaactcatcaatgttctttttaccatgtagcttgaggaatctcgagagtttgatacaaacgattccaaaccgtctcgaaacttctcaaatctgccaaccgcgacaagaggtcgtcttcatgcaccaaaacgatctggaaacaagcgaggaagacaaaaaagactgtctttcaagagtccatcagatctttttgattctaaatttggcattaccgacaagagttgttcacattgcgggacgagaaagactccgctatggagagaaggaccgagaggagcgggaacgctatgtaacgcgtgcgggatgcgatacaggacaggtcggctacttcccgagtaccgccctgcttcaagtccggatttcaaacctaacgttcactccaactttcatcgaaaggttatggaaatcagaagggagaggaagtcatctcctccgaatagcttcggtttctcggagtcgtatcattcaactaggaaattagggttttgaactactttgtttttcttttataagtgtatagataaaacatgatattttatgtaaatgagtttttttttttttaccatctaaatttattatatattgcaaattatgagaactgttatataaacgattttatcacggacaattcctttcgactctcattagatccacgacagacgacacctccttctcctttttcttctccatgctcttgatgaacacttcaatatcttttctgcgtagaatcctcgcgaattgatataattgtacatcgtgtgaaatctccttcacacttgcctccattaatttatagttttacttttagatgagtttaaagacaaaacaccaaatcatatagtacaagtttgaacgataattattttacactttatagcaatcgtcttttcattattgaatagaatttgatgccttgaatctagttctgttcttcaatcttaaattatgaattcctttttctattatttcctttacaaatgtaaaaacctacaatttcagccactacaattcacatgatgaaacaattttaagaaaaacaagtaatcttataactaaagaaaacaagtacatatgaagaaacaatttcaatttcaatttcaatttcaatcttataattcttttaaacaaactaaaaaggataaaaagcaagtaatcttataaatcagataatctcaaattccggaagcatcatgccctaaatctcaagtctcattaaataagacacataaaatcacgtaccagaggatttagttgtagtagagctcgagacccatgccgtcatggatttcgtagtccttgagagggatatgatccttgtagatgttgtaccatttttggatccgaatcttttcgggtcgggttccagtttgggccgccacaagcttcttgagatctccgatggtgtcttcctcgttgcacttcactctcaccttcttcccaagccgatcattaagcaccacctctatcatctttacgattcttcttctataaccaccaagacaaatattctttctttcttctactccagctagggtttggttttatggcccatgggccaaaagaattttggataataatatatttttttgttttgatatgaatatagtaaatttagaaagacatcagataatacaaattgcacaatatattattgggaaaaatgtcataaaaatcatcggtttgccaaaagtggtgaaacaaagcactaactttgggtctcctgaattaaattatcaactttagttgactttcctattaaatcattaactttcgttgactttgccaaataaggcatgtcgttaagtcaactggcggaccaatttaacagaactaagtcaacgtttacattttttatttaattctaaaattttttatttaattctaaaaacgacttcgttttatgttttttataaaaaataataattccaactgcaacattggaaagaatcgaaccagtgaactcgcaaacatataacgttgtactcaaccatcaagctgaagtttttattgctcaatcaacacagacaaatacatatatcctctacagacagacgaattaaataaaatttactcatattcgaactacaaagcttggattcgaactatacttaactctcaaagaaaaacatgctatttaaccaactaaactaaagaatttagcatgaaaaacacaaacaatttttccattttggcagagaaaccgtggatctagaacttgagaatcgatagtgatggtaaatacgtctcgatcttcaagcttgagaagcgtaaatctcgatcccaagccaacgcaacaattccaattccaattctcagtacgtaacaatctgacgggctccgttctattcaatggttaaatctttaactattggtgtatgttatatatttttctgtgtattaaattatgtaagtgtacttccgcttggtggtttagtaattgatgtaatgtttacgatatctcgggtttgaatcctaatggtgtcttttcttgaattgatttttgtcttttttgtaaagacaaaacgacgtcgtttttagaacttaataaaaatgtaaacgttgactaactctgttaaattggtctgtcagttgacttaacgacgtgtcttatttggtaaagtcaacgaaagttcacgatttaatcgaaaagtcaactaaagttgagaatttaattcaccagacacaaaattggtgttttgtttcaccacttttggcaaactgatgatttttatgacaattttctcatatattattacgggaaaactctcaagaaaactccaattacttttactttggatgtttaatacaaactttttcggttagaaaaaaataatacatattctaattatagaatgtgatttaatatctaaaccattaaatgttgttatttaattatttttttactcactattatatttcataacatacaaaatatcaattctactcttaccatcttaattaattattaatatttaaatgacatggcattaatttgtatttttatttgaattatttctttttggtaatatttttatttttaaacaattactttgtttttaaattcaaattaaatataaaaatagaagaaaatcttttaaaacaatattcttcaattttccttttgaaaaaccttattttatctcttaggtgtgttttgttttaaaggaaagtcaaagaaaaataattttaaatattttcttctaatttttgtattttatctcttctagatatgatatgaaggataaaaattagaatttttgaaaaggaaagttaagggaaattatttttttgaagattttcttccaatttaatctcttctagatatatctcaacgatataaagatatagagtttttgaaaaggaaagttgaaaaaatttaattattttttgaagattttcttccaatttaatctcttctagatatatctcaatgatataaagatatagagtttttgaaaaggaaagttgaaaaaaaatagttttttaaggattctcttctaatttttgtattttatctcttctgattatctcttaatgatatgaaagagatcaaattagagcttttgaaaaggaaagttaagaaaataattttttttattggattttttaccatagctattgtttagataaattttcatagaattgtattcagacaacaacacagattgacgagagaaagaaaaaatactatattgatcaacaaccttcagctacaaccatcttggacgacaatgcgtgtttaaatcatattgtttctagcaaggtctaggtaatacgaattagttggtgaaacacgacccgacccatacccaactcaaaaaatgggtacccttttgaagaaaacaaatacccgtcagataggattcttttgctaatgtagatgacattgagacgagtaacggatatagcttcaaaaaccatatccgttagacattaaattcagagtttttattatccacgaacgtgcaaccctcacgaaagtctttacaacaagagtcccaataatcaaacgtaataagaaaaagtgagtaaaataaatccttgataggcataacaaaagcatccataagaaacctaaatgagcaaatcagtcacttggtaaaatatgcaaaacaacaaaagatgacttagacttgaagacttagtagtagtactgtacattcacacgtaccttcccttccctgtctgtctctgttcgggaatcagtgatgtcccacgtcatcaatcattcagacaacgactgtgccacgtcattcaactacagtcacctcctgatcaaccttccagtagttagtgtcgttgtactcctgcatactatcatcagggctctcctttcccggtgaggctgtggtggtgttcctcttcatcggtcctgcttctcccactatgccttccttgagagcttgatccattgccctttcagttccttctggctcaactcccacaaactcaacatcttttccaaacaatgaaggtacaggcggtgatctcgggctaatctcaccttctgaggatgaagaaccgtttgggattctcacatcaggcatcttcacatcatctgtacttcccggtgcaatggctgaagatgaatcattacgttcaacccattcaggtgacaattcatctgtacccacatcttcatcaatctcgatatcagcgtctacagagactgcttctgaggttgaggctgtggctgcagttgagtcaacaaaagggttcttgctttctgtaatcaaacagtcttcgtcttcgtcttcttcatctccgccatcggaagtttcattcaagcttacatcttccattgcttcctcggaagaaatcgctcctgttcctgtgttttcgcctaattcatctccttggaacgtgaaccagttcgagttggtgaataaattgctgcatcaagaaaaaaacatttcattggtttttggagccctttgttcttttctacctaatacatggatttgataaactagccctgaaagcttacttcgcttgttcatcaccaagccttagagatgatataacaacttcagcagattcatcatcaaaatagacatcctacagaatatgttacagtcaggtctgttgtagacgatgttttctataaacgtagaacataatatataactataatgaatacctcttcatctctgtcattagaaccatgctcctggaacgagaaacatggaatttagattcagccaaaattttaagaaataaatcagagagattaacaactacctctccagcaccattgttctcttgcatgttgtatctgaactggttcaagttattagctaaaccagcaagatcataatccctatcatggacttcgtcatcatcactgtccctagtcctatcatgtaatgcagtcgggcgtctgcatgcgatataaagtgaattatcattaagagacaaaatcggaactagatactgtgccaactattgtcaaacctgaaagtgtttggaccaagtttcctattatatttctatgcttttactaagacaacctagcaaatatattctgaaagtgtaaatactcgactgatagttgcatcaatagtgtgacaagaagccataaatgtttgatcagaggtgtacccgcaaacccagcgatacacattctcaactgcatttcgatcatgcaacgtattagcttcccactcaccccaatcgttattttcctaacaaagaaaaacagaacgtatcagaatgttgtatgtaccaaacaaaatgcagctatacacgtacacaacatttgacgtaaaaccatgcctaaatattagaaagaaaattagttagacataggatatttcattatggacacatcttgatgggttctgtaaagagaatacaaagtaatttacactgtttttactccaacgagtacataacagagtgatacaatagagtagatattgacaaacaccaataatcacaactcaaatcaatttatgtagaaagatggtatactgcagataacagtaaatctgcaatcattgttacaataaaaggttactgttactgaaaaacgaacctcaagtaaagtctttatctggttactgttagttgacagctgaacaagcttgtttgagattcttgagatatgaccaacattccccacccgtggagcctgctttccagcagcagctaatgttggctgcatgaaagcagaatcaattatatctataactcagtacaccttatccttaagaaaagtcgagaagtggatataacaggccatttctgaatctgattttaaaaacaaaaagaaggtataacgataactataattgctttgcaaaccacagaatccaaatcttgcctcacagaactgatgacagaagtagttcaacatcatgtctcacagaacatggtaaattgtgtattatctctctagacaaactttactcataagcatgcgcaaaacaattcatacctgcttatcaccagaaagaattggctgtttctctgttttaataatttttccaatcaaatcacactctcggagaagatggtcaactatctcatcgttcttgctttctaaacacgataaaattatactctccacctgatgatgcagagcattattatacgggtacctgcatagttggaatgaacaattgaaagatgaatttagccaagcgcggaataacaaagaatttaaaattttgtaatcgatccagggagtggagtgtatttactcaaagaacagatcaaggactcttctaatagctcctgagctagctagttcttttcctgttgcttcacttcgagttttcagcaagacagcaatgaactccacaatctaagcaagccatcagcaacaaaaacgaaatcagaataatattacacaacagaaaacacacacaagagtatatgtgtagatccaagatccaccttataactaaaccatcttccagttgacaataactaaaatttcaaaatgaaacctgaccttcagacgatgactgccaagaggaggcctcaactgcccataggttgtaggtaaaatcttttcatcagaggtcacatttaaaagtgcgacaaagtcacctgcaccacagatgaaagccaggtacgaaattcaagtcagtggtccaatcacataaagaagtggagtcaaattttaaattatatatgttcaacaagaatgaaagctgaaatatatccagctagaaagatcaaataatatacgcagaaactactattaagaaaatggaatgatgcacgaaattgcagcaatacaataataaagtagaagataatcattgatttgcaaacatttattgacagtacagaatcagacattaatcaatgttaggatgaaccaaaaagatagaatcgaatcctagcaatcagtaaaagagctaatacaagtgttctgatgaaaaatattcagcagcaaaaacaagaatgatatgatcatatgcactcatgtacagaacacaatgtgtcattttgttacactgaccaagtctaggcagcatggtggcaatagtctccggattcacagaaattggagactcgaagatttgttgtcccctgaatgaatacataaagggggaagaaactacagatcttcttgggctcaacaatgaaatgcacaccgaaagtgtgtggacaaggctagatttggactgaggatcttcgaaagcatgaccaaatatccttgcaacaaaactgcaaacaaaaaggtcactgaatcatcatacaatttaaacatgttttagcatatttaagacaataagacatcctacaaaccttgaactagaaagtttggtagccaacggtgacggtgcattttgagcgatagtgcacagtgtttcagcagcatttgcatgaacttcaagagagttctgatccaagccaaaaataaaaacaaaactttcagaatattcatatctgaactattcaaaattagaaaatgtaagtcttattgtttgaccgaaataataaccacacatgcagagaagcctctcaacactacatttacgaatttggtagtagggaatcaaaaaccgcatcacgaataaaacagagatggcaaatgcaggagagtctctccaactattctctactagtctcttgtcttataaaggtaaaacaatgtgctttttcgacatgaagaaccaacagatcccagttaatagtaaaacaataataacgagaagaacagaagtggctcaaaaaagctcattcttcctatatttcaatcatttgatgaatagacgctttaacaaattacttactgatgggctaagcttatccacaatcatttcaagcagattgctatcagctaaccattgcatcacatctaggtggttaggatacacatgatcatccgcaccaaccaaccggataagaacctatataaatcacatgcataagcttacaagtgattaccagaatcaaatataaggataagaggagagagaaggtttacctccataatggacgtgatccctatcaaatcaaccagttgctggaaaacattctgatgggcctgtatatggtattgtaaaacattatttgcttcttttctattgactgcacaccacataattcactgagtaacaagtataaaaaaaaaaaggtgcacctcaataatatgtcaaactattcaaggattttctacctaaaccacaacgtcatttatatcgacatagtataattatcattaacagtaggtcgaagaaaaatttattgagcacaaaaaattacaaggactgggaacatcccacttaatatgctttctgccacacaaattttattttcaatcagagcttcgcatgatcgttgtgctatttgcaagattttcaaatgaacatccaaatagagaactcacttttacatagttcatcagcgggaccgtcttcctcaacatgaggcatatgacaacctattcccagaagagacaagatacattggtggtaagtaacaaacatgtggagacataatatctaaaaagtaagaactaaaattctaaaatgaactattgaaagtgaccaatgaaaacattaccttgctgaaatacccagctagcattacactgtgggaacggttgggttccaaaaaggagaaaagtaggttcattagctgcaacaagaagtatgaaccattaagtgagaccagagtaaaagacacatctaactcaaaataacaaggttctgcattcatcataataaaggaagaagaaaactaggacaatacctcctcctcgtccactaaagtcttgagaattacatcaatttcacaggtcaagacttcagaggagatgaaaggaaacctaatagaaaaatatgctttaaagttcatgaaagttcccagaaatattccaaaaaatcaggtcaactgtacgtctggataaagctaatcagcaaaagaaaggaggcacatacttgaaagcgcgcttgctgtctgcatcttcaggagattcttcaacaataaaacgtaataactgttccacttgggctctttctctcagactgcaaatgagcatataaaataaaagcataaaaggccaacattgcaatccttgctactactatgagaaactaaaacttgcatagcataacagggtcatcctgcaaagaaaacatgaatctaactacttttcgtgcaatatctgctggattgcatatcctcttcaatctttttaaggaatggttaatatagagagaagacacatgtcatagtacaaactaaaaagcataccaaatctacacataaactacaacaaggttaaaaaaagaggacgcctaaaatgaattacaaatttatgagccggctgttcaaagctctgcattcttggattatgtcttcctcatccaaaagttcttccaaagtgaaatcttccttgtctaatatggattcaacctgtcaatcgcaagtaaaagataaggaactacatcattcctatttagtttctctcttctctaaactacacattaccagcttccaagaacaatttccatcaaaacatcaattacaaatgaagtttataagagatgattacaaattctagctcccgccactatattgaacaatgaaaccacacgaaccaaacatcaccatgactatgaaactattggaagacaaaaatcaatgatacacaataacagtggcgtgaagaaaacaacaaattcgaagcagtaaataacatccgaaatcaaattcagtatcagtatcgaaacaattaacctccacacaattaatttacaggcgaaatcaatcagttcaataacaaacgaaatctaaaacatttcagaaatcttcactttgcgtaagaacaaagcagattcagaaagaaacaatcgattcagaataaaacgatactaagtacgaattcatgagtagagaagactttgtatactcaccggtgaagcagcagagagagcagtcaacttccaaaacatggtgaggatgatgatgaagaagaagaagaagaagaagaagacgagctaattagatctcttatcagagcgaaactcaatcactaaatcttagagcactcgtcaaaaaaactcgcctggaaaaaaaaaaaaaaaccctaatttgatgctggtggtgaagaagaagaggcacgaaatgagaaatcacataatgttagaaagcatccaaaaaaaaaaaaaaaaaaaaaaactaatctcagcaaataaatatatttaaaataaaactatatgaaagaaatattatttgttttagagtatgatgcttgtgactactagttgcacgattggttcgtatttgagagagatacgagtgattagaagcttggtttagtttggattagtgtaaaccgattttgaggttctaatgatgtagtatattttcttggtttaaagtactcgctcctatttcttttttatcaaaaagttctatattgctaacaagtgtaacatcttttataatcccttcaaattgaagcagccaaacgtggttgggcttacatatgatctttaataattatatatagactacaacataagataaataattttaacattacaattacaaatgtgtcgaaacgaaaaataaaatcttcttttagctttgatcgatcaattaggtaagtttgtccctcactccctcttatcatacttacgagcccaaatgttctttccgtaaatcataagctcttttttctgctcgtcatcgagtacgcggtccacggtagtaaccgagtccaagacaagcctcgcaaatagtgattgttgctcgcagctcctatttgcgtttgcattgaaagatcttttgttgtcatgttgcatgtaaactccctcaacacaattttctccatactccttggtaaagagctcaattatctcagcatgagtcactggataaccacgagaaaatgttaaaaacaaggtccgatcgttctcagtggcgatgcaattagcgttccagccccatagaccatttgggatgaaaaataagttgttgttcttgttggagaaattatccctatcaacttcattaggcatcacattgatgcttccaaaaatcggatgagggaacccggggatttgaagaggttggcgaagtcttgcgtcaaaggaagacattgaagaaggtggaagaactcgtagaaggatgtcggtgaagattctggtacaaacagtggttaagaagtttttgattcctgtgatagcactatatcgatttttgtagatcatttggagtgatatattctttttcagatattttgtggtgagagggattcggccaattgggggattgtttaaagaaaggcactgaaagcatgagacagcttcgtaagcaagaccggcaatgagtggatctgtgagagtgaggatgattgagaaaatgttttcaaagccaaagtcctcgagccaaagccatgtggccatgacaagaagtgactcagctggaggccttgagaatttgaggaccaatttagagaatatctctctgtcttgagcatggaaaacatgtagttcttgtgcgttgagaagagacataatcgaatttgactgtagaaagtttggtgaatgtgaaagaaatctagaagttgttggaatgcattttattatctaatcgcctcgttttatacacctaaaagcccgtgtttttaggggtttttgcaaaaagaacataaaaaaagaccctccaacttgtcatttttcgcatcttaacccttatctccaaaatgtgcaggtcaatccctttaagttaaaagtaatacgcaatataactcgttcgttaataaatacaagaatttgattgtttttatctaagcacaaactagatattttatgattacttataagtaacagttagttatgaacatctttttaagttagttttgttcacttacatgtaatgtggactattacatattcaactcagaactaaaacaaaattcttttcatgtgatgtgaactattatatatacaactcataactaaacaaatttgaggacaaaaaatattattttctactttagttattagcattgagttttaaggactaaaccataaataaaataaaatttaatatatatatatatatatatcattcttactaaaatcttatataccatacaccaaaaaaaattcttaattaaggtggtcaataagattttgtcatgcctatatacattgtatgcaatgataagattttgtcatgcctctaaagaaaattgtcctttctcattccattttctttctttataattgattatgaaaaataggaaaatggtaaatatatatttgactaattttgaaaaaaaagaaataaccaaatttagataagtaattaatctggtaatataagatattttctttatatcttctatattacccttttggtatatttcttactatgtgtattattctttttttttttttatcaaactatgtgtattcttgaaattgatgaaaatcttgtcttaaatttctcaaaaatacaatatttaccaatttttgttttctatccccgtttagtatagtttgatgttcatggtgcgctaagttgcaataaaatatgaaaatcatgctatcttgaatcttgtcattgatacatcgttggctctatatgcttagagtatatacatcgttaagctctaatgtaaaaggcaaagataagctatgaaaaatatatagcttgttagtattgtggtatatagaagtttatttcaaataaaatagcggatatatatgtattatgacaattatatgagaatgtatgaagctgatcaagaagatgtagtagttaaactaaacgaaactaatgttgatgaaacagaaaaaccgaaaatgtctactaatgttggtgatcaaagtctttgaagaattgatatactcgtattttttaatcggttattttttgttttataagatcgatgtgtttacatatttttaggtcgtcgtataatgagttacgttcattttttattttttttgaataccagaaggttctgggccgaatcccataatcccccaaacccgaaaccacagtatgtaatattagtttcgtcctaagcgtcactcgaaccgacgacctctagacgaacgcctagaatctttactaattgagctaacgatacttagtgttacgttacgttcatttttactggttccaaatatggaaacattctttatcgacaaagacttgtacgtaattgtgtaaaaattttatattggtcattgtaatattcatttttggagtttagatgtcacagttagattgatcaatgaaagtttcaaaatttggactttcggtctaaaagatcaatacagccggagaaattctcaaatctctcaatcatatatttcaattttcactaaaatttgtatttgggctatattgtaagttgggttgggcttttataagtgtaaacattttcaccttttcctaataggttttcttacagacgtgagagctcgctcactcatcttccaacaggccacatacattagagattttgcggtttctttaacaacaacttggacgctatatgaacagacgtactaatggtgggaaaataaccaaaatcaattcggactattttctggtgattttttaatacccaaactacgatactcggaaaatatcaatgtaaactcactaaaaatttaaatttccaacctaacctatatgaaaatagccaaaatcaacatatgtcaaaacggtgttagttaatcacttaacggcgatgaatcagccgacatcgtggcaatgacaaggcatcgtagttgagtaatacgactttgtttcgtgagtttagggttcttgaatcaaagaatcgataaagtaatcgccaatgaatcttcgattcgagaaccctaagctcacgaaacgacattgttttactgaacttcgatgccccgtcattgccacagtattggctgactcatcgtcttaagcggtcaactaacatcgtttcagcatatgttgactttggctatttaaatatagtgtagattgagaatttgaatttttaatgagtttaggttgatatatactcaatattatagtttaggtatgaaaaaatcgccaacaaataatctaggttgattttgaccattttccctactaatagtgatatattcttttgcaaaaatcttacaaaaacatttctgaaaaagtaaaatgatcgtaacgtcgattagcttaagttaacgatgttagtattgattcgaaaatattatatggtaaaaaccttcgaaatgtgattttttcttttatggataactgagagaatctcaaaccaaacttcagcctatgtggaatccaatcattgtacaaaatattagcccattagcctatgtggtgagttttcatgaagatagattcatatataaattcgtctagtgagaagaagagaagtattttctccatcttatatgaaattattctaagaatccatttgtgttttcagtgataaggtaaatctctttaatcttttacattttttgcacaataacttttttatgagctattcaatttctaattaattttatctattttagtaaactttcggattctcccactctaacagcagtagagaacttttgcttgtattttttgtatagttacttcaaagatttgaacatttagggacaaagtctaggccctcttaaaaggcttaaagcctcaaggattcagttttctttatgcttttgagactctttggttatatataattttgaagaaccaaaagaacttgagttcttgaactagttggtcttgagttcgaatccttggatggccataaagtttatttatttatttaataaatatgtttgttaatgggcttaatttgctttagataacaaaacactttgagcggtcctgcataatggaagtgaaaacaataaaatagacgacaatcaacttcatgttttatttgtaattaattttttccaacttgtatttttcacttaatattatagcaagaccatgtataaagttctaatgatttataagatcagattattaaaatgaaatttgtattaataatatgcaaatttcctaacggacgaatttcaaaactagtcataattggatgttaaaattcggttctattttaagaactgatatggaccgttgatctaacgacgttgtgtatatacacagagatacatctacatatacatttttgcagccattttagcaaataattccttaagttggaacttatttacaatgtcatgccactaacatttaatgttttaacaaacttatttttaaatctaaatataaaatcgattatgttactaaaatttaggaaactaaaagaaaaaatcacaaaaataattaaatctttccaaatctaaactacaatatactacacactaacattccttttaagggatcaattagcaataatcacgaaaatttttccttttaaatcatttattttcagttaataaaataaatcaaaccttatattacaatatatgcgtcaatattttcttttgaaaaattaattacgtaacattttaaaattttgaaacaataattatttccaaatccacatgtttcgttttaaatttgcaattgtacaaaataattatcactacctaaaattttcttttcttatttttattaaattttgttctttttttggtaaaataaattggacatgtattaagctgatattgctgactcaaataatgttaacaaaatgcccaaatttaggctattaaaataataaaaaagttagtaaaaaacacaagtatatcaatcccaaattatgattaaactaaatatttatatataataactatcaaaaaatagcattatatacatattaaaaaattaaagtacctttttaaaatacttttgtgttataaagtaagaatttacaaaaaatgtcatcacattaaagtcaaaaacaatttttatttttaaatattattgatatattttaactttataaaaaattattaatatttaaacttattaaaaattaaaatatcatgaaatgaaaaatatagcgagacgggtttggattgatatgaaatatagcgagacgggtttagattgatataacacatgttaaatatttattttcttattctatcatcaccaatttttttagtcacaatataaatataaaattatataactttaatactaaattaaaaacaataaaatttaatattattatataaatatatatatatataaataaaacatttgccccgtggtgtaccatgggttaaatcctagtacatattttatttcatcaaactgtgaattgttcttatcagaaaaccagtttatgtgaaattgttagaattatgtatcaagatatggttgttatactgaggaccaaagcattgaccatacccataatgtcctttaaactaaaaaagtggcctctcggtattctaagagtcgatctttgtccagtgaaaaccaaagcaaataatgctttcagtttcattcatcattggaagttgaagctgacatgactaagtctaagtcatgagaaacaaatgatacgtatttttatcaaagtgtggtaactagtttaatttctatactattatccactttatttctatgacctatccctaatggtttatactgagtgtcaattttatttgtaacctatagcgtgttcggtggaacaacgttcaacgatcaacatgatgaagcatagaaactagacattggtcaatgtcgagtcgatgattgttttgatgtcgtgttaatatgtgaatcagtaagatcataaaaagatttgtagtgaaggttttgagaatccaaatcttgtggaattgtgtttgtctctacattctaacatatttttaaaaatataatatgcaagattctatcaaacaaaacattggatcaattgtctacaaatatatacgtacaatatcgattctatattatagtttaaaaatctattaacatcaatattctatttttgaatagtttatttgatcaaaaatttatttatgttttatttttgggagggtctcactttggaccattctatatagaatttataactaggtcgaaccatggatgttcaagatatcaacttatgtaataacactaggctatttgcaactatcgacagaagttgaagaccgtttaactataagaaatttgtttttgctacatgtgatataagaaatttctctatatttgtgttatatagagaaatattataatatgatttatatggataatggaagggtgcttacgcagcactttagcaccaaaaattaatctttgattgttagtgaaagtggttagtggccacatctaaaagcaatgatttgttttgttgtacattgaataatggggacatagttacaaaatggaattggacatttaaaaaaactatatatatgtataatatcgtcaagttgacaaattgagttttttcctcccaaaacatgtttggacgctcaatttagaagatatcaacatgagtagatagaagtcgaggtttcgaagaaatgttggagttctaagtcttagccaagatgatttatttgaaggtgcaatctatttcgtatgatggcattatttggaagagacaatataaatgaaattctctaaagaaaaaggaggattggatgttgtttttggtcggaaaaggcgtgattagatattgattatatggcctaaaacataatatgcatagtaaattactaacatgcaaaaaaaaaaaaaaaatatattacaaacatgtaaaaaaaaggaaaaaaaattacaaacatgtaaattttttgttaattcatcttcatttcttatattttataatttagtcaaagcaataatagtttcttttcgacgaaaaagaacgaaacttgggttcactcctttattcacctccttttgcattaatcaataaaacatgccatgtcaaatcctacttaaattacataataaattaaagctataattataaatttaaaccgatatataaccttgtttaattacaaaatataaaccctaattctcctttgtaaacataaaccgccatttaaactcgtttaatcgtaaaaaaaaactaaaccctaatcgtatttctaaacccaaactgacatttaacctcgttaattgtaaaatctaaatctgtttataaacctaaaccaattttaacccgtttaatcataaaatctaaaccctaatcgtactttctaaacccaaaccgatatttaacctcgtttaatcataaaatctaaaccttgacattttctaaaaaatccaaaccgatacataattttgttttaatggcaaattagattttataattaaattaaattctttttattattattaggtgttagattttaattgggtaaaataaaagagataaatataagggttcaccactagggggtgaaccaaatatttttcgaggaaaaaagaacttttatgatttattcaattaaacttttttaatctttaccctttatttagcccctcactttttttttttaattaagtggaaatatatcctatacaaaaagtagaaacactagcttgagtattttctctaatgtaatcataaatcctcaaaatcacataaattgcatgcccctttgctacctcaacaacaaacccatgatcacatcatttctattccacaacttttggttctcaaattaaatactcaatttcatttacatccacacttcttatcaatttcaatatatacatacaaaaatatgcaaaattgagaaaatggtcaacattcaattttaaatgctctcactcgtggacaatgcagatgtcaaacaaactttgatgaaattgtctgctctaaattattaattttgtttatcacagaaaaatgcataaaatatcttaaatttttattaattgagaataaatcatgaacaaaaataaatcagtcactttcatgtaattgtaacctctactttgcttaccaaccccacccacatcaaacccaaaaaccccaccaataatcaatctgtttgtccctatttcctattatattccaattttacccacaagttttctttgttactaaagtaaccccacaacttttgttaagtacaaattttcccgatttggaatttggtagcagtacaatagttagttacagtactaattttataatctcaaatgctcaacattaaaactttatttagtaaaagaaggcataatctagaaaatattatatgcttcttcttctcaaaagttatttagtaaaaattgttattataagaaaactaaacccccccaaaaaaaagagaattatactttttaaaaattaatctaagaacccagtcttttccaaaattgcatttctcaccctactcatatctcttcctttcaatgtcctcccaattccttcatgcacagagaacgaagccattctcgtcttcgccaaatactcatgcggcggcaattttccttcgccgccatcgtcatcgttttcgatgcttttccgattctctttcccgagaatcttagaccagttctgtacgttcatcggaagtgaagaagctactgtagtggtggttacggttgccggagacgatttacggtttgatgtgatgagtttccgacgaaattcaggcgaatcggagcggttagagtatagatcagactcgtcgaactcgaattctgaatctccggtgacgttgtaagtccgatctgttggaaggaagcgatgactcgggcgttggtaatagctctttctcgtcgctgtcgccattgaaggagaagaagtatttttttttgttttgtttggagttttggttttatgagagaagtctttgaagagtctctctgcttttataaatgttctcgtcgattatttctctctttgttaacttctagtttgtgtcagatgaaatgacataaatgcccttttgtttgtggttgaggaatattacatgcgtcaatgtataattgttgtagcatattctaaaaaaactcaaaaacttttgttttacggtttagttttaaattaaaagatttcatttttaatgaataatttataaattcaattaaataatttgtgtgaaagattgaacaaaaccgtaaaacctacactgtagtcgttataaatttactttagtttgcttagttgcttttagtgaaagtttctatacgttttttttaagtaaaatatctttctttttatggtaaaacttttagtaatattatcttcctaaactttagtatttatttttgtagattcctaaataatatggagaatattctaggttaaaataaagttcggttgtcctagatttttgtttaagatttgtttcttttatctttggcgtgtaagtttcaaatatatgaagattataagaaaagaaaaaaatgattgagaagatatcattcaaaatctttgttctaaaaatccgattaattgtccgcctaagcactcatcggagcacttctgcagcgatttgaacaatttgctctaaatattaattttgttttaaactcactttaaaaattctaaatcgatatttaagttatagatatatcacatttgagttaaaattactgaaaaatacaagagaaactgttaacaatatgttgcgataaaaagatgcaaccatttaaatgcgaaagatataaaagtagctgagaaagataattgtctaaaaaaataataataaatattttaaccaaaaaatgtgataaaaatacacaaccgtaaatattttaatgaaaagttgagataaaaatgcaatcgtttataaatacaaaaacacatttattcagattgttattattattagattatgtgataattgataagattcaaattttggtaaagaaattttatagtaatggatggttaactacttaacttaaagataccttcttcgtttgttatttaaataatacataatttaaagaattatacttttgctcaaaaaaaaattatttactttgttccattttgttattaaaccaagtaattcagtctacattttcaacaaaataaatgtgacgctagcatcttaattgtatatttcttgtcataccgtctactgtttattatcatttattctgttaaaatgtcttttcagtataaatatgaactaatgttttcatttaaaaaaacattcctaccaactatcttttttcttttctttataacttgaaaatttgtgtctggcataaatctttcggaacaaaattatctttctcaatgcgaaatcagattttatgttatttttataatcgattttcgattgaaaacattgagaacaaagttattacaaagtaaattattgtccaactatctaactagttaggccaacccatataagaaaaaaataaccgactttgaattgaatatatagtaagtatgatgatggcccaataaggattccaaccttcgtatttcgaagtgaagtaatctttcaaaagttccaatgtgagaaagcccaatctcaactacagcatcaacgaagcccatttaaaacatatccacccatgcaatcggatccgcgaagatttgttaccaaaatccgcgtgttttaccggaatacatgtatatcttgatccaaccgggctaaccaggatccgcattcttagtgagattttgaaaactaccctatttttgagtttttatttgaaaatacacttttcctattttaaatcaattttgtctagatttaaaataaaagatgtttttttaataaattaaaacaaaatttgaaatttagaaaaaaaaaaagtaataagaataatttcgtgctcttaattcttattatgttttcatttcaactatttttgagataaagacttatttattttagatattaaaatttaacaaaataatatctaaaaattttcgaaagtctatcacttaataaagtttatttatttatttttttggagaaattgtttttaaaaatatcgagataagaattcttaattgtttttttcaactatttctgagataaagattttatttatttttatttaatatttaaaatagtatttaaaatattttaaactctatcacttaataaagtttatttttttttttacttttttgacaaaatttttttataaatatttaagataacaattatctttaaaattattagttacatcaaatttttatttatggattttttgttgtgattttaagtttaaaatcattttagttattcttaaattttttttagtgagactatttattaattttttttattcaaaattattttttatttttttaaaagaatagggtatttttcaaatgaaaactcaaaataaggcattttttcaaaattactcttctttttatatgtgaagctgccaaattacccttgtacgttttttattatgttgtctttgaatggaaaaattgcaatggcttacatcgtaattaatctaccagaataaggttttttattttgaggatttccaattaataatatagatagtgttttcaaactgaatcatttattttattttatacccttctaaaaaattataagacatcaactatttttatttttattttaattacattcacattcattctgcgagagcattcaataaacaatgtaaatattttaactaaaaatatgtatagttttagcgtaaaatgattttacatctaaaaacagtttacgaagttaaaccaacgatataccaactactattaaagatttactaataattttggaatccttagtaatttcaaacatgtataaatccttatctttataagtgcatgaaatacttatcttttaatcggagggatcctcttaaagagtctgaaacggagatgatgtagttggtaataattatttgcattgtcctttttataatcctttgtttcaaagaattaagaatcgtttagtcaatcatcaaataagatttaacaccaaagttcactgttaattaaagttcatatagcaaacatgtaaattactaaaccaacaaatacattaaggggctaattaacaataatgaagcatgagatgatatgttctgaagcatgcgttaataattataatcaaattgaatttgtaatagagcatgtggtgattataatgaatcaatcgatctaaccaacaaattataaagcataaattatcaacgccatgaattaagagaatacgcaaaagcaatggatcactctaatagatcatgataatgaaataatataacatagatctccacttaccaaacaaactcaaactatcgtcgtaccaactaaaccaaataatagaataatggatagtaaatttccaccatataaatttgttaataacaaacatcgaataaagcaactgaactgaagcaataaatcatattcacaccatgtttatgatacgataacataaaaaataaagtaataattgataacaaacaaatctccatgctatcattgaattagtacatcgaataattaattatagcataaacgattataagcataagcattaggcgataatcctactatattatttgggaagtacattttaaatgtaaccttaatttttgtaagtaattacataggtatgccattagaaataaaattttaaagagtaaattaatttatcttttcaaggattaaaaagtcaaatactaatttaaataattaaaattaattaaaaaacgaaattattattaatttctaaaaataataaccaatcaaaatcaacatataagatttgatatctaaattttatttaatttaatttaattagaaaaacgaaatacattattaatttccaaaaagtaaccaattaaaatcaacaaattatatttgatatctaaattatcatattaatgttttattaattattatagttcacttatcatctttatatgattctatttttgcggaaaaataatattaagaaaactttctactgagtaacgggtcataatttgaaatatttctattcaatttcatacatattatattgaaaatttataatcttatatactacaataattaataacatattagatgtgattcaatttttaatacaagctggaaaatcttagaattgacgggttcagatcgatattaatacaagatggtatactacacatgaaactcttaaattaagaatcaaactacaagtgtataattctaaacactaaacaatatagataatatcaacaaaacatatacaactcacagtttactatacatttaaaatcaaataaaataatatcatatatttttaaatcatctttacaataaaagtttttagtttaactaaaatataagcgtacttgcggtatactgcaggttaatatctagattatagggcttattggatctaaagacggatcatcaaagatttcctaaactgaagcaaaatatactgaatattcaaatatctatctgttaccaaattataaacaaataagtcaatttaatattttatatacgaaatcaattaaatcttaatcacataaaaattagcacaaaaaaaaagtattcaacaattacaaaattatcaaatctttgtattatataagttttgatactatattcgaataaaatgtaatatactttttcaatttgaattctttaactaatttaagctaactaatatatttgctaatcttatacctataaaaaccgactatagtttcttatctctatagtatttttgcaagacttttttggtggatttggataaaagtgcattcgggtcatatggtacattcccctattaaataaatatggtgcactcctatgttattagctaaaaattttagattataattcagagtcatatcataaataaaattaatattaataaaataaatgactttttagcaagacggatttggagggacgggttttttgaatcaacattaataaaaaagtaaaatataataaataactttaaattattatttttaagaccattaatattaaacatatcaaatcatcctaatttagaaaaggttatataaaaccaaaaagttatgtaatatgtataatgttactatatataaaattaaactataaaatataaatgtattagagaatgatacaatttgcaaaaaattttatatataataaataattcttacattttaaaaattaatactttaaaaaaaaatcacgggacgggtaaagaaattacagaacgggttttattttggaattgagttatatggtggttgtatttgaatcaatatttataaaattttaaaatattattaatatgttgttttaataagggttaaaacttcagatttttaacaattatctcatggattcgtggtataccgttacttaataacaattataaattgtaaaatataaatattttataaaaataaaatttgcaagttttaataaatattacttaaaaaaaataaatagtcccgcggtataccgcgggttaaaatctagttataaagtatatagcaaaacttatctctagaataatccgtgagtgtgatgtgtgatcggaaaacgtaaacgttagaaaaagggagacaatgtttatctagacaagtgatcggagatcagagataacgtccgctaatgattttttattcagtcctcttctacaaacctcgaagacggtggttttctatcgatgggaagagtgaagctgtaagtccgagacatcgtcaaagaaagaatacggcattgatttaggaactcatggcttagtcttagaactttgtttactagatctggtagggtttggtcagattttcttttagttcaagcggctagctaacgtgttgtgaacaattaggttttagggagttgttttctctgttactaatctattcactaggttgatgacgtgagtctaaaatatatgaagattataagaaaagaaaaactgattgagaagataacattcaaaacccttgttctaaaaatcgtccgcctaggcgctcatcggagcacatgcgcggtgatttgaccaatttgctcaacaaatcagattttttttaaaaactcacttttaaagttctaaatctatattttagttatagatctatcacatttgacttaaaatcattaaaaatataagagaaactgttaataatcttgagtaagagagaaaacggcgaaaattaggtttactatcgcccaaaaattagagaaaaagacgaaggtaattaggtaatttcgtatttcattaaatcaaaaatcaaaaagaaggcaaaacacagcgttttgaggttcaaaccgtgttgggccgagtttaatagatgcaaataaccattagaccaaatcatttctttggaatatggttgaatattcagtatatatacatatatgaatatagaatattaaaaactattcccgattaatttccgtttaatttccgatttttttgccagacactaggcccaccccaaaggcatatttgaatcgatcgatccgtatgacatgatcttgtgtgatacggttgtgtataagagttagatatgcattcatatttcaaaaacgtagagccgtacggatttttctagaaggttcaaagtagtctaactcgaaaaagtaggtatacggaaattatgaagagatacacatgatagttgttgatacgcttatatagacatttaccatccatgagtcaaatatcagttttattcaaagacaccaaaagacgaatttcagtggctgatttacgaacctaattccatcaaaccaaacacaaaaatacaacaaataaatccaattaatgtattgaaggatcaagaacttgacccatgaacaaaatcactccactcttctcttctctcactgtgaatagaaatggatgatcagctacgaaatctcccatcaacaacatgtcctttgtcatgctggcaacagaaacggctgcagcttcagttccctcttcatccacctcaatgcaagctttgtgaaaaacatttgagacgaacaaattctcagcgacgcatagattctcgggaatggaaggcgactcaaccatctcggttagactaccatgtgtaaatggtaaagtcagccccatttccttcaaaacatctgaagctttaaactcgaaagagaacttaaactttggaatcttgaaagcttccgttaatatacgttggcgcggaatatggttatcaagaaatcggggtttggagcttatttcctcaagaagagtaggtaatccatctctatcattaggaagataaatgtacatggcgaattgacgttgatcttctacataaggaagacgcaaaactttgaaaccatcataatattctaggtattgcttcttgtaattggtcatgaaggggactttcaccatggtgccgtcaagaagatgaaaatcgtaactttttgttaactttgcatcaaattttttgctccaagctcctttgaagtacactgcattagcaagtattagcatactttcacggatagtcttgatagaatcgtctgaaagaatctctttgatgagtccattggtgtggacttcagcccatgcattcacttcattaatcacttcagcaggcttcaacataagtgaacaacaaattaccaatcacaatgaggaaattggaacattactcttaggtatctcacatctaaattaagatggaacctaaaaaaaaaatatatgttatagacctaattcgatcatgattttttttttttttttgacaaggttatgcaattgctaattaaattaaagttggaaactcatgaaaccttgtcacctaataattgatttgaggcaaagaaaagttcaataagaattgcgaagaacatagaggagttaccttggttgcgaagtcaacttgattacaagtagcgttataggagttctccaaaagatctttaaaggaaggtttgaaggataaagatttgtcaatccatacaccataagccgtagataagtgcaagtcacttctctccattccatcatttaaggcaacagatacggttttcgctaagactgcgttgaggtaatccgatgagggtaacatgatgaatgataagatttgttctttggtgacgcagttggaaccagcggcaatcaggcagagcaaaacgttgattgacattggtgagaagacaaggttggagccgttggcaacggtagggatgacatgctttgctagtaataccatgacgtcggtttgattctccattgattttcccaactccatggtttgttctttcttttttcttttccaaacgagaaagacgtggggacgaatggtgatgaatatcatatatatcttgtttcaaaataaatttgaatagtcatcgaactcatcaccttggccacgattacaaagtaaatcttatttaaagtcgaaaacaaagatttgtggggttagaaagccaataagatggcaaaacaaatatttttctaaatgtttcttcatagtatttgccattttactaaatcgaaaacacaaaaactatttaaaaataaatcagtagctaatatatgcggtatgttctttgatttgaccccatgatttgatttggttgagatcttggaccaaactcctaccaatgaagaagaagaggaggaagaagaagaggaagaggaagagtattgattacctcatgcatttcagtgcatcttatatcgtgtatgcttttctctacttaacaacattagtattatcatatcttatggtttgtgtgactaatcagacataacatttagtataagcaattcatatccatctcaaattgattcatcatgatcatgtcaaattatctgttgacattcataagttggggaattttggagatcaatagtaaaaactagatcatagacacacggcactgttggaatattgagagagaatgaagaaaaacagagcaagagacatttgtcttgtaaacaagactttcttttattaaaactgaagcttgttattttctcgactgtttttacataagacaacatacacacttatatagatgtatacataactaactacataaccaactacataaccgttggtaacagttttaacttctccgataagttatgtctcttactcacacccattcgtagtgtatgatatgtaacacataacatccattgcctttaaatataaactatagcatatatgatattttaatcatggactcaattctaacagaaacatctttgcaattgaactaaataagaaggtacgattttgacatcgctagcttcagattatggtgtttcatagactgctgttcttagttagataatcaaatttttgtaaccggcattattcagttcacagttaataaatatgcatccagaatcacttattgaaaaataagagtaaccacataaagatggaaatacagtattaaaattaagaataccagaactatgtggttatctaagatgcatgtaaacggaaacagatttgcagaagtgaaacattcaaaacgatgaaacgatttaaaaaaaaagaaatgggaaacatctagaaacgtagttcctaatttttgtgacatattttcgtcagggccggctcttgaggagagcaagaggagcaaatgttctatgtccaaatttttgtggataaatttaaaggtccaaatgtattatttaatacgaagaaatgatcattttaaagattttttagcatgaaaaaagttcaaaacattttttagtacgaaaaaaaagccaatgattaaaattttaaatatttttttagcatgaaaaattgtttaattttttttttagtatgcaaaaattcattttaaagaattataccagaactcttaatttattgaacaagccctgattttcgtgcttcaaaatggattctatatctgtattatgcatttttcctacctcgaaaactaaggatatctttactttcgtttcgaagctacgaaaagttaacttcgtggtgaggagaagcaagatcatataaactttatatgctgctaaatgaattttgttaaccaaaaagtttttttctgttaaaaaagtttgagaaatgcaaatagcattgttctttgttactttctcttaatcgtccaaactaggcttgggcattcggttaaccattcggtttcggttcagttgcgcatggtttcggttattttagttatagtaatataagaaccatttggatatttgaggaattttggttcggttcggttcggatatctttcggttcggtttgaatattaaacttggtaaccataaataaaccaaaaccaaaataaccgactaaaaaccgaaacaaccaaaaaaattgaccaataaccgatatagaacgtctgtaaaaaaaacctattcacaactcataaagatgcaaatatggtccatactctccataatattaaaatacatgattcacaaaactaataaagagaagaacatagttaagtgtcaatacatacaatatatgtgatatattatctatcatacatatatgctttggttatcctttggttatcggttactaacctaaccgaaaccgaaaccggaatctaagacatataatatccagccggtttattttaagctatccaaactcgaaccgaactatgtttttcggttcggttcggttcggttaatcggttagcggtttttttcccaggcctagcccaaaccattgcgagtgccggtgaataaagataccgtgaaggtcagctcttcacgtgaaccgcacgtgccggtttcacgctacggttcacattttttactacgcgaaaatcctctttctccatattttcaaatttaaaaaaaccaacctggcaagatcaagtgtttcgcacctttctctatttccatacgtttcctacgtgtcacaatctcattagtcgtacacttttcgtagccgcaaatctagcgatcgtaataatattcattaattctctcttcttctctttcactcctaaaaccaacttctccagatctctcttcttctacttactcatcatcacaacttctcagagaaagatctcagaaaaaaacttgaaaatgaagctcgaattcattattgttgctatgatgctaagtctcgtactcgtctccggtgagattttaactaaatcctcaccggctccgtcaccggatctagcagattcgcctttaatccacgcatcaccaccatcgaaactcggatctcataattctccagcggaatctccaattgaatactcttctcctccagagcctgaaacagaacactctccatctccttctccggcgaattctccatcggtttctccaccattaccgaatgattctcaatctccttcttcgtctgcttctccgtctccgtcaccggaagctagcgatgtgaatcacagtgatattactgggatcgaaggggagaagttgccgtcgggaagcggtggaggaatgagcggcgggaagaaagttggagttgcttttggagcgattgcggcggtttgtgtggttggagtcgccggatttgtgtacaagaaacggcaagagaatattcgcaggtctcgttacggttacgccgccagagagattctgtaattagagagagagagagagatccagcgaggatagattgatttaattttgaattttttgttactctaaaattcgaaaacatttattgataattattatttcttttgtatcgtgtaatcaatatttggaatttttcttcagatgtttaataatcatgctaatataattaagttaatgatatttgaaattattttaaagtaaattattattcagttcaaaaatctttgtaatctatattttatatgaattaaatattgagttcaaaaatattgtttgtaatctttgtaaattattattgagttcaaaaatattgtttgatatgaattaaatgtacattttatctaattcttgttaataaatttaatatttttattttttaatgtatgttttgaatgatttttatttataataatatatttataatattttatgctataaacgcctaaaccgcctaaattcgtctagagcccgattaggcgttctaagtgttaggcattgggtcaccgtccgattagcgcctaacgttttcttgaacactgcgatttccaaataacaaacctaaaacatatgaccgttagccaatttcagcatataccttttatatttttaatgtcgattggaattcttgagtcaatattatcagttatttgtatctgaatcattcatttttattaaattggttaacgattacataattcaaatttgtaacattatttataatggatatatgttgaaattggctaccggttacatattaaggtttgttatttgaaaactatgtgaattcaagttgataaatacagggaatcagagtttggattgaaaaaagtagcataaaaatagttggagttgattttggccgttttaccccactcttttacgaattatctttgaaattaacagtacaatcacaacaagtgaagaaaacaaagagaaaaaagactatcaagagtcttctcaatacatgaccgacagaccgagacacacaatcaagagaggctcaaaacaacggtattgcgtcaaataccaaaaaacttataacaaacttcaaacgcaaacgcttctaatcgccaacatgcaacgagatgattgctatgttcaatcaagtatatacccgtactagctttcagctatggttttgatcttcttcttcttcagctttgcgtttgcaccaacaacagtattccgaaatagccccgtcttctcctgtgatccatggatgctccgccacagctttcaacgtcatcctctggtttggatctgccacgagtgtatagcatgagccacattatacacaaaagacgatatcttttacaaaacaactgataagaactcacctttgcaaaggagaccttcgatcaagtcccttagacgaggattgagtccttccggtattatcaacgggttgtgaacaatctgcgatgttggtaaaagataaaacacgaactaattgcgttattcaaattgtttctagagagatgtctttcaataaaaagatcagtggagcgagagagaagcggaaccttgtcataagtatcttgaagtgtatcacccagaaatgggtattgtcctaaaatcatacaatacaaagtaactcctactgcccacgtatctgcagatcttccactgtatgttatacctaaacaacattctggggcagtaaagacaggagtgccgggtgatctacggagttgatcatcatcatccttcatcaaatgtatcatgttttagcagatcaaattacacattacagagattaacggagaagaaaaagaagaaaagaaatggtatcatcagtactttgaatacttggctgacactgaaatctcctattttcactctcccggtactagtaaccagtaaattgtcaggtttgatgtcaccatgaattacattctgtttcatccaaaagacaaagagaaaatcatgagtatctatcatataaactttcagtgtggatgatgaagtattatataatgcagagcatacatgagcatgaaggtacatgaggccggcaactacatcgcgcaagtactttctagcagtaatttctccgagagcacccggtggtccagaatcatcataggcccattttccatcaacatattcgagaactatacaagaaacaacacaatataagatgacagacaaagagaaagacttgaggtaacgatatacaaagcagagggaaagaaatacccatgtaaaaatcatcaaactcagggtcatcaatcacctcaatgagattaacgatattaggatgctccagggttttcataatcataacctacaacgatgagatacaaaaaacatgtacataagttttctgaaatgaaacctaaagtctatctgcattgtactggaaaaagccaacttgggacgttagttaaatgttgttcagaaatgatacctcacgaagaacatcacccatagcagtttctgaaggtgcaacccgtagcctcgataaatgtgacttgtgaaaagcctggaaatccaaaaatataatcaccacaggtccagaaattttaatcccattatgtgatcaacttaagaaacatttatataatctgtactatggtgatccaatttccaatgagcagattcatagaagaccaggaaaacaaaataagcttttgagtggtgccatggaaataaaaaataagagcataccttaatagcataatgcttgtcatcgacagtgcttcgatagagaacctgttatacatacaaaacaacaacccttatttaagatgttctcaagagcgaccggaagaccatgtaacattgaaatttgatttcacacttaccactttcccataactaccagatccaattttacgctcacgaacaaactcatttattgtcttgtttccatcttcatcctagaaatcaaataagaaacaagctagtataagaacaccattcggcaaagcacattcgacatgagcacaagaagtcgcatacctctccgcgtgtaagtttattagtttccttgactggaaactgcctgcagactagtccattttgtagtttacatttcaaaatttcttcagatcgtttggaacgacttagctcctctacttcctcttcctcttctccttcttcatcatctcctcccggattgctggtttcaccactatcatgggaatatgtatcatcatcatatggatttggtgaatgtcttgatctctcagagccaccaaaacacccgaagcaactcatcacttgggcaaatgcaaaactatcacaaaacattatctactccaaaatttatgaatttctcaagtagaccacaagctaacaataacgaaacctacaagaaacattgaaccaataatcaaaatccaaactcaagagtaccaaatctacttccctaaagatcaaaacgaaaccaaatcattactctgcaaaaagaggggcttcaaagcccggtaagcttcgttattccaaaggatgccattcagcaagatgaataaaacaacttgagatatcaaaaccactacaactgaatcgcaacatgtcgaaactccactttatactataagataagatagctttaacatccaacaataaagtcaaagataaactccaagctt

SEQ ID NO: 1059 - DNA, 91274 bp, Arabidopsis thaliana
gaattctccatcggtttctccaccattaccgaatgattctcaatctccttcttcgtctgcttctccgtctccgtcaccggaagctagcgatgtgaatcacagtgatattactgggatcgaaggggagaagttgccgtcgggaagcggtggaggaatgagcggcgggaagaaagttggagttgcttttggagcgattgcggcggtttgtgtggttggagtcgccggatttgtgtacaagaaacggcaagagaatattcgcaggtctcgttacggttacgccgccagagagattctgtaattagagagagagagagagatccagcgaggatagattgatttaattttgaattttttgttactctaaaattcgaaaacatttattgataattattatttcttttgtatcgtgtaatcaatatttggaatttttcttcagatgtttaataatcatgctaatataattaagttaatgatatttgaaattattttaaagtaaattattattcagttcaaaaatctttgtaatctatattttatatgaattaaatattgagttcaaaaatattgtttgtaatctttgtaaattattattgagttcaaaaatattgtttgatatgaattaaatgtacattttatctaattcttgttaataaatttaatatttttattttttaatgtatgttttgaatgatttttatttataataatatatttataatattttatgctataaacgcctaaaccgcctaaattcgtctagagcccgattaggcgttctaagtgttaggcattgggtcaccgtccgattagcgcctaacgttttcttgaacactgcgatttccaaataacaaacctaaaacatatgaccgttagccaatttcagcatataccttttatatttttaatgtcgattggaattcttgagtcaatattatcagttatttgtatctgaatcattcatttttattaaattggttaacgattacataattcaaatttgtaacattatttataatggatatatgttgaaattggctaccggttacatattaaggtttgttatttgaaaactatgtgaattcaagttgataaatacagggaatcagagtttggattgaaaaaagtagcataaaaatagttggagttgattttggccgttttaccccactcttttacgaattatctttgaaattaacagtacaatcacaacaagtgaagaaaacaaagagaaaaaagactatcaagagtcttctcaatacatgaccgacagaccgagacacacaatcaagagaggctcaaaacaacggtattgcgtcaaataccaaaaaacttataacaaacttcaaacgcaaacgcttctaatcgccaacatgcaacgagatgattgctatgttcaatcaagtatatacccgtactagctttcagctatggttttgatcttcttcttcttcagctttgcgtttgcaccaacaacagtattccgaaatagccccgtcttctcctgtgatccatggatgctccgccacagctttcaacgtcatcctctggtttggatctgccacgagtgtatagcatgagccacattatacacaaaagacgatatcttttacaaaacaactgataagaactcacctttgcaaaggagaccttcgatcaagtcccttagacgaggattgagtccttccggtattatcaacgggttgtgaacaatctgcgatgttggtaaaagataaaacacgaactaattgcgttattcaaattgtttctagagagatgtctttcaataaaaagatcagtggagcgagagagaagcggaaccttgtcataagtatcttgaagtgtatcacccagaaatgggtattgtcctaaaatcatacaatacaaagtaactcctactgcccacgtatctgcagatcttccactgtatgttatacctaaacaacattctggggcagtaaagacaggagtgccgggtgatctacggagttgatcatcatcatccttcatcaaatgtatcatgttttagcagatcaaattacacattacagagattaacggagaagaaaaagaagaaaagaaatggtatcatcagtactttgaatacttggctgacactgaaatctcctattttcactctcccggtactagtaaccagtaaattgtcaggtttgatgtcaccatgaattacattctgtttcatccaaaagacaaagagaaaatcatgagtatctatcatataaactttcagtgtggatgatgaagtattatataatgcagagcatacatgagcatgaaggtacatgaggccggcaactacatcgcgcaagtactttctagcagtaatttctccgagagcacccggtggtccagaatcatcataggcccattttccatcaacatattcgagaactatacaagaaacaacacaatataagatgacagacaaagagaaagacttgaggtaacgatatacaaagcagagggaaagaaatacccatgtaaaaatcatcaaactcagggtcatcaatcacctcaatgagattaacgatattaggatgctccagggttttcataatcataacctacaacgatgagatacaaaaaacatgtacataagttttctgaaatgaaacctaaagtctatctgcattgtactggaaaaagccaacttgggacgttagttaaatgttgttcagaaatgatacctcacgaagaacatcacccatagcagtttctgaaggtgcaacccgtagcctcgataaatgtgacttgtgaaaagcctggaaatccaaaaatataatcaccacaggtccagaaattttaatcccattatgtgatcaacttaagaaacatttatataatctgtactatggtgatccaatttccaatgagcagattcatagaagaccaggaaaacaaaataagcttttgagtggtgccatggaaataaaaaataagagcataccttaatagcataatgcttgtcatcgacagtgcttcgatagagaacctgttatacatacaaaacaacaacccttatttaagatgttctcaagagcgaccggaagaccatgtaacattgaaatttgatttcacacttaccactttcccataactaccagatccaattttacgctcacgaacaaactcatttattgtcttgtttccatcttcatcctagaaatcaaataagaaacaagctagtataagaacaccattcggcaaagcacattcgacatgagcacaagaagtcgcatacctctccgcgtgtaagtttattagtttccttgactggaaactgcctgcagactagtccattttgtagtttacatttcaaaatttcttcagatcgtttggaacgacttagctcctctacttcctcttcctcttctccttcttcatcatctcctcccggattgctggtttcaccactatcatgggaatatgtatcatcatcatatggatttggtgaatgtcttgatctctcagagccaccaaaacacccgaagcaactcatcacttgggcaaatgcaaaactatcacaaaacattatctactccaaaatttatgaatttctcaagtagaccacaagctaacaataacgaaacctacaagaaacattgaaccaataatcaaaatccaaactcaagagtaccaaatctacttccctaaagatcaaaacgaaaccaaatcattactctgcaaaaagaggggcttcaaagcccggtaagcttcgttattccaaaggatgccattcagcaagatgaataaaacaacttgagatatcaaaaccactacaactgaatcgcaacatgtcgaaactccactttatactataagataagatagctttaacatccaacaataaagtcaaagataaactccaagcttctgcaaaacagggtaatgtaacaaaagtcagcaaacaagaattgatacacattaaagatcaaatctttcgaagaaagggataaactttacataatccatatgatcaatccacatagaaatcaacatttgtatccaaaaccctcacaaaaatcgtaaatttgaactgatgaagaacatcaaaagacgaagactttaagaaacccaataacggcaatttcgagtaaaccccaataaatcacaaacccaattgactctagacgtaaaaaaaaaccctaatttcaatatccatggcacatgagaagaaatgagtaccacgattcaccaactggaagaaatctaacaaaaactcatatgaataagaatgaaaatctcacatataaaattgaatttgattcgaaatgaagcaaaaggaaatgaagaaaagagaaaaaaaaggattcgccggacgctagggctcagagacgtcgtgcgtgagaactgagaaatgtggaatttgtagtttcttttctattggggaaggcaacttatttttgttgttttctaatgaccaaaaaaataaaagacagttaaaaaagaagtatcaattatcaaacaacaaacatcaccagctaatgtgagttcgtttcctaaatattttctgtcatttctagaatttaattcaaatggaataaattattattttacttgtttatctttaatgagctaaattaatttgatctctgcaattttattatcaatgtcatttctgaataactatttcaaaagggtaaggttattttcataaacatatttccaaaacaatagtataagatgatatttattccaaactaaaagtatcgatttagaaccgaatcaaaaccgaataaaaattctagaatactctagtgtatctttaacttgagaactgaaaaaacttaaaaccaagtcgctgttaaatttaaatattttagatacttaaaaatatccaaaatacaattacatactaaacattataagttactattttaaagtgaataaataaaaatatccaagattaccaaaaaaatacctaaataattatccaataatatccaaaatatttgaatggatcatatgtttccaaaaggtaaaactttccccttcctttctaggtatgtgggtgttagcgtgccagatataactcaatcgatgtggttcatcatcttctttcaatacttctggatgaccctttgtacctgtattcaggaacataaacttcataaacaaagaaaccgagttcgaactgaattttgttttgtacccatatgaatcctaaactttacaactaaatgaaatcataataaaataaaaccgaaccgaaaccgatataaatatgtgaacatctaaatctatctatcgttggtaaattgtaaactgattttttataactaactcatgtttatattgtcttctatgtagtctttttttagattataaacacacatatcttaatataattataaacaaatttaaagatctcgtgtagttttttaaacaaattaatcaaagctaccaaaatatatataaacaatccaaaaattagtagcattactaatctcgagtacctagaataagaaaactattttttttgaaaacctatttaaaatatagattttttttaagaaataccccttttacggtatttgttttttaaatgcaatctagtaaagctattttcaaaaatactctttgccaaaaatgtttcttaattaatgtatagggggcgtgtacggctgctgaactccaaatcaacttttgaaaacctttaaaatatttttaagctcataaaccgtgtaaaacaatacgaaatgagttttatataatctttataaaaccttgtaaaaaggggtataattaaaaattgacagtatttaagggcatttttgaaaaagaggtattgtaagtggacatttttgaattttctccaatatatacgacaacaattagggtgaaacaaaatataaaataaaaaagaattactatacagaaggtatatttattatagtaactttagaagatctaaaatacaatttttgaataggaaaatacgataatatggtattacactctctgatatatagaattttaaaatgatatattctgaaaatatctcatagttttgatatcattgatggagtaaaataaaattgaaaaaataaaattttaatatgaattatatttcccaattatgtatttttttttaatttgtatgaatccttacattaattaagtgaagtagtactaagctaatttataattaagtttgaataattaatttctgtacatattatcattttagttgttttagttaatgaaaataattggttcaaactaatataaattttgagtaagttaaatttaatcgtttagattttgtttgcaagataagatatatgaatattggacaaatattatgtggctgtaccaaaatgtaatgaataaacagtatagatttcatagcaaaataatcaaccatccaagaaatataaataccaaaagaaatgttatatttttttgagataagcacaaagctatacaaacactaaacaacaagtggaaaaatgcaaagaatgtgggtgacgatcatgttagctttgatagtactatcaatatctatacaaacaaagggaaatgagaaagtaaatgatcttgctcgtgctccctcgttgacactagcacctcaatcagagaatggagtattgcctaagcctctaccttgtttaaacgactttaaactaatttcaaattgtacaaaagcagtgaagcatttccaaatcaaaagggtcacaaaaaactgttgtatcatcctactcaatcttccagaagattgttttggtcgtttattcgccatgaagtggatctatcgtactgtccttacgattgcttgcaaagcactaggttacattaaataaattttctgcattttttgcttcaaacgatcgatgtcgataatttgtactaattattcggatataatatttacaatacttcatcatctatgaaatttattttttttgttattaatttctccaaatctgtttttgatccaattatcaattatggctatacaatattagttttaaagcttgacatgcatctagatgaatccagacttccttaaaaaaaaatatgtatttggagaaccttttgggatgcaatatgaatttttttttaatgagaaatggttgaatatgactattactgagaggtagaaatgatgtatacatagaacaaatgttgtcaaaataaacatattggttacataagataactcggttagagttggaggttaattcagagttggtggtaagtttattcacaacagagattagttattttcatctgttgtcgttcctaatacatttgtgctatgactttttatcgatggactggatagtcgatatttttcatatgtataaagagattaaccgtctagccggcggattaactaactatgtattttctttattgcttagtttttattcttttattgtatgtccggatatcatgcacccgattatgttggaggatataagcgtaccttcgtaatcttcgtttgtaagtttcccttttaactaaataaagcataggagagatcgattaccaaaaaataaataaacatattattatgccttcaaaggcagatatatttataagaaaaaatatgaacgattgggttggtctctcatttgtctatttatccgcctcaaatgattcgcaggtttctcgtcagtgtaacgaataattttttttttttttttttttttttttttttttttttgtaacgaatagtttcgatctgttattctagtttcacaagcatgtcgggtggtactgtggtagagatatcagttccttaatgcaatcatggaaacaaaaataatctatcaatcgttattaagtaaaagatagactaaagaaattgcctatcattgtatcattatgaaatgttgatcttgatacaatgtcacaatgatgaaaagatgttgatcttcatagaaatgagactttttatctagttcacgagtaagaatgtgaagtgactattttcttatatttaaacaatttgcaaagaacaaaaaaaaaaactgtagattggacgatttatttaggtcccaagttattggtttaattattgatttgaaaaagctaataaaataagtgcaaaaacttatgaacgtttatatatcaaaatatacaatttgatgtttgtcatatatctttttccaaattagtatagtttacatgaaataaaagtatatttttgtcacaaaaatataatgatatttcttacttatgaatttgtgagtaaacgttttgaatagtataatatttttaacccttttaaagaatttttaagagatattaggtaggaatctcatagagttatttaagaatattcgaaaaagttctatttttttcgaattaatttttcttattttattatttaaaatatgttacttttcgtctgaaatttttagatgaataatttgttttgaaaactgtattataaaaaattctaatatttcatttggcatccaaaatataattttatgcacttaactggaatacctaaataattggtgtatttttaaggaatttctcaaaaagaaaacatgaaatgtggttttacaaaattgtgcgtaatcttactttttcacattacattctctgaaatctgaaattttataaatggcaagttaagaaagtatactaaatgtttaattataagatgaaaatattttcttaatgaattaattagtatatgtagtaaatgaaaggttatttaggtaatgtatatttaggcttgactaataatatttgtgtgttgttaagtttagtcattgtacttaatgaaaaagaattgacttcccctatatttaaacttccaataagcatatttgtataattttcaaatttcttgcatctttctcaaaaagataagaagatatacaagaatcagggacaatattacatgcatgcactaaaatgtaatgaataaaaaatatgagattttctacccaaagaaaaaacagccatatatgaactataaatacagtatattatttttttctttgagataaacacaaagttatacaaacactaaaaaacaagcagaatcatggaaagaatgtgggcgacgttcatgctagctttgataattttactaacaacatccatacaagcaaagggtaatgagaaaggaaatgatattgccggtgctccatcgcctacattagcacctcaatcagagaatggattattacctaatcctgcatcttgtttggccgacgtaaaaacaattccgaattgtgtaaaagcagtgaagcgcttcaaactcagaaatgtcacaaagaaatgttgtgtcatcctactttatcttccggaagattgtttcggatatttgtttcctgttcgttggatctatcgtattctgcttaagattgcctgcaaaatactaggtcacatttgataagatttttgtattctttgctttaattaatgtcaacaatatgtaattgtaagtttgtataaattttatataatccatggacttttttgtaagatgatttatgaaatagttaataagaagatgttctgtgaattatagtttttaatctttatgatgataatgtgtataattcatgtaaatttttgataagttgtggttgataggtgaatgatttattaagagccccatatctttacaggtcggcataatcaaaatttatatttcttggcagagatttgaaggtagatataattctacttatgtttctttcatgggaaaatcaagtttgaaaagtttgtttttataacatttctaataattaacagttcctacttaaaacattccctttagtaagttcacaaccattgaatattgaatgtccattagtcaaaacttgctactttatgttttgtttctttttgataatgtggatacgagatccatatttgcttctttttctgatttttttttttttgggtttgtaattgtaagtgaattcagtgggtgaattggttagacataagttttagattatttgctatagaatattatgtgtaagtgtttaagttgtagctgtaactttttggttttgtagatttaaagaatatatgatttttacaataaatttattagttgtaactaaaaattatgattaataaatatttgaattttgtatttataaatgacatttttaaaattataaaattatatatcataataactaaaattatttaataaaacttatataataaaaacacaaatggaattatgaaaatctaggtaaatggaatttatataaattatttgtctaaatgtaatttatatgttattcaattttagattattagttgaaaataatcgtgacaaaaaaaattagaggagagaggaaaaatgaaaaacaacatatagcacaaaataataggacgtagaaaattaaagatttacagtcaaaataaaaagatttttttttttttagtgtaccttaaaaaaaaacctactacataactggcaacaatttggtctttataaaaatattatagctgtaaagagacttagaccccaaccaatcaatcactcagagtttagatatgaacaatccaaacagataaaaacaaaattgaaataacgctttattccatttgaaagaaaaaatgtgttgagtgtcgcttatagtatgcctttagcaaagaaaaaatggatatttatgctctcaagatcttctatttatatatatacactcctaaatctcaacacttcttgcattaaacgtcaaactagtctccttgcattcaatgtgattatttcgtgttgatacgatattttattccattagtttcagctgttttgggccaccgttggaacgaaagtgaagagttcggctctcctagttttgctttgcacagaaagacttgttgctctcaaagtgagcatgaattacttgaaatgaaatgatttattttcttctccaagtgaaatgaatgttattaagtcgtgggctcattaccattagtgatggggttttgccttcgagtcggatcgccgagtcgagttccgacaccaacatatgtatgaatattattatttatgaaagattttacctttcgagtcgagatccaacaccaacatatgtgaatatgaagatatatttctaactacaggaactatcagctatcctacgtcaccccacaaactataaaaactatagaattagctatgcaaactataataaggtattgcatattaatatgcatatacttggtatataacatgtataccaaaaaaatgtaaaactatatcattttcaagtctttatgaagtctaactacataagcaaatacaattaatgcacatattccaccataacgtctatttttgaagaaaaacttaaataaataagatttcaccaatctgttgattaccattagtggtccatcaaagtgtaattcgtggtaaatgacatgatacttaaaaaatagcaaaaatataaatataattttagtttaacaaatcaaaactcaatatggtttcgtaagaaccaaaactaacaaaatatttttttatgtcccttaattgttttgatcatttttgttttcgtagttactcttgatcaacatcatctccatatttcgtgtaatctccttcaactttggtatgcttttcaatggattcattggagaggacgaagcatctctatcaatgactgagattttgggtatgtatcttcttggtttaaactttatcctcttatgactagcttttaaaaaatacaaaatactagcagttagcgagatatgtacaatattatcatgttcaccttcaatagtgtttacaaagcttttcatgttatcatgtaaaatttggaaaatcagacactcgataacgtttaagtactggaagacttgtatataggtaaataattcttttatttcgtaaagaagatttgttttggaaattaaccttttcaatataggaagacttttattagtaaaatacatgtgttttttgaaagagaactcaaagctttttcggttacaaaacatatgtaatcgacatattaattttgtctttacttttgttcaaataaaggtaatggcatttttcataacatagatttttttcagtcaaagcatatatttccactagaataatagaggaggattttaatgtattcagattttatgagaagttacatggtccattatagacttatagtttattactcccttcatatcaagataatacattgttctaatttatatactttcatatctcataatgaatcgttatattaaataaaaagggcattaataagttaatgtctcttgaataataaatttgtatattttaattgtagttgatcttttttgttttttgtctaaaattgtagttgatatataagaaatcagttcctctatacaaaaacaagtttgggtaagcaaaatatatattaatatggggaaaactattttaagcatatatatactaaatgttatgaataaacatagattgcctttttaaaaaaggaaaagagaaaggagaaataatacagaatgcatatccaaaaagaacaatcatagaagattattaatattaagggaaaacttttattttagatgagaaataaattagacaaacatcaaacaactagcaaaaatatgcaaaaaatgttgaatacgatcatgatacctttgattatcatgctttcaatatttatacaaacaaaaggaaatgatcttgcaccaattccatcgtcggtatcaccagaacctcaatcagagaaccaattctttcttgacccactaacttgtattcacgatgtgaaaaaggttccaaagtgtatggacgcagtgttgcacttccgattcaaacaggtcacaaagaagtgttgttatgtcatattctctcttcccgaaagttgctttgggtttttgtttcctattccttatctctaccatcctcttcttaaggctgcttgcaaattacttactcaccatggataagatttttgtaattctttaataatgtcaataatctgcagtgataacatctatagaaaatattataacttatgtatagccataatttaacctgtatttttgaaatatttttatacaccaattttgatatcatgctcatttataatctgaacaaaatatgttttcgattaaactacaactccgattagtaatcatatattagcagaataaagtcttttaatgcgatttgtaaaaagtttacctttgcataatcacgttaaaaagagaagtgatacctcatttcaataatggttttgtttttataattttacctatacaaaatattagcaattagaaaaataagaaataattgtttccaatgaaacttacaccattttttgaatgatattaaaaattccacaacgttttaaaataattgatatttatatatttttattatcaaatatcacttaaaatttattaaaatattattttatttattaaataatattatattctgccaaaactattacacaaaatgtctccaatcaacatacgtttataagtaacgttattctgcaatgtttcatcttacaagttttcattttgcaggttttcgttctgcaacttaattatgtagttatgtgattatgtattgttaccaatagaaaccatagcatttgtcaaccatgatgaggcatatatgacatgtctaattttcttttctacccttataaaactgggaatactgctgagaaaaatgattccaaaatttatgttgacacatatacagagagtacacgtcgccttgctcgtaagagttccctctttcagctcgtctatcaaaccccttttaatcatcaatactttgtttgaacatgcattttgttcgaacttcttgtttgtcactttcccatttttgaacatcttaccgaatcacttgaaatatttgtcttttattcaccaaactcaaaacactgatataaattctattgtgtaatttgaatatcaacaccaacagcgtgttcgtttttaacccatacctgataagatgcactgcattaggtctttccgaaaggaggaggattcgaccacgattcagaaatatcaatttcattacaaaacggggacaagtacttgacattgaagttattggaagtgcgtaaatggtcatgtaaacgcacaggataagcgttaggatttctgcactcaaaaccctagacctcaccaattttaatggacttaattaggtttggtatactcgtgaagtggcagtcggtccttagtgagcttaaccatacaaaattaccatgctcaaaaacaacctctcgatgttttaaattggttgcgcgtttccaaatatgattgtgcttaagggtggaagatttgaaggtcatcaagaaagttcatagatgtaccatgatgtcaagtcttatctacaagtgtggaaaattccaaaatgaaatgaggtacatggccatatacgacatggaattggttgaatccgaggctgtgatcgtgagcatggttatgtgctaaatcggcttgacaaagtttagaatcccaactttaatatgatctccagctagataacgtaacatatgaacaagcgctttgttagtgactttgatctagccatccacttgagaatgatacacgaaactgatattgagactcatcctaagaagcttccaaagagatctctaaaactggctaaagaatcgcgtatcgcgatattacacgatgaaggatgaaatgcaatatgtaaatttctcaaaagggtaacagatcaacacttatcgtgtttgtcggtttcctacagaaaatgaaatgtgctattttcgaaaaatgatccaggtcgacaaagacagaatcattacgattttgtttatgaggaagcgccaacaaaactccatacttaagtacgtccaaagttgtgtgagaatttgtaaatctgccaatgctagaccaagtttttagggggcttttgtacatatgggcaaatttggatccaaaaatttgaagaaaagcacattccacttgggcttataagcctgggtacttcttgattcgagaaatgacgattttaccctaaatgtgttgatgagaaatcaattcgtcttctccgtcctgagaacaacaatcctcacggtttccaccttctgcaatcctctccgtcgtgataatcaaatttgtttattaacacggactccacactcaatcaaaatcattacttttgactccatcaatatcatttcgttttcctccgatgattcacacaacgtttctatgaccctttttcgatgaatccaatgaaattaattaaataagttttgatgcaagatatctaaaccctaagggatgatgtttaggcaacccaatggctttaattatagacacagattcatcaattgtgaatcgattgtgaataactgaaaacttattcaaaacaatcatgtacgcaataactaaaagcaatataattgtgaatcatgagcaaatcctaagtcatcttcatcgcatctcaagacccaaaatcttgaagaaggaagaatgaagaaggaagaatgaagaaagcataaggagagcaaaaatcgacgtctctgcttggtttttttttttccaacaaattgaaggttaatatggtaaaaagagaagagatagaagtacttgattttgggaataatgtgaaatgttcctaaaataacaaaggcatacacttttaagtgctaatcccataattgatccaagtttttagcatgcaaagtttggaaaatctgtcacccaggaaatgtttttagcattggaaaacttgtagtagtatataactatttttttcttatgaaaaacttgttttgcaaagcaactttctaatctacaaagattgtatcagtaaagtattttttttataagactacttctgaagagtagatttcttttacttgaagcatattttatacaaattataggttgtttgtcactactgccgtgcaaataataaaaagtaatgatttttcttacgtatttttttcaaagcattaaaaagagaagttttataaattaagagatttataattaatgtatcaaaatttttaattgtagttattttaattaatgtaaaagaaatttataatgtaaccaaaataataagtgtagttatttataaattatgtgttttcatatctataaagaatccttatattaaaaaagagaaataagttaatgtcccttgaataataaaacttgagtattaaaaaatatagttattttaattaatgaaaaagtaattgattaagtccctcaatattaaaaactttgggtaagaaaagtttatttagtatgtctctttaactttaaagtgatgttttaaatattttgttttgtgtcatttaagttttattttcaagttcctatgtaaacattaaatgtttttgattttcttaactatttctattttaaaattttttttattggttgaattagttttagttaatgatatatttgtgtaaaatatgcaagctaaataaaatctatatcatttttaatatatgttaaaaaaccttaaacatcaattaaaattaaacagagaaagtatatattaatggcaagagaactattctaagcatgtagtacttaattgtagtggataaacatagattgccttatctaaaaagaatagagaaatcatatagaatgctacgtgataattgaagattattaatactattttttttttgttaagagattattaatactattaaccattgttttttttttttaagatgagaaacaaactatacaaacatcaaacagcgagcaaaaacatgcaaagaaagttggcaatgaacatgatagctttgattatcatgctatcaatatttacacaaacaacaggaaatgatcttgcacctgctccacacccgacaataccttgtcttgacaacgtgaaaacaattccaaattgtgtaaaagctgtgtttcacttcaagttcaaagagatcacagagacgtgttgcactattctacttactcttcccgatgattgttttgggcttttgtttcctattcctcgtgtgtaccattttcttcttagttctgcttgcaaaaatatataaacaccattgataaagttttgttgatattttctttaatcaatgtcaacaaaatttactaataatatttgtacaaaaatctatataatatatggactattttaaaagatgacttgtgaattagaaacatttctcttactatggctacacagcgcaagatttatgattttaaagtctcgaaaacatcacaaatcttcaacaacatcactttttgttaattcgttttttttgtctgtctaaaagaacaatgtgaatatggattcttattagtttttataatgacttgatcttaagttgttgtgggatctgtagaaaatcatgatcaaccatgtaggtaacaagaaagtgtgggatcttaagttttctttgttatgtagtcgcaaaataaaaaatgatataaataattaacattgatacaaaaaacaattcaatgagaaaattgaaaaaccagcgtagtgatcatgtgagctcaatagttgttggaatagagtattaatgattaaaatttgaaaagtgattatagaattattggattataagagcgatggatttcttgatagtagctctataactagaaattaatatttctattttgttgtctaaatatcacaaattggaaaaatagaaaagagcctcatattggaactgtgaaacatggaaaatatcataatattcgtgtctagttttaaaagtcttgataccaaattatgatgtaaagcaaagaaacatgtccgtactaaaatggactagactcaggttttgggtataggtacaatgggcagtggttcatactctctccatttcacaaagagtctcagtttggagttcgatttttctttttgacaaaaactgtcattttacattttttatgcaactttttgaattttaaattcataatttacatttaactcaaaactatgttttctttaaatttcagtcattttcaattaaataattagagatatttgtctacaatgcctaaaaaacttaaaaacttataagattaggtactttcacaatgacttacgaaatcaggtacttttacttatttgcagttacgttactaccctcgcctcatcatctttctacaaatctacattgaagcatcttaccattatcaattacaattgaatgaagatttcggaaatgacaaatccacactcttattgttgttaatgctgttccgatcggcatcaatagccatctcgaagggctttgaatcagacgtgaaagtgtaatcattgcctctgtcgtaagagaaactgaatctatcgtaagagaaattgattctgttgtaagagaaactgattctgaagggattggtgtgaggatttggtcggagatggtgcgatgatattataaatggggaagaagaataacggccgctagaattggaacgattatcaatttgggtttttcaaaaagaaaccccaattcaagatttgatatttgggttccatatatactccttagggtttagatttttttaattagcaacagtttaaattttctggaaactgaaaattaagaagtcatgaagaagaagaagatccacgaaagttgaaaacaaaaagaaatctcaatcaaagatttggtgtttggattccctatacactatcattccttagggttttagatttctttaattagcaacagtttaaattttatggaaattgaattaaaaagctatgaagaagaagaacagtaatccacgaaattgaatcaaaaagaaaaacaaaatccacgaacaagagaggagaagaacagtaagggcaaatcgtcattttcaagggcccaaaattcctttttccaaagcccaaatagaaagtacctaaaatcaaattttttgtccaaaaagttcctaaattgacaataaccccaaataattagtattaattagggacacatatttatttatttttaaaaatttgtgttagatgtgtcaaaatgacatttgtgtgaaacataagaacaactccaattgagagtgatctcaagaaaaagtgtgagttttcttgttaaaattgccaaaaaataatgctaaactaaaaataaatgagagcgacaactctccagagagtttattttgtttgagagagcctgccatgtgtcgctttttgattgatcgtgtgttcttgacaaaaaaaaaaagaaggagagattatgttcagttattctttttgaaattagttttaaatctgtatttaaggaaatgaaatatgcatggtgatacatataagggaattattactatttgttgccttacatataggaagtttgatagaagatttcgtttaaaaatattaataaagacaaataataattaaatctattattatcaattttctttttaaaataaatctgatgatgttttattttctaaaaacataatattttgacaaaaaataatatgttttttgtatattttcttttcataataagtttttagtacatttagaacatctaaggtatacaacaatatatatatatatatatatatatatatatatatataatacacccttccaacacatacatatttcttaattaaaaactcgcttcgatattttcaaacgctaccgtttccacatactcgtttctgcatacccgttttcaattccatacagtttaggtggtaatccggtgagtcatagccacgttattttaagttattgtgatatgttattccattattccggttttttcacatctattttaaaatatttcaaaataatgatgtctaatgttttatactttgtaataattattaagttgtatgaaataaaaaattttgtattaatatttaacttttgtaaaagagtctatcactggaatatgaaaaactgaaaaaaaaaagaagctatctttttttttttggtaggaaacgggaggtaagccctcccgtgatttattacagaaaaattaaagattacaaccgaacttgtcttggacactctgttccagactcatcctctctaaacaccgagactaaagagctcggtaaaacatcaaaaacatgaaaacctaacggtaaagaaaacgcatagttagccaacccatctacaagacgattagcttccctatacacatgagaaatacggacaatccagtcccttacgagaaagccatggcacatgcgtaccaggaaagacaacggatgggccgccccaatccctgtctttagaaaccccaccacaacttctgaatctacttcaagctctatacatgtaagcttccgctcccatgccatatacagcccgtagtaactccccacaaccccgctaacggtgctgaacaacgccctatgttcaacgcaaagccaccacaccaaataccattctcatccctcaagacaccacccgctgttgccggacccgggttccccctcgaagcgccatcagtatttagtttgaaccaacccacacttggttctttccaccttatcattctctccactctggcccctgcgatagctctccctccaaaagccacattcgccttagtaacctctgccgcaatgtccttaacaaatttgacacgatctcggcaaactctgttctccccaaacacgttacaacaacgccatttccaaccccaccataaagccatagcgaaggttgtggcccaagagatcccatcaatgacgatcccttcccgcagattagcataaatccattccagcaaagtctgagtaaagaacttgtgacgtctctgcggagggacaatccgttgccaaattcccgacatcgccggacaatcccgaagcacatgaatgatggtctctatcccacctttgcaaaccgtacaaatatctgaatcacagatgtgtcttcgtgctctctccgaattagtcataattatctgcttgctcaccatccacaagaaagtcctaacccgttccggagcgaccactttccacacccggcgatagaaactctccatgtcctgccgcgggcataagtcttgcgtcacaaacgaatacgcagaagagactgtgaacttgccatctggactctcaccccatgaaagtctatcacgtgcccctgtgaagttatcaactacgattgctgccagttccatccttttttcctctgaaacccacagagctattcttgtcagatcccagcctgcctcttcccgccacagatcccgtacaaagagttgctcaaaacccaacggtaatgcacccacaacgtcatcaatcaaagatttactcgacaaccacttatctgtccagaatcttatagatctcccatcaccaacttaattgtactcatagaatgaacggaaattgaatttagcaccgccttagtaagagtaagtcttcctgcgaagcttaaactcccacctttccaacctgccaacttcgacgatactctctcaagcacctctttgaacgtgtctttatttatccgtttctgaaggaccggcatcccaagatatttacctagatcccgtgtcgattttatcccactctctgtagatatcaaaccttctagatcccgagacacgttcctagaaaagaagattttcgatttctctaagctgactttttggcctgacgccaaacagaatctttccaacacccctcggataatcctgatttgagctactgacgcctctgctagcaaaataaggtcatcagcaaagcaaatgtgagagagcttcggtccgccttgagacaggctgatcggcttccattttttctccatcaccgcattgtcaatcaagtgacatagtctctccatgcacaaaacaaagagatacggtgataaaggatccccttgtcgaagtcctcttaacggcgtgaaagattcagtcttctcaccattccatagcaaactcatagaaggaccagacacacactgcataatccaattcacccaatctccggataaaccagccgccaataacgtatcctctaagaaatcccaacgaattctgtcataggctttctctaggtcaagtttaagaagcatccatcccttcctgcccttctttcgttgcattgaatggactgcctcttgaacaaccacaatgttatctgtgctcaaccttccgggaataaagcttgattgagctggccctactagttttgaaataactcctttcaacctccccaccattgtcttagtaatgattttgaaaagcacattacacaaacttataggccgaaactgagtgattttttctggtttcaagacctttgctatgagcaccacaatcacatcattagccttagcaggtagctgtcctgtttcaaaaaaatccagagcaaacttactcaccaactctcctacgacatcccagcaagtttgatagaaaattggctgataaccatcaggacctggggccttgaatttacccatactacgcagcacctgttctacctctcccacagagaactgcttgttcagattaacatgatcagtagtagatagcctcgcaaacccttcttttggcaatctgtcaacaaccggatccacatcatccagcgaatagagtcgtctatagtattcaagagctaacttctccagttccgccttatccacaacccatctatcctcttcgtcctttaacatatcaattcgatttctcctgcgttgaatgatagcaaaggtatgaaagaagctcgtgttcttgtcaccatgaaccacccacttctcacgtgacttttgataccacaacatctcctcttgctcaagcaccatgtctagctccttaattaactcagcttcttgcttcaacagatcatcagtttgcgcttgttccagcaaatcctggatgatggttatatgcttcagtagcttctccttcttcaaatggatatccccaaaaacctctttattccatctttaaagagtaattctcagtttattcaacgcttcttgagttctcagctctctatcccaagatgtcaaaagcaactctttgaaaccctcatgttgtaaccaagccgcttcgaaacgaaaaggtcttctagaaggatcacatcccgtcttcggcagcaactgaagatacaggggagcatgataagaagccaaacaagggagatgtgtcaccgtagcctcctgccatttcagcctaaagtgagcacaacatagaatccgatccaatcttttagcaatgtaaaactgttgggatttccctctcttccatgtgaatcgatttcctttaaatcccatatctatcagggacaactcgtttatccaatctccaaatgctacagaatccggggacaaacaaccattaccgcccgttctttcatcaagtcggactattgtgttgaaatctccacctatcaccactggtccatctattcccctgattacttcacgaagcttctcccacaaaccactccttcggctaaccgtaggagcagcgtacacaactatcaaattaagtatctcgaactcattctctatacgcgcatagacgaactgctctgaagactccttaatctcaactttcccaatttccgacctccatagtacccaaatgccacccctctggccaactgcgtcgattctgaaactattttcaaaccccaaaccatgacaaatccgatctgctctcgcccctcctgcgtgcgtctcaaacaccgccaacaaatctgtcttgtatttcttcaaaagataacaaactgatcttcgaaagttaggtttattcgccccccggcaattccacataatgcaattcatcattaataatcgataaagaaaaagaataaccggggcaacccgtcacagaagagtgagctccgtcgataacgctggcgcggccccctgagtccctcccgccacaaccactacattatcctccaaactcggcctaatctcctccgccacttccatgccgaccaaatcgggtttctcatgtccaggttctccgtcaactccattgaagaatgaccctcctggtcgacccagacttatctcttctatcctcacacgtttaccgttggccgaaagctcattactctcatgggctttatgactccaggcccgcctatcccgtagcccttctctaattactcctttcccttttccctccgttgtagcgacaaatttggtaaccttaacttgctccccactcctatcttggaccactgaattcatgggatattcattctccttattatccgtaacaccaataatttctttccttctcccctctgtttccacatcctctcccaacttaccaaatgagttcgacgtcacaaccaactcatttccttttttcctcacatgatcccttgatttgcgattcacattaactctagccccaccttgtgcattcacattccggttaacctgagccaccgtcttcctttgtcttaccggggtgaatccatccccatcatgtgtaggaacaaccggattctgaacatttttggtcacttccacactcatgctctcctcccctattccatgcgagacccccctaggacacttatgaacaaggtgcccatacataccacactgtgagcagatgttcgctaacccctcgtatgagacatagaatctctccccgttaaccaccactgttcctttaagaggtttctgcagatttacttctacacaaatcctggcaaaacgtcccctttcaaaactgagtgtgtttaagtccaccttaataggtttccccaagctattagcaatccctagtaggatgtacttatgatacagattccatggaaagtttgaaatccgcacccacaccggcgtcgtaacaatctcatcccgcaagggatcaaaatcaggcgaccaagcttgtgcgatgagatagttcccaaacgccttccacgggcccccagtaagcgctgccagatactcctcttccatctcaaaacgaatcatgaaaaattgtcgtggaagatccatgacgtacattgcaccgcaaggcttccacaattctcttaactttcgattcaacaccggcaacgaaatatgacgacccaacactttcactaccatacaccttttccacagaccattcatcgcatccaccacttcttgaccaatcgtaatgaccggctcaccatcctcaccattaggaaactccacccgtagtctctctgcaacaaactcctctgagatgacttcttctgggatcgggactcctcccacactagtccccttaactttctgcacccatactcccggatcatctggtggtgctcccggtggacgagacttcacaccaatatccaccatggtagcatcccgctcccctgcgctcgaaaccctagactcgcccattctcaatccagtacccgtaaaaaaaaaaaaaaaaaaaaaaaaaaaaaaaaaaagaagctatcttacaactatttttttgaattttaatcataaaaaaatatattaagagcccatagaaaaactgtctccagtggaatacttttgttaagctcttaagcaggtttggcccttacggagtttccaatatactaaaagctcgtaagcaggtttgacccttatataaaattcagcaaactggtgctctatgcatcaattatgataagtcttatggtgcagtggtttatgtcacaaatgttgggtctatccttgagcactctttttttttgaataaaaaatattttaattatataagtaggacatatatacataagagactttgggctggacatactcataaaaagccatgcgaattggcctggcacaactcgtaattttatctgcacaaaacagatagaccaactctgctctgctttcttatggtcgggacccgctctcagccaaaaaaaagcaaaagtagcctggcaagatgtttgcacacctaaagagcagggaggtttaggcctacgatcgatcaatgaggcaaataaggtcagctgctataaactaatctggaggttactatcatcaaactctctttgggcgagatggatacacatttatcttatcaagagggcttctttctggtcaataagcgaaactactacactgggatcttggatgtggaaaaagttgcttaagtatcgtgattcagcggctggttttgttagagtaacagtgaagaatggacttggcacctctttctggtttgacaattggtccctacttgggaaactaattgacattgcgggacatagaggatgcatagatatggggataagccttcactcctcggtggcagatgcatttgaatgtcatcgaagaaggcgacacagacttggttatttgaatgatattgagactgcgttgcaggaaacacgacaaaaaagagtcgctggagaaaatgatgtagtactctggaaagggagagacgaccggtttaaaccggtttttagtacgagagaaacttgggacgcaatccgagaagccaagccacgaacagaatggtataagggtatatggttcgcccattcaaccccaaaatactcttttatctcatggcttgcaacaaggaacagattggccacaggtgacagaatgctacgttggcggactggagtgcccattatgcgttctctgtcaagcaccattagaagaccgagatcatcttttctttagatgcaagaactctgaggaggtgtggtccgggctaagtcgtactcttcttggcacaaaattcacaacaagatggagtgaagtccacaagacactcatagacaaaaccattggaaaaatcaacctcttcttaataaggtatgtctttcagttggcgatttactcaatttggaaagaaagaaattgtcgaaaacatggtgaagctgaaacaccatcagtccatctagtccgaaatcttggcaagcaagttcaaaaccgcatctcatcaataagagagcaagggaatcgcacctacgatgcatgcatgagcgtatggttctcctcaagataaatcataatagagtcgtagctcattagtctctattcttttgatttctatgttttaaatacaaactttctactcaaacgatgcacttgttgtacaaaagtttttcgaataaattttaaattttattaaaaaaaaaaaaaaaaaaattttagatatcaaagtttcaaaaaaaagtttaacctttctacgatgaaaaaataaaaagtaacaaactacgaacttttcatagtttcttttagggtctttcaaaattaaaacatgaaataattacaagaaaaagaaaaagaagaataagaagaataagaaaagacatagcgtatgttttgctgtgcatgcatggtcagaggtttcgtcatgcatgcagaagtggacccgaatagcttcccatcttcatcaaccgagtggacccatctgcaacaccgagttgactcagagattctctcctgagtcaaaagtctcatatttcaccgttttcttcgccgtgcttaaaccatcctctcgtcacttgaatctcatacttcacgtctctgcacttagagaatatcataaacagaggaatctcgatatttctcaaaactcatataacataatgtaatttaccttatagtatacatgaacaatacaagattactggttcatgtcggcggttggtgtgccgtccgtggaggccggaggagacgagtctggaagattatggttgaccatcaataacggccaagaacggtgttgacttcccacaccaagaaagtctctcgtgaaacctctttcatcaacttccttagttttgatattctctgcttgtttgttgttgaagatagaggtcattagaccaaaagtcttgctattgcttgagcttgatgatgatctctttgatcccatttgagctgccttttgtagcaatgccgtggctgacattgatgctatttgtccaccgttttggttataattattagtgttgtttcgtgcttccgaagagaacaaagaaccattactaatcacattcttcatctcatgttcttcttgatttttggagattcccctttggagaatgttgttgttgttgttgttgttttcgttgagaagccattggtgagatgattgtccttgtaaatgccatagattttgaagggagtcggatgcactacgaggtgatggagatgatgaggacgcaaaaacgttggttggtaaggtttgtcccaaaaaggcaatgttattgcgattggtattaaaaccaggttggtccaattgtgacgaagtagtattaagctgtcgttgttgatgattttggttgatatttccatggttgacttccacatccagggcattgttcaaatatgcgggtgctggtggaactgagacaaatctagcactctcttcagctaaagcgtcacagaatgctctatgtgtgatgaaactatctttcctgttccaatccaatcatccaatatatactaattcaataaagagatcttagctgattttagttaaagccaattgaatttaaattaaactaaatgttgtatgacattgtttttcatgaaatttaaatttcgctctttaacaaaaaaatttgacttaaaaaagggtgttgtaatacatacctggaaaagagggtaccacagtcacatctgtattctttagtaccacaaatcttgctatgagctttccaatcggacatgacagcatatttcttggaacacttgtcacatttccacttcttttcaccatgtttcctgctgaaatgcttcttaattccagttaagtcaccaagggctcgggccgggtcatggtgtacgcaagtcttctctggacagatgtacacttttttcttcacttgctccttgtttgtcctttgctttagcttccatggaaggttatggcctctccggtgaagctgaaggttctggtctctcttaaatcctttgttgcaaacctcgcagatgaatcgattagttgtcatgagggagtttggtgatagagcgatgacttctgcatctggatctggtgtttaaatttcatttaccaaataagaaccaatgaattaatttatgataaataaaaaagagatccaaagctggaacaagaatattgttcttgatcgaaaaaaaaaaaacaaattagcaagaaattcatctattttatatgacaagtcctagatttagattaagtatttatatacatgcctggatttcccgggagatttctcttcctcttggctgagttagaggaggtaggattagggttagggttaggatttggagcgatgtgttcttggtgaaggacatagctgggaaatgagaggggatgatgatcatctggcatcatcatgctgatattggtttagttgaaagacagagaaagagagagtttctaagtaagaagacaaaacaggtggacagagagatatacagaaaaactctttaattcgtcaatacagttctctactaaatcaagtaaaattctgagagctagcaagaagacagagagagttatgaagaagaaaacaagtaagaatgtaactaattatatatttccattatactatatagagagagttatttttatatacacctaattttttaaaaaatatataaaatttatgattttatttgatttcccattataatataggttttgtaagctgactattatattttcttatggctgttagcgtacaagaagttcaactattgctaatagtccttgtttttttatatatcagaaattcttatttcaattaattgatgaatgttttacactagtttcttaataaaaacaatcccacaagacttatagagaagtaagcactagatatttctaaaagtttgatgacttgaaaaatagggatgcccattttttccaagaaaatttcaaaaagaattttgtttttgattgtttttggggtcgtcggtacaaatttttattataatagaattttgttttattatttgtgatagtaagcttttggacacttgcaaagagtcctgtagcataaaaccaaaaagaaagctggcgaagagggaatctctctctcttcacacacgactgttcttcttacaagtcggtcagcgatagactcaaactggaccactttctatctctctaattctctatatactctcccatctacgtaacgcaaagtatacatacgtactcaagtcaagtgtatacgtacaatacaatctacaaatacataaatacatatagggtgcataatttatctatgaggtgtgtaaactttatgacatttctaactgtaggctctttggatttttcggagtctcttttcatcccatatatatatacaatgaattcatttatatatataacaaatcagttcgataagtatatatgtaaagccgaggagaaaagtataaataaaaaacatatagctaggttaaaccaaggccatgtacgacgactacaaacaacataagtggttttattcagacttgaaaacaaatctttttggtaattaaccaaaataaaaataaaaaattgagttggaaggttttgttatcctctttgttattttaaagctaacaattttaagatactaactaataactcagaattccttaactaattctgtacagtgtgtgttttagcttagataaatttcttttacatcaattaacctgctctagtctcccacacgaggatattatgagatttagatccattaatcaaaaaaaaaattaatttacattttgaatttttaggtaattatatcttgagatcaatctcaatatctcatgattctttcttataatatctagagtctctaagaacctaagttcctaatcataaatcctaactacttcttgggtaagaaagaataaaatccaaaagaagtgatgtagagttctaaaatagacacaagggtcgacaaggtttggatgggtcccatggaaaaggaagatagatctcatctgcttgttcagccaaagagatactgttccttctccctatccaaaatctgctctgaattttcttattcactttagttttcctttagaaaaccagaaatgattttgatcattttgaatagatcataaataaggtaatcttgtgctagaaaaaaggaggaattcttaaacatagttaatgatcatgcaggttgatgatctccctagtctagaatttgaagggcatcattaatagattaggataaatggtgatatattatatatccaagacaagtccattgattctgccaaccaaaataatttttggattttgtttgtcttattggaaaatacaaaccataatataatgacaaacaaatctttaaacttatatgtctactttgtttatgtactctctcaaagcaataggaagttcaaagtgtctgaccaaaataatatcagctaggactaaactagttcgtcttgggcttttcaaatttttgtagaataaatcattttaatcaaaaacataaaagtggctaaaacataattgatttgggaaaacaaattcctacttcactaatacaatggtggttttttctaggtctgggcgttcggttatcgaatcggatttggtttggttgtttcggatttcggttattttggatttagattctaatatccatatggataattataaaattcggatcggtttcggtttagatattttggattttggatcggtatgaatatgatatttaacatccgattgaacccgaataaccgatattaatccgaacttaaaccgaaaaaacgagctatgcaaaaaatgagtagatgaaatgaaaccatagcaaagcaaaccataaagtttttgaaaccaaagtgaggcataaactatgccaatacatcaaagttttgaaagaaaagtaaaccataacatcttaaagagtgaagaagtagcagaattcaattggaaagtagtaaaaaaaaaagtgaaagagagtgaaaacaagccaacaacagcaacctcaagcttcttctttgccgcattctcaaacttcaccatgttcttgaaccttgatacaacaaaatacttaacttcttaatctatgaaatacatgaatcaaaaacatcaagtttaaaacaatttaccttatagccgattaaaaagtttgaggataagagtcttctaagcagagttgccatcaaactctgtaatcaagaaaaacaagaaattaaaactgtgaacaattaaaactattaagagagaattgaaatagagcataagggatgaatttacctttttcaatgttatctagctcaacaatgtcggcaagcaactctttaatggtaacaacagatttattacctaagtgattcacattcttcatccactgctctgtgcacaacaacactttaaccatataatgagttaaacaactcctatgtggctctatgactcgaccactgttactaaaagcactttcagatgcaaccgatgacacttgcattgcaaggacatccttagttattgcagacaaaacaggaaacctaccacaattgagcttccaccaagaaagtacttcccactctaatccaatgatagttttaggattctccactttctccttcaaatacacatctaactcgtccctaccatcatcaaccccaatctcatcaaccaactccttataagcaaagtccatcctctcataccccatactatcagacatcaaatcagagggctcaccttggctagcagtaatcgaagtctgagtggactgtgatgatggaccactaccacttgatgttttctgaaaacgactactatactccttaaacaaggaagtcaaaacattgttgaccttttcagccatctctttagcatcagtagtatctttcccataaagctttgcaaaacacatattagcaaactgcattttcttccttggatcaaagacacttgcaactatcagataaacattaatgtttcttgttccatcccaatacttaacaaattttcctaacatagctttagccttaattttcagatccctgtcaaaattattgcctagtgacaccaaattcgtctctatagtcactatctcaccatagcacttataagaagctactgaattagaagcagacacgaccaaagtggagttgtagaatatgatcagaaatctcactaacctctcgactgcattccaatcagctcttgtaggtggcccgatcttgcttttccatcgtctacttcattgaagtagtcattatacaacttatcttcagcttccattttatcaaatgccaacctgaactccatagcccttttcagcatcaagtaagtagagttccaccttgttttgatgtccaacggtaaactccctctagtcatcttgcctgagacaactttctggtcaaatgaatcacaccttgaagtagaagacctcacatactgcactgaattgcgtatggctgccacatgatcacccaattcaaccaaaccctccttgacaattaaattgattatgtgagcagcacacctcacatgcataccttcgccttctaaaacaaatgcttcattactccttaagctgaatgtttcttgaaatttcttcaaagcagaagtgtttgttgtttcattgtccactgtgatagtgaaaatcttctctattccacactcagccaaacactcaagaagaatccttgctattgttgcacctttgtgatccgtaatgtacttaaacccaatgattagcttccttaatttccaagcagaatcaacaaagtgagcagtaatcaccatgtaactagcaactgtagctttagctgtccagatgtctgttgtcaaagagactcttggattagtagtcgcaatccaagtcttcagagatgctttcattcccacatacattttaacaatgtctttcatacaagttctcctagaatgtggcgcatagaggtttaccttttcacataaatgtttccaagccgcgctttcaatgaaagaaagtggtaattctcccagcacaagcatctcatttgaagcttctcttaaaatctcctatgtaactttcccactctgaagatgtccctgattgttgaaaacagtttgttttgctttctgactccatgcttgataatgcttgcagattcgaagatgattcttcaagtttgaagtcccatctttagaatcacatccgtaggttctgtgacaatagttgcacttgcatctcttaggattatcttcaaatctcgtgtaatggtcccagacaaacgacctttgacttggtttctttgtcttaggtggttttgaagtagctccactatcttcctgaacatccttccttttgttagcagcatcactttcaggttcagtcactttctcattccccacatcactgttgcttggaaatggtgatgaatccatctaaacataagaataatgagaagttttaacataagaataatgagaatccatctaaatatacgttcactactcaaaactatactctcacaatcaaaaatatactcttgctactcaacaaacatccattgacacaacaagaggattagaatcgactaagaatttaactccaacatacacaaatttttaaaatccaaacaaagaatttatcattagctatatgactaaatcaatttaaatgagtttcaattttttttctaatgaagaagaagaatcaaagaacaaagacgatagctaatgaagaagaagaattgaagttcaaacacatacccgagatcgattgcttgatgcttctgatggaggcgattgtgacgaaagagagcttaagaattccatattgaaagagcttagggttttatggttataatctagaggaagtggatcccgtattgctaggaaaatcaagaagattagggaagtggatcgaatcatattgtttgataatcatcataagggaagtggatccagacttcgaaggctaaagagtagtgtatagaagaagttcttcggttggtttcggatagccatattatttcggttcggatcggataaaatccgataaccgtggatatagaaatcaataaccgaacggttaattgagcggattcggttcggtttttaatccgattttcccagttcggatgcggttcggtttatcggattcggattaaacgcccaggcttagttttttcagtattgggattttgaaggtattatagaatgaatgaatattttttgtttatgaactaacttgacatattattttattaataacttagttgaggggtattttcatgagaagaaattatctgagggatttttctgttgaggtttaaaatagaccagccaatacttgagagagtttttaccaatatccttatttaaaatttatttgaagattttatatcttttgctattttaatagacttactgataatggtaaatttatgaaagacaaaaaagattttttttcaaagtttttgttaatatttttcttaaaaagaggtctcacacaagctgacaccatccgacgccataatagcaaccattgtacatgtcttccttctttattggctgaggactggaaaccagcaaaataggcagcttattgtacaagtcaatctaaacattgaccactaaatatttttgatttttatttgtagttttttggatcgacaaaactcaacgaatataccgataaattctacaacgcatggtaatgagactgaaccgctgtaaaaataacatttaaccattagattaaaataaatttctcatgaaagttgttctgggttcttattatgttttgtgtatccttgtaatatttttataagtaatttgcatggatttctttgtttgaaatattatttacacaagatttcttttagtggacttaaacttttattggtatgtgacaagttatggtccaatgtgagcaaacagataggcttcttcagtgtccgatccgtagagcatcttttctcagttcgattaaaagacgcaagagagaaagcaaaaaaataattctggttatagattccacaaaaatcattaagaactaattcataagtttactgttctaaaatactattattatctctaatttaatgaacaaaaagatattgtttctctccacactctagcactttctttttcgtaatctctttacttgtatcaaaacacttttttcttttttttttaatcattttcagtatcataagatatattgttttcttccatgttttcttcatgataatgtcaaatatgaggtttgtaatttgagcgacaatgcttacaaagaaaataagccaccactaattatgaaagtttcttgtaaggaaatcttttttgtaaaattttatatagatatgtgactatatatatttgttcttagcatataatttcacattattttactctaaaacggtatctatttttaaaacaaagataaattttttactagttgagaaaatgaataactttattttcaggaaaaaaaaaacaaagataataatacaatgtgaaaaaatctaatcgattagtttcttttatataatgaaacatatcacaaatggttaataaaatacaatgtattcgttttctcccaaaggtaagatgtcctagtaaaattaacacatgtatgcacaaaatccaagaaaaaaacaatatagatcgtctactaaaagggtcataattatacactattataaatactatgaaagatgttacgattaccatcacaagacagactagaaattctataaacacttgaaatgagtgggaacaagcgagtgtctgtgtccatcttagtagtgatgataatgatgctatccatttcccaaattacgaaaggtaataatgattttgcctttgctccaatgtcaaaaaaaggattgttgccaaaaccattgtcttgtgcgacagacgcaggaaaaattccggattgtgtagaagcagtgaagcatttcaaatttaaaaatgtcaaaaaagaatgttgctttatactactcggtcttaccgaagactgttttggaattttgtttcctatgcgttttgcgtatcgtgaaatgcttaagattacatgtaaattgataggctttaagccaccttcttattaatttgttgttctcttttttttttcaatgtaacacaagtttaatttatgatattaatatttataataataatcatgggcatatttatttataatgatggactgatacttgctcttgggtgtgtcaaaatggataatccaactgaatctaaccaatgatcaattggaatgagacacaaatagtttatgagtttactaatgaggttgaattaacctgtgagcccatttaattttatgggcaaatactaagaatctatatcaatgtacccaataaaataataataactaactaaacaattttcataaacataaaaaaattaattaagagttatgaatataatatattattattttaccatttttattatcatcatcataccatcatcatattatcatcatcacatctttatctatctatcataacgcgatatgattgattatataacttaattacgtttttgtttaaatgtttggtgaaaaatctccaaattcccgtgtttagagattttaaagaatcatagtgtacaaattttggagtctcactattctactcggtctttccgaagattgttttgggattttatttcatttgtgtttctattatcatatcgtacttaaggtgacatgaaaattaatagacatcttttaatcattttttttaatctttaaatattttttcatgtaacagtaattcatattattaatatttataataaaattatcgttcttttagtgatttgttaataaatatctaaaagatattaatgatttgttagatgatcatgttgtaacttgtaagcacacaataagatatattaaatattgttttgctcctttatcgaattactagattctgacccgcacgttcgtgcggggtaaacgttttaacaaatgtctttatataaaactcgtgttaatatattttgtttgttgggttagtgaatctatatataccatcaacttagcataataattataaaatattgttctgtgtgtttaaaaatagtgtggtgcatcagtttgtattttctatttaataagtcttaactctttaagtttagaattgaaagttgagagttttaaaaataaattagtaatacaagtgttatttttgtctctgtttatattattgcaaaattgtgaattctttaaagaagtaaggttattattgaatgagatttatagttttactgattctttatatgtcagttcaattcccaagctgtgaatttgatgtttgaatagagatctttgtccaagtattgtcaagactcaagaagccagatcgtctatatgtaattattgtcaattggatatccaaatttttgttttcactgaattttatcaaccgaatttgatttttttaagtttttctcattagctacagaagcaagatgaacattaaaattatagtttagctagctatattttttaaacccataaatattattacctgaaaagaattctacttaatttagcttctgaatatatttcaatatactacaaatataatgatgttcatggaagaagaggattagcaaagaaataaaaactgatacgtacaatgattagaaaacaatagctattgccaaaacattaaacatgttataaacaaaataagaaaaggttataaacatgttctaggcatcaatgatttgaaaacaatagctattacaattaataatatgaaggaggcatcacatattgtcaataggagctattcaaaaatctatatgttaaaggttagtgagatcataatttatatacttttgtttattagatttgtatatttacatacggttattaagtcgaattgtggttacttcatatagaaaacattgttattccttagtatgttaaaatgaaagtaacaaataatcacctttactcaaatgaacgattttcacttgtgatgttagcaagattggtgatacgaagatttcatccattgttagaaatgagaaacgaagtagcaagatttgtcttttgcagccaattttaaaaaatgagtagcaaaagattagagaggttgttaatgacattatttgcagccatttttttgtagtagtagaaaaagtggagaggttgtttgaagagaccccttgtttgaaagcttaataattcttcgaaatggtattagagacattttatatttatagaaaacagaggtcggctagggttaacttttttagattaataatacttgatttaagaattaatcaatatatagttattgttatatttgcatcttttggtaattgttacgaatcatagtgaaatcaatctttaaatttggatttttaatatttagttattgttacaattacaatatattctaatttactattcggatttcgtaattaaagggatatgtttgttttggtaatatcttttaattttgttaagattaccaaatctcaaccgtatcgatatacaaaattgctaaattctgtttcgtctgggtctagcccatgatccgcgcgtcgatccaccaaagaagtccaggatccgcgtcttaattcgatccagttgcccatgactcgtgattttttttaatttgtaattatatttttacttttgaacgattttttttctttactctttaaatgtaatatttccaatggcattctttgtaatatcttacaactaaaagatcttttcttattcagcgatttttgaattttaaaaaaaaaatcccgcatatataacccaaaattctaaaattgaatttaattatcaattgcaaattatgatttttattaatagtatcaagcaagttttaagcttttttataataaaaattagttttcaaaatgttaattaaatctcatggtataactataattggatatcaaataaaaattagttttcaaaatgttaatttcaaattttcgtccataattaataagagagagaaactgattttttttttggaaactaataattacttaaaagtattttctgtttttatttaaatatataaattttgtgattactattacgtctttaatgaattaatttaaaaatacttggaaccaatagcattttttgtaatatcttaccttttataagattatattatatccaatgcttcccaattaatagtatagatttagatcaatacattgtcaacctaaatactcttatttagagtcaattcattggacaaaaaatctatagtaagaagatgttcgccagatgacaatatttaacccaaacaaaaattcttgagagtctctatgagtctcgatcaatgttgagttctaatggaccattgaccaattttatagaaaactaatccattagtttctttcgatacaaataaacttatcataaattaaaatatggataataatttacttctaacccaaccaacaatggttaatgtaatacattgtattctctttctccgaactatatgatgttcgaaggcaattaggtaactaacacatgcatctacacaatccaaaaaaatgcaataaatataagaaaatatgacatcctaatagcaataatggccacaagataaaatacaaattttataaacattaaataatgagtgggcatgagaaaatagtgtatgtccatcttaatagtgattccgtcattttctaaaaataaaaaaaggaaataatgatctttcaattgatccaatatcagagaaaggattgctatcaaattcagtatactgtgtcgtagatggaagcaaaaattcaagattatgtagaggtagtacaacggtaattctatttattgataatacgaccatatgtttttctttctgtattaaccattaaattaaacacgaactaacattgttttggcctttcaaacgtatcatactttaagacttcttgcaaaataaccacaagtaattttcaagagatattgtggtttaatatatgaaaactttcaatatataaatataaaaaaaaaacttttagatttattttatagtaaattaaataaatataaatgtagtatatttgagactatctttaccaatatactgactaaataatcgcagtagttatttttaaactcattataatttaaaattattataagtggtaattatgtcatatacgatcatatggtattggatatatttggaagttaaactaaccctctactctacctacgtatctgggatggttgattatatgtataaataaactataaaactgtgtatatatgaaagggactgaagagaaatgaggaatatcatgttctcttaaccaacaacgatccaacagcttccttccaaaagtggttatcgaatataaagtaaagaacatagaaaattatgttattttcagtaaatgtacatatgtttgtgtgacttgtgtctctctccgtttatatgcatggattgtgtaagaaaaagattaaaagtgagaatttaatacaaactattgtctttatatatatggaacatatatttgggctctaaaagtactaaattttgtgtgttctttaatctaaggttttgttataaacgaatctcctttttgctactcttaatgaatctcttttactataagtctataacactgcccttcaaatacatcttttaaggcaaaccatgtcacttttaaatatcaaacacaacaatagacgaaacacataggaaataaaatttttaaaaataaaaaacaatattcgcaaatatcgcgtagaacaatacaacattcttttgtgatatatattttaatagaatcacttcactggctccacacattccaaaacttttcttaagtccatcacataagaaattagatttgacagcaatcatatatctccaaccttggagcaagtgcaaaatcattattatctttcctagtttgagaaattgatagcattaccatcaccattaatatggagacacactttttgcatgttttcactcatatttatatttatcttgtgatgactactattactctgatattgtttctattactgtatttgtattatgttttttttttaatagactataatagtaatgtaaaagtatatcacaattacaagagcgtcaattttgcaaataaattctctttctttttttagcaagaacaatccgttaaatacacatggttaaagtttaggaactatcttgctttcgaagaaagtaactttatcagtttagttaagaacttaccataaaggttcacaaagccagaagaatttcggagtgggacatccccaagttagtttagagcactgaaattgagaaacaaatcgagttttgaaaatttagagaaacgatattggtttcgaggtatataaatagtagagaacgaaactgagacaccaaacttacttgtaaatgtaagagacaattccaaggatcacacagagaagaataatgtcgatgcagaagtttcggctggatcgcatctgaaatcccccacccgattttagtaattaatttcaagaaccagtttctattataattttacctgcacaagctgtttcttgagccgaacgttggtattcttcaaatccgaagtggctccatcgacctacaacaatcatggaatcattatatctctagcgttttgataacaccacctaatgataaagatcaaatttaaaactaagggaagagacaaacaccaaatattttttatcgtaatcatcaaaggaaaaaagaatctcacctttgtttccatttcttccatcaatgggacttgcttgtcaagttcctgaaatcgaaaaacgtaaattataaatctccatcggatagggaaaaactcggttacatagggcatgagtaaacaacaaacctcgttcatgtcacgcgctaagttctttagtgcatccaaaccttctgatatgatatcaagaccctcatcctaaagtaaagacagaggttaagctaattcgaaatctcgttgtcgaaaggcaaaataaaagctagtctataaaattcatgtacctgtttctttcttctcatctcatattcttgtcgaaactggctggattcttcactttgctggaaaaatccatcatccatgtcttcctctaatagtaacaagagaataaaacaaaactcatttatatgtactgtcttatggtaagataaaaacatgaaaggaaaaaagaaacattcactaccagacatatcaaacttgatgttcttgttaggtgcagaagcacctccccaatcactatttgcttgttttgctccatgttcatttccatcaggtatcgcttgaagcctatcggctaaagcgataactagatcgcaccgagattctcgttcctctctcgtgagccctttaatctatatacaatgcaaattaaacaaagtttgaacacaaccattgatattcctttcactcatagttaaccaacaataagtaattaagttaaaccttcttaacagcgagtttctgaagcttaacaacatcttcagctaatcgcgcttttgtccttcgaacctcagcattcatagccaccgcggcagctctattcttctccgttgatgccaactccgctttctacatagtttaatacaaaatttaaacttaataacgttaagagtcactgaaaatgaagcaatattatttagattctattggttacaacactaaatatatcttctaagatacggtcgataaaatctaaagagcaaaaaatatttcatattctatcaattctcaaatcttttttttatatctcaaaatctttcttaacgagaaaaaaataaaaaaaaatcatcaacagaaatgattaaagattttatatatttcaaagtctagaacagaaaaacccaaaaatatattaaaatattcctcaaatagcgatcaaatgagaaaatcaagaacaatctagggttttgtttttttggttttaatgaacgatctagtgttttaaaaaaagagagagtgagagagaaggagacaaacacgaagaactgcttcgatgtcggaatcaatggaggtgaagaggcgagagaaggcatcgtcgccggaagcgccgatctcacggtgtttgtcgatgtcgtacttgtcgtactttttgcaaatctcgtcgactctgaagatgatatcaatgaccggcatatctacaagcttcttcttcttcttgtggaatgtctccgatttggttctctgtttcttcgttcttctccgttgtccttttttggagtctctcttcagaaacgagacgcttagcgtaaacggcgggattagaagtattaatagttagaatttttttctgtttttttatatagcttttcaaaccagttttagactacaatatctttaagcataaaatatttaataaattgattatctctaactaacaaaaagattttagtgggcttgtaaacttgcatatgaatatatttgaataaaactcagttcacttgtgaaaaaaaaaaaaaagattctgcaaaaaatccgtttggtcagtttacgaaaacgtttaatagtactatttcagtattttgggtatagcttacccgaaagtttaaataaaaattatattcgatctatggatcatatgggtatagcttacccatatgggcctaggttttattaacatgttaacacaaaaaaaaaatatttcgaaataaaagagtcatttgggtatagcttacccggaagtgaactatacttaaattgatgcattcagatagactaggagtttaagcttggaataatcaataatgcatcgagtgagaatctagttatttcttttttattttaaaaatataatttggatagtgtttttgtaaaatgtgattttatcgcatctaaaattcttttatttaattttatatttctttgttaaaatatttctaatcttcttttttttgttgccaactaaacatatctcagaccatgtgcttataaataatatacagtttttatttttatctttttaattgaaaaacatagttgaagaaacatatctatttaaaaaatatagtatatctttcattacttgaaaacattttaatatgaatttaagaataaataggaaaatgtatttcgtaaaaaaatcttaatcgaatatatagtttcctttaatatataaacttgacataatgagtaatgcagtacttttgactctatacattgtattaaaaaagttgatgcaatacattgtattcttctacttttttattaaatacattgtattctttttttctcgagcatacgatgttcgaagacaactaacacattatacataatctgcgaaaaaggcaatatatctcatttactaaaagtttcataaccatacaatatatataaatactataaacaatgccgtagtagtgatcacaagataaaatacaagttatacaaatatttaacaatgagtgagaatatgcaaagagtgtgtgtgtctatcttaacagtgatggttttgatgctatcaatttctaaagttacgaaaggtaataatgatcatgcgccggctccaatgtcagagaaagggttgctgccaaatccaatatcatgtgtagcggacgcaagaaaaattccagattgtgtagaggcaataaaacagggccatttgaaaattataaaaaaagaatgttgtatcattctactcagtcttcccgaagattgttttgggattttatttcctatacgtttctactatcgtatcatacttaagattacatgcaaattaattggcatcttttaatcacaatttttttttaatctttagatattttttcatgtaacggtattcatattatttcataataaaaccatttttctttcagtgatttgttaataattacctaaatgattatgttaaatataaaataatgggttttctatactaactaagaattaggctagtgttcgtgagacccttcgtttggagctagaagattaatccctagttcggttattggttgggaaggatttcatattccgggccaggagatatatgagtctcacctggtaattccttagagttgtagttaattaacgaatcaaaaagaacatgcattgattattttattggccctttgttatatgttttcttaaaaatgtgtaacgcttaaaatttcttgcaaattacttgtagtttcaatagtttaaaaattttaaagacttattgaatgactttgtatcacttcattttatattcaaagactctgtatcaatatgagattattattttttctttattttgtggtgtctaaagaatcacttcaaatagatcttcattgtaaatattcataggtgaaaagttagacatgctcgagcaccactgaattattttaagatcatatccatgtacttttaatttgcaatataaaaggaaaaatattagttaaaaaaaaggaaaaagtatttctataagtcttcaaatgcacaagattttctgaattgaatgttttatgattagagtttttctcccattttatcatatatactgataatattaataacaaaatgatttgaaccccttacatgtgctcgaggagctgatgcacatggtccatccaacatttttttttataagtaaatctgttacaattagggtccaaatttttattaaaaaataaaatataggaaatgatgaccaattcttttttttagcacatgatttttaattattttgagccagccctaagtaaaaaacgtataggcttttgtcgacgattatgttataaacttataactagataagaactcgcatctagtgtgggatgaaacgattaaaataaattatttgataaaattattgatatttaatatttgtctgtatataataaaacatgtaattaatgtttttattttattttaatttatgtttgttttgtgtaaaaatacgtttcacccgtgattgttaaagctctaattcttgagtgggtcggaacttggtttaatttgcaacataatacaaacatcgatatatcagatcttttttagtttgtgttatagtgtgctcagtggggcggctgttgtacggatagatttgaaaggattctttgttatgattccaacgtttttgcaatcactagagaaaaccaatgagattgtaaaagaaaaacggaaacaaaacaaaacaaaagagaagaaagctagagaacaaaaaaatgatattcactagacatggtttcgacgaagaaactggaaaccagccatcaaacaaatacaacaaagatgatctgagcttagtcgagaaaaaaggatcctgaattgctcggatgataaaatcagacgtggttgggatttctctctaaaatgttctcatcatttaatttggccatttggatatgatttaaatcctaatttctagctttagtttcttgtttttttttttaaattaatcaagcacaataaaaaccttagacttagaaccctccattttttttccaacaattttgaaaactatataagttcattatttttatctctatatatatatataagcttaagaaaatgtacgtataattatgtttgttcaaatgttcatccagaatattttacgatgtcatattggttttgttttgttatcatgttgtgaagtaagtaatcattttttttattgtcatttccgttcttgtattaaaaattatatattgatgtggttgttaaaccgaaaaagaaggtgaatttggtagatcgcaatatttattgatgaaattaagaaaatatcaataatatgatttgggttcattacatagtttttttttttacatgtgtaaccccttctcacggccacggtgaaattttcataatatacacaaaaagggcaacaaataagaaattttcattacatagtatattccttaattttgtttttattctcatttagtttttactagaaacattaaaatgaacttatatttgtaacgtgctattttgttttctgaactatcaaatgaacgtctaacaaaatcaaactcaaaaacttataatttataactctaatttccatttaataaataatatacccactaaattaaaagttaaaagttaactagtaaaatcgactataattgcagaaaattagaaactgttttatcctttctttacattgtcggttttcaccgtccaatactccaatccatttttagtttactaactaaaatttttttattttaatttacttatcaagtttacccaagaataatattaagtcttaccaagtcaagacagggcagtacgtatgaagtgggacttgggatttaatgtcacatttaaagcttaaacgtcagtgtttactagaaactttgacaagttcttgattgcaacacaacaatgattgcgacaatattaatagatatatagttatattttccaccacatatctaattcttcatcttctcaactaaacaaatcagtcaccgggaaaaatataaagagatgacggataaagaagaaagcaaccactcctcggaggttggcgccgtccgatccctccaagaaactcccacttgggctctggccaccgtttgtttcttcttcatcgctgtttccatttgcctcgagcgtctcatcaatcttctatccactgtaagtacaaatatgtatattataggatcatatatactttcttctatacactgtttaaattttgactaatctctttaagttttttttataaattttttgttcttggaaaagtagagtttggtttacacttgcaagaatttaaattggatatatttatattttattaaattagatatataggtgaagtagtaaatatgtatgttaataaaaatgtattttaatattttaaccattttcgaaaaatatcagctagataacatgagttgaaatttcaacaaaaaataaaaagcgagtcgaaagttcaagacaaaactgtattatatatatattgtctcttttcttgcagagacttaagaaaaatagaaaaacgtcgctacttgaagctgtagagaagctcaaatcaggtaaaaaactgtcccattcgtagaaaagttcattggtcatcaatctttgtttaatttaaaaagctcaaacatcttatagtaaaaaaaaatcctaaatttttggatatgaaaatcaattgaaatatctcttccaattttattaatctctgaatttttaatgttctgtaagggcagttctaatggtgctaggattcatgtcactaatgctaaatgtaactgaaggagaagtttcgaagatatgcattcctataaagtatgccaatcgaatgttgccatgccgtaaaaccataaaatcacataatgatgttagtgaagatgatgatgatgatgatggtgataatcatgacaacagcttctttcatcaatgctcttccaaggttctttttgaccctttgatctttaattaaaatcattttacagttttattttcatttatctttaaatccaaggtggacatatatataatgtataaaagtagtatacaaaggttttaacttagaaaaacaaaagttttgatgaccagtgaaactgtagatagaaattatgcagcaattttgttttcttaatcaatcacacaatttagtttttgatttatgaattttcgttaaatgattttccagttttcataaccttttattgcttactattctacaatatgattatttaaataagagatttaatcatatacatttttatatgcttaacttatgaaacttctgaatccaaaagttttaagatatcttcttgaaatccaagatggagggagagaggaccgcaaaatccaaaaatgtcaactagtttactttgacgttgacttggagtcttggacattgtcgttagctagagtccactaatcaagaaaattacgtccaaataaaaaagaaaacaaaaaaaaaattgttgagttatgaacaaaatatcaagagtatgactttttctttgcttactaaagtaaattttatttcgaagtaactaatccgatttaataaaataaaatttgcagggtaagacttcactaatatcagaagaagggttgactcagttgagttacttcttctttgtgttggcatgcatgcatattctctgcaatcttgctattcttctccttggaatggccaaggtactacatatatacactatgcaatcaaatattataacattacaattgtttaataaagacttcaataatttgtgacatggttttttactattgtttacatacaaagttttttgtgtacgtaatacatatagatgagaaaatggaattcgtgggagaaagagacccaaacagtggagtatctagcagcaaacggtaagatttttgtatttttctactacgaaattacatgcaatgtcaattatttcttagtcgataagttaattaatattttatgaaaatttaaagatccgaataggtttagaataacaagagatacaacatttgctcgacgacacctgagttcatggactgaaacatcatttcaactttggattgtaagttcgtacctattattaatctttaattaatttgttaattaacatttatctcaaatatataggtttaactatattaataattaagtttttttcttcttagaaatgtttcttcaggcaattttacaactcagtggcgaaagtagattacctcacacttcggcatgggttcatctttgttagtacctcattttttgtcaatgaataattatttaaaaataaataaattttaaatttaatgtgttattttgattattgatgcaggctcatgtatcgtcaaataatgctttcaacttccaaaactatatacagagatctttacatgaagattttaaaactgtggttggtataaggtagtcatatttgtgtattttacatgaatcttaagtaacaaagttaaatcaaataaactttttaattttgttacagtcctttaatgtggctaactgtggtcatctttatgctcctcgacgtttctggtaacttaatttatatatttgttagcttaaatagttaaattaaaataattattagtgattactcgtttttatcttatcttcttctttttttcttaatcatcaggttggagagtatatttttatatgtcatttgtgccactcattgtaagagctaatttaatctagttaagactaattaactatatgtgtaactcaaattattgacgaactaatattgttacgtagatagttttagtgatcgggacgaaactagagatgatagtagcgaaaatggcggtcacaattaaggagaataacagtgtaattagaggaacccctctcgttgagtcaaacgacacgcatttctggttttccaatcctcgttttctcttaagcattctacactacacgctgtttctggtaatcttttataaactacatgtcgtttttcctaatgcttcatcataatgccaacattaatttttctaatacagaacaccttcgagatggcatttattgtgtggatcactgtaagttctaatttcttatagggattttaatatttggatttataagaaagggaaaaataatataggaaattgttatatgtgatgtatctataattttaattatgaaattagtggcaatttgggattaactcttgctaccatgataaccaagggatcataatcacacgacttgtattagcgtaagcactacaatttatttattttatcccacaaattatttacattttcgaaattatatttttgtattaaaaatcatatcgttaatattaaggatattatgatttatagggtgacagtccagttcttgagcagctacattacattgcctctttatgccattgtaactcaggtaatttagtccaatatatataacaccatttttaaattaaatcgttttgcattagtatataaattattactgttagtgtaacctagtgatctgaatttgatttggatgcatatatatatgtgtttagatggggtcaagctacaagagagcaatcttagaagaacaactagcaaatgtgttaaggcactggcaagggatggttagagacaagaaaaagactatccaaacgccagacaccgacaacaacagtaacaataacaatggtgatattgattctggagaaagtccggttcagacagaagttgcttctgagtttagattttcgggtagacaatcgccgattttacaagagatacagatacaagagaaaactgaaaggtgatcagattgatggaaaatgagaaagagattgttggtattattgttaagaactttttagagttgcctttactaattattgacgaatcaaatgacaaaatagtaagtttaaccagaagtgtcagtgttagattggcatgctggtatcgtgataacatgtcacacataatgtgactaataattgatatggtttctagaggattgcttgaagctatttttcttattgtgaggttattaaggacactgtgaattatatatacgtgtacagaatgaaaatgtcgcattggcaatgcagaaaacagacttatctctattcttctttgaaaagctcgcgaccgatgacaatccttctgatctcgcttgtccctgcaccgatttcatatagctttgcatctcttagaaggcgtcctgttgcatattcgtttatgtatccatttccgcctaaacattgtatcgcctgcaacatcaaaccaaatcttttagtcttaaaggaaaggtaactaggtgatcaatatgtgtagttatgatcccttcggaggtttgctttgctggtaaccattagaaagacaagagacaacgcttaaaactggtttcgggtttgatctagctttatgagctagtgtcacagtaactttaagtatgaaggaaaataagggtacttgacctgtaaagcgacctgcgttgctctctcggccgcacaaagaatagttccggcgcagtcctagacaataagcaaatacacaagaaggcaggtgtattaggttgcggtggtgatgcatgactattttcataacaggaaactagaagggatggttatttattatcaaattacctttgggtcaactttcccattgtcacagtccctcgcaacagagtaaacgtatgacctgatatgccaaaggaacaactttttgcttgagctacatttctatggacaaaataatttccagagtattgagagaagttttctaccttgaagattgtaatgcagtgtacatatcagcaactttaccctgaaattcaacagaattgttttaggaatcttatgattaaagtttgagatattcggaaacgtttatgagaaggatgatcaagctcaacctgtataaactgaaattccccaactggacgaccaaattgttctctctggcgaatatagggaagaacattgtcgaggcatgcctgcatgatccctaagggcccagctgctaaaacaagtctctccaaatccagacctgacatcagaacatacactcctgcacgtacaaacactatgtacatcagacaagtatagagatggggatagtagcctcgactcaagaaatatacaaggcgtgtatgtagcacaacattaccattttgatctcagatattagatcctcataaaactagaaaagccagaccatgcaatgcaaattatctatcaaactagagattaagagagtttcagcaatcaaaaccttttccttccttgtctagaatattttcctctggaacgaagcaattctcaaaaacaagctcacacctgctcaggagagacagatgttagagagaaagagacagtgaaaaagggatttaatttacacagatatttttatcttgagagaatggggattacgtatcgcttccccgcattcctagtttgtccaatttctgagcagtactgaatctgcaaagcaaccacaacaataaatggttttaaggaactcactctctgaatttgttccattagttctttactaaagatcatagaaagtcagtttcaacaagattgagaattcacatacccggtcattcctttctctatgatgaaagccgtgattcctttggaacctgcttttgtatcagttttcgcgtaaacaacctgatcaaaccaaaaaaacaacaaatggtagaaaactgttaaaattatagaaaatcagtttcagaagttaacatatgagctaaactatattaccagtgtttcagcagatggaccattagtgcaccacatcttgttgccatttagtatataaccaccatctaccttctcagccttgcatttcatgccaacaacatctgaaccagctgtaacgaaataaaaagtcaaatcagtatacatcagaacaaagcatcggctatatgtatgtattgatgtgtttccttctcacaatctcaaactcttgatccgaaaaatatatatcttaccattaggttcactcattgcaagagcaccaacatgctctccactgataagcttcatagcagtgaatcaatagttagctaaaactctaacgacattttaagagaaaaagatcaggagaaacatgcaacagttcacagatgaagaaaataaaaaacggtctttctataaggtgagatttccaacaccggtgatattggctgataaaccatttgcatagcagtgacaatatccgtaagctcagaccatgatacaaaagctcaagatgaaaccgtacctttggcaaatacttttccttttgggctgcagttccattcctcacctgtaaaatagtattaaatcttctctctcagactcaaaaactcagatactgcaacatagtttgtgagatatatatttaccaattgattgatgcaaaggttggaatgagcaccataagacaaagcaactgaacccgaggcccgactgatttcctccattgcaatacaatgatacaagtaaccaagacctagccctccatattcctctgcaggtagaggaacatgcgattaggctaccgttctagacataaaacaaaacatgactgagctaatagcagaagcatatgatcttgtggtaggagagaaatctacctggcgcagtgattccatggagattaaactcacccattagcttccataagtttacatcctagttaaacaagtacgaaagattagattttgatgagatatataagcaacaaaaaccgtgagagaaaggagttaacaacaaacctttggaaatgaattagttttatcaattctttctgcatgaggagcgatattatcttgcgcaaacttggatacactttctttaaactgcagtttcaatggtagtcacaaaaacaattaggtcgcaaaatgcattcaagaaaaaatataaacgacttatgtcaatcagctgaaacaaagttaaatcaaatgatgaagtgttgttcccaattccattttccacaacacacaatcatcaaattaactgacacaaatctctcagatcatttcgaattggcatgtcaaaaccccaacacatccaagtcgaaagctacacttagaaaacaccaaacaccaatttccttcggctctcaaacgagaagatggcaaatatacagacacacagatacacaacgagaatcacagatttatggagagaagagagagagagagagaacctgtaactgagtgtcgtcgaataggagagacgaagaacgagaagagaaagacctcctccgcgtcttgacggcgtaaccgagaatcgatctggcggagaaaaacctctgcatatcttcgttattaccggtaagttaaaaacaagaaagatcggaagaatgtgttcgtgtaaaagaaatcccaaacggctttttttttttgttattagagagcaggcttcttctaattgagattaagtagttataaaaatagaaattaatttgagataaggattacaaaattggaattgagaagaagatatgagcaatgagtcattggtccatctaatctagttccgtataccactttgctatttgctactcctccataccactgacactgctctattataccattttcaaatcgacaaaaaaaaattattttttcatttatagtaaagtttttgatattagaagatatgtatatactacaagtcaaaacaattggttgtgagtgttgatgagagaagaacacattagtgtttaggaaatattatattatattaactctcatcatgaatatgtaacactaaaattgtcaatataatattttgtgaaagttaaataacatatttgtagaagacagtgtatatgtaatgtgtcttcatttcatgtacaacgacgttaaatgaggttatatataatatactttaaaattatggatcacaaatatagatcgtacttatccacaggtattttaagtttctaccagttttttttgtatcaaatcgtattccatacttgtattcttcctttgtattatatattagaaaatcttttagataaaaaagtgtttaacattgactcattgaggttatttagagaagataagtctgatctgatccttctccctggttaacacaatgtgtattcacttacggtgactatgtacaacatgttagttgaataaaatttagttttggtatagtaagctatattcttttttttttaaatagtgagttatattcattttcaacactttgtaaaagttacatgctaaaaactagtcgccataaaatgcgatacaatgtgtcaaatggaaatgaattttaaagaatatctatgtaaaattctacttttatgtgtaagatgtttttaccccattagaaattaggtaagtgcagcattgtttgttatgaaggttggaagtttgagagatttagtcgccataatgcgatacaatgtatcagatggagatgaattttaaaatatatctatgtaaaattccacttttatgtgcgagatatttttaactattagaaatcaggtaagtgcagcattgtttgttatgaaagttggaagtttgagagatttagtcgtcataatgcgatacaatgtatcatatggagatgcattttaaaggatatttctgtaaaattctacttttatgtgcgaaatatttttactccattcgaatttgggtaaatgaagccttgtttgctatgaaagttggaagtttgagagatttccacttcggtttaatgaaaagtttcttagatatattaaatatattagtaggtctccagtgtagatcctcgtatcttcttatggttagcaaacatatcaaattaatggtgcatgatattcctaatagtgtcactaaaacatgaacaattttatctagtgtcgtactcgaaagactggtatatatcacaatcacatgcatgagaaaacgagagtttgatatatctttgcttattatcattgtcgttttatttttgctaactctacattattccttcgactttgagtttttctcttaatatatcatctaaaaaggtaatattatattattaatagttaattctcctcttatactccttctcattatcatcctcattcacatccatatttatgacgacaaaattagttagtagatgcatgaattcagatgagtctcgaacaaagactttttggtgtaccatctacacccacatagatatgcaaagtcgcgaagatacataaatatatccattatcacccagatgatcgtcatggctatctttgcattcagccacgagtttgtcatccattatgtcaatatatccataatcataaagtgatctcctaagaaccatcatttactaattcggcagaaccataataaataacctttctttattcaccatttttgttatgaagtatgtcggctcctatcggaaaaattaatcacacatttatagaaatagcaataatatatatatatatatatataatgtatgtactgtattaatctttgtttgttcaacaatcaaaattatttcaaaccaaacatattatttcacaaaatatgcacaacaaatttgtcaacttatttctatcacaatactttggtttttcctttcaacatgattttggtagtacgaatgtttaggttgaatgcaaaaataaccttttaatacgttgatataaatttttgtataaccccaataaatttaagtatttgatttatacatttctaaaatgcattttgatgtaaaaaagagagattaaaaacatgcaaaacaaatgtttacaacaaaatttctataaattaatactcaaaaaattaatatttcgataaatcaatatatttttaggttgggagttaatttttgaatcagtttaatatataaatttataaagtattctttttttttctttcgattgttttctattgaatgttgacgatattttttggatacaagtataaaaagggtaatattagaatctagccaaattttacacataaattaataatggttagtttgttggggtaactgactctttttgtggtggggaaaaggtgaggaaaggacaattaaccttgtaaatttatagttttttgcactgatgcatttgtttttggtggtggagacttcaacgtaaggttcagtgaaaaaaagtcatctaatgacaaagattaatggaaaggagaaaaaaaccatgtaattttaagaagtgacatgaatcaaataaaaataatgaaagaaacaacttgcatttgaacaaactcgtatgtatttatgaaaatagcatgtctatataaacaatagccatgacatattgaaagatcttatgtaaaacaaaaatataatatgttaaacggaaagatattagtgcaatagattacacaaaattcgatacaaaaacttgagatatctacgacggtggaattccaatgaagagatagaagatgaaataacttggaatttagatagatctcatgaatttttgtaaaatagcatatcgaaagaaacaaaagtgtggcatattgaaagattgccaggtaaatagaaaaatacaagtacatggaaaacaattacacaaaatcgagaaaagtacaactcataaacaatagagatatcttcgatagtagagttccaagggagaaagatccaatctcacgaaaggagaaaaaaatcgattagaaggatctttaactattggagggagagagagagaatttgacaaactctatctttggatgaaaaagaatccataggtaaaagataagagaataatatttttaagtaatttcaaatacacattacctcataactagtttctatatgtattttggatccattgttagatcatataaatttcttaaaaaaaattactcccaagtcccaagtgatataaatctataacaattcaagtattcaaccattcatcccaaataaccaaaagcctcagtcccttgtaagttaacgggcttaaacatcagtctcaggcagtcaggcctcttgacattatctggaaatagttttcttttttctgtcgactattgagtgtcaaccatattatttggaaacataaccatacaagtataaaaaacaattactccgaagtccctagtgatataaattcacaacaattcaaccattcatcccaagtaaccaaaagcctcagtcccttgtaaggtgtaaacgggtttaaacatcagcctcaggctacaaccggatacgatgaacatgttgcaacacctgccaaaatcaaaggaaaaaaatcaatgggatagagaagaattaaccgaaccaaaccgattcgattttatttcttctatgctaacttaatgatctaaaccgaaatcaaagctggttaaaagaacttaccacacatgttctttcccatttccatcttgaagtagccattgtctccccattcacctccccatgagttctttataagccagtacgggacgtcgtcttcaactccataaccaactgctaacactgcatggtttacatcctgttgccaccaaaaaaacccggtttacttactaaacgttggtaattgtaatatttttgtggtttacagcagaaaagtactcaccattggagtgttaccacatgtattgctagtaaaaactcccttcttataaaacctgaattcatgtacaacctcaaacgccacactcactggccttaccaacccgaccgcgtgcttcagttcatcttctgcaccctataatgttttcatatattagagaatgtaaaatgtttgcagctaaagtgagatttcaattacaaactaggctttaccagggtaatgttgacagagtcacggacttgtacaccgatgtttttcgctgaaaatttgcagccaccgtcttttccggtgtaaggataagcctcctccgtgtcgagcccaccgttgtatttaatgtattcaaaggcttgagaaggaagtccaccatgacaaccaaagttattgaaagtaccagcacaatccacaagctgttgctcggacaaagatattccttttccaaatgcttgatggtaagctgcttcaagagctccagttgtgctgaagttagaattggatcatacatatcagtgatcttgcttacatggagaaatctcactgaaagaatcttatcatagactttacctaaatgtccaacaagatccacaatgtccctgttctttcacagggctaacaataccatcttctctccaatctttctgcagtttacaaagtataaggacttaaaccaaggatccaaaatttctatcttaagaagagctaaagatcaaagaacatgaaaggaatggttactgtgtctggaactgtagcttcagtgatcttgtggctaccctttaaagtagcagaacagttttgagcagctccaagcttgtatctttgaaactcttgccatgtcaagtcagcaaactctatagaacagaacaaattcaacttaaagttaaaacatctctctcactttcttgaactatgtgaattgagacaaagctcaaataaaacgttcttgaagtatgtgattaagacaagaaggcttaaagcaaagcattagagagtgaagacttacgattaagagagagtttataggataagcctttcttattagtggatctgattaaatcaagattctccttaaaaacagagaatcttaacttcatctcctccacactctgatacttcttcccataccttcaaaaaaccccaaatgtaaattttcacagttcaaaacaagtcaactgagaaatacagattgagaatttacctgtgagtgaagcgagaaaaggatagaacatgacgggactgtcctaggatctggacgacggtgtcttcaagctcatggagattgtcggagaccattttgattggattagattcatcgaatccgatctctttactcgccgccgccgcaaagagaatcaataggattgaggaagataggtttagtttcacagacatggcttctctctggttctttactctaacaaaagcttcgaagtcaagaagtagaagaagaagaagatgccagtttacacgtggtgagcttttattggttaaacttttggctttaataattggattactgacgtgtattgtgacgttgacatttataacggaacattgtttagttattactttatcgtgttggaaataggaatctgtgacaagataaattaaaataagggctaataaaaaataattttaccaaatatttctgttattttttggatcatttaatagtgaggtacatgttcagtggagaccatgaattttatatgttgtcaaatcttttgtgtgagagattttaggtgaatgatagagcccaaagccctcttgaccagcttttgctgttatttctttgcttgttcaaaacgtgctaaacattgatatgtgaatcaaataaataataaatcaataaaagataggaattttgtgtattcaacaaatgtattcaaaacgaatgacaaatagtaaacaatcataataaacccgatcagttaacccaaacaagcattatacattgagatacaaagttaggatttttagcttgcgaaacaagtaatataaatttttataaaatattctattggacttataataggaatccatataacaaacataatatgcataacaagtaataaccttctaatttaaaatttatatggcttcgacaattgccattcacacaagaaaataaattgtatagagtgaaaaggatagagaataaaagtatagagtaaacctagttgaaacactatataacaggggaactgggcagacaaccctatttctaaatacacactgagaagatttaaacaaattttaagaatttccgaaacaatttaaatggaaactcttctttttttttttttttaaacatcaaatggatgttttctaatttcaaaatttaaagtaaaatttatttttacgaaaataactttgttagaaaaaaaaaatagtttaattactacaagaaaatcgcctagtcaaatgaacaaagaaaaaaacaaatccactagataactaacaaaatcaaaatcaccattgatctctccaacaatacatacctctcttaacctttaacttcatatgatctcacatctctctcaacgttagactaaaaacaaaaaatggagatggagagtagaacctctggttctcgtggcatctctttctggtcaatcctattccactctctttggacaactattatcggaatcctcttcttccgtctcgcaaccaccaatggccacaagtccggtttcatccacttctttgccatttccggaacagtactcattaccttaccttggatcatccaacttctcatctccacgaccgtaatacttctgcataagaccaaaggttacaacctcatgtggattgttcagtcaccaacaatagccaaaaaagttgttgatcacactaaagctggtacttgttctgttacatcttctccttcctcaaattgtcaagttttgaaggaaagtgatgcagaagagattgcgattaggatcgtgattggcgctgctgatggtaaaagagagggttcctctccaggttctttaggcatgctcatggaaattgaaggaagaaataagactaaactgctcacaaatggatccacttgatccttatagtcatagtctttgctttttatttgtctctctttcattatgcactactctaaagacaataatattcattgttatctttggttctgttttcataagagccctgatttgttattacaacatgatccttattctcttttaatcacagacacaaaaaccatgtataaacaaaaaaaatatttagacatttctgctacatcttgagtgttacataaataaaaacttgtttacaacagaactgatagaaagtttaaacattaataaagaaatgtgaagcacattgtccaatgtcatcttccatcaccatatataatggtgtgagaaatgaacattgagttgttagcagaggaaggagaggctgatggtcctgaaactgatgaagtcactgaactagaagtaattgccaaggaaggtaaacccattaacaccggagttgaaactccgatcccgggagtatttggagagaactcaggcaatctttggtgtctgtttatgtattggaccacttgttccatgttaggtcttgcttctggtataatgcttgtacaaagcaaccctagcttcagaaccatttcaacttccccgggtacaaatttacctctcagtcttgtatccacagcattgactagagaaccttctctccagcattcacaaacccacttgaccaaatgtcgtttctcaaccggcatcgcaggatcaaatggtcttctcccacatgttacttcaagcatgaatgcaccaaatgcatacacatctgttctagtggaagttcctgttgacgttagctcgagcgccatgtagcctatggttcctacagctgcagttgcagagaggttagacccatgatcatcaaacctagccattccaaaatctcctaaaaacccttggagatttccatttaacatgacattagaagctttgatatctcggtgtaaaacaacttgactagctcctgtatgcaagtaacagagcgcagatgcgatatctctcaatattgatactctttgagaccaagaaagaggcggtttatcaccgtgaaataagtactgatcaacactacctccttccatgtacttagagaccagcaataactcgccttttcgcctacaatacccgagaagaggaaccagattcttgtgttgtaagcttcccattgtcacaacttcagccacaaactgtttcatcccttgctctgcatcgtgtgatagtctcttcacagctatatctcctagaataggcagagtacctttatacacttctccaaaacctcctcttccaagacgaccatctttgttaaaccctcttgttgctttatataaagatttgtatgaataacgaagtggaccatatggcttttcccatggctctctaacttctgcatacttttttcttctgtaaagataaaatcctcctaccaccaccattactatgatagcgagtataatcaatagcacaataagcagaggagatgttttctccggtttcttgggacgtggaaccgtgggaagtttagagatgtcaagactctgtagtaatgctctgtttctgctgaaactccatcctaagatgtattgataactaatcaatgaaccagtcgcagccgaaaaccctatgaatgcttttcgatccgggaagattgcggtgagattgatagttattgacaaaagaggcttacttggcttctgagttttaagaggtgctaaagtaacattgagtagagtatcttcataatcaatccatacctgaataggatctccactcaagagtttcaagcttttgttcttcccttctttatctgaataataagaagctgaagcagattccacagactggaggctgttttcgtctataccaacatggtttttgtctctatcatcaaactctgcgctttggaccgtatcaagctcaatagctaaaaggtgagaagaaggagaaccattagttgagatgttgaagagtcctaagtactgagttggatctgcttgtgtaagatccattgaagatgatagaacaaaagcaatcccgtgaccaccatcaactcctggcttagggacaagagcgcaaacgaaatgagtcgagaaagaaggagattgagatgaagcagaaccgaattcgaatggtcggttgaagaaagcatgacccttttgttgagtcgtggcgtttgttagctgcaaaagtccatcttgtaggaattttgcagaaccgtcaaggtttagattggtttggtcttggttaaagccattgtagatgaaacttaagtcttgttgacttgaaaaagaaataagattaacaaagcaaatcaagaagagaagaagaaggagatgcaatctttgagccattggtaatggtaaaaagaacacaaagacaagttttgtttaggttctgagtttcgaaaatcaaacaagttctggttataagggaacggcttcaaacgcaattttctacgttctaagtccacgaaaaatattccctgtatgtgacaaaagagttgacattggactttttgattatatataaccgtaataattactctaaaatactatttttcttcgttttaaaaaaaaatctgctaaaactccttgagaaaagtatatggtctactcgtcttttaagttttaacaatgacaagtcgggattaaattaaagcgaaataacctcaaagcaaaccattattggttttaaggcaagaagacaaagattttgaagaaggtgtggtgagttccgagtcaattggaagaggaagagtgggtaacgtgcttaagaagtatgcggtaaaagccctactttgtcaaacccatttcttgctttatacgaatgatgaattggtccactttaaagatgtatccaaatgatttctatttttttttaatagaaataaatgaatgatagtaacaattataaaaatgcagccgagaaaagcaagcaaatatgtgaaaataaagatcgtacaatttccaaatgaaatgttatcatctaggacattaatttggcctacgcattcaaatttcgatttggtttgattctagtttcggaatttagaactggtccacttaaaaatatcgaaatgatttgtacttaaaaaagaagaagcaagtagatgattgatacttgacccaaaaagagatgatttatagaatttatcaagcaatccacaacaaatgtcaatgtgaaaattaagatcattccaaagcaaaaacattcttatgtaaataataccaaaaactaactcttatgtcactaatgtcatttttttggagtagcttaaaatttaattttggataataattgcgtcgtttctacaaccgactaatttgtaaaaaaattataaggtttactacaaagataagttttcaaagtcgttactttcattttcttaaaacattgccaattcaaaagtaataaacaatataattactattgtttagtattcaagtttataaaatttgataaataatatatccaaacacgttttcttaataacactccaattttttcttaatgtataatactgtaaaactatttttaaaaatgtatataaaattatactacatatattttaaatttcttagaattgatccgtattttttgatttgcagacttaatggattggagtgttttactatatcgcttgtatttgtgaatcagtttattcattccggttggaccaaaacaaaagaaagaaatttcgagtcctgatcaacaatgccactgaaccggaaatttgaatccggcgtgccatcttttgatctgcatgccactcttgtagtggataatatctatttacctttaatgaattatatcaattaattttaaaagataaatcaaaaacaaaatccaaatcgaaatcgaagtaatcaattccgacccaacccaattaattccgacccaattcatttaattcgagccgacatttaattccgacgagataggcgatttccgattaacttccgacatcggcgattttcgacattggctccgtcgagtctggggagcctttgctaggtcagctaatccaattctccggccgtcgatttctccggtgctgcgtgctacgtgagtcgatactgttggatcgaattctttatcgatctttgctgcggctaatctggaaacgatccttctttagttcttccatctcctgtaagtattatagttagtacaatgtaattgaattgaatcaatgtgtaagcagcatcaaaccatggacgacctgaaattgaatcagacactgatacatctcgtggttcaactggtactaatatattgtttatatttgtaggaggcgatgaagaagaggatctagacgaacctacactttgactatggagggtaatatacagcagaccatgagtggagttgcaaaaattcaatatacggtatagtgtttaagacatcatctttggagagaataacatatgcggatttaatagataagatctgtagaaagattgctctaggtggtgagaaaaggaatctgaaattgagttacaagatatctaaagcatggagagagtcttatattgtagataatgaggatgtgttgatatatttaacgtcattggataaagagggatttagacctgttttgcatgtagagttatgcagtgatttggaaagtaataatagccaagttccaatagtagagcgaagaagttcatgcggtgtgaattttggggaattggctgccaatgttgtaatggttgcggatgcaaatacaggaattctgagtactaatgaacctattattgaactagaggaacagcgtgagacagttagtgaacctatgatgctagagaatggagtttctgaaactgttattgaaccgctgatgatagagtgtggggttaatgaagattctgataatgattatgttagggaagaatatgttcatctggcacgtccgatacaagaaagtgtggctgccgttgtcaaagaatgggaagatggtattggtgatttagtaggtcaagaatttcgttctaaggaggcagtatgggatttgattaatagagcttcgaaagaggaagtgtttggtgtgaaaactattaaatctgacacgggccgtcttatgttagaatgcagtcaagcatctaagggttgtgattggtatttaagagttacaaaaacttctgagacagatttttggtgtgtgaagaaacacacacaaatacataaatgctctcggtgtccggaggcaactagatatgaaaaacaaaaaggcacaccgcgattagtagcagatgtgttgcatgaggactatccgggtcttcttaatactccgaaacctaaacaaataatgagtattgttaaaggaagacttggtttggattgttcatactccacaactttaagaggaaaaaaaaaacatgttagtgatgtgagtgggagccctgaaactagctacaagttattgtttgcttatctgcacattttaaggtctgtgaatcatgggacaataacagaagtggaattggatgcagatgacaggtttaagttcctattcatcgctttgggcgcaagcattgaagggtttaaggcaatgaggaaagttatagtgatcgatgcaacttttctgaaaaccatatatggagggatgttagttattgcaacagctcaggatcctaatcatcatcattaccccattgcgtttggtgtaattgatagcgagaatcatgctagttggaactggtttttcagaaagttgaattccattataccggatgacccggaattggttttcataagggacatacatggaagcatcatcaagggagtcgcggatgtgttcccgaaggcatcacatggacattgtgtatggcatttgtctcaaaacattaagaaaatgctggcaggtgacaaagaagcaggtatggccaaatttatggaattagctcatatttatacagcgactgagttcaacattaggtatgcagaatttaggagaaagcatcctaaagtagccacctatctggatcgggcaattgggattgagaaatgggctaggtgctattttcagggagacaagtacaacatagatactagcaactccgcagagtctatgaacgcagtgttttcagaagtaaggaagtaccatctgttaccgatgatagatgcgattttggagaagttttctgagtggttcaacacacatcgcaaagattccgcgtctgcatcgaacacaaggcaagtggtgcctgttgtggagaatatattacacacgcgctgtccaattggtgcaaagctaaatgcaactgaactaaacagcttccgacaagaatacaacgtaattggaaatgatggtttttcttatttggtggacttggaaaggaatacttgttcttgcagagaatttgatatagacaagtacccgtgcgtccatgctatagctgcagccataaagcgatctaagatggatttgaatagccgttcaatcttaaatagccgttcaatcttgaatagcatattacagaacgatttatgtggtgcctcatcaggctcactggttctttcctcctgattatgtggagaaggtcgcaaaaccgccggattacactccaaaaaaaggaaggaatcaagaaacccggttcccatccacaggtgagaagcgccgaaagaagactaataacaaagctactcctggcatcaacttggagaggtggttgcagcctgaaaccaatgatgattgacgttaactcgtcaactagtacaagaagttcaactacgataaagtctttgtgtgtaaatttgtgtttctcggaattgtcaaatattgttcgacatgttcaattaagaacaatcctttgtttttaaatttgtgttttcggaattttgaagcatagttaagttttttagttcaacagaattgccaaacatagttcaacaggttcaactatgaaccagtcgttgtttggcaaacctagtacaacaggttcatctgggtcaactataaatacgggtggcatcccagtcaacgcgtcagttgaaataccaatcgtcgcgtcggttgacaggtggcactgcgagtaccaatcgtcgcgtcggttggaatattatttaagacaggattacaatcgattttacaccattcatatttcatcctatccaaaaaaagaacccaccccactaataaaggaagccgtcgtttgtcaacatggatggatatcattctgtttccgaactttgtccgactatcagtggatggattatttgcgttttcgttgtgaatgtgttcaagaagtttgtggcaccggatgagttcgaactgggcgtcatattggcagatcaaacggttatatattgcgaatatgtttaattttgtttctttcacataacttgcatgtatatagttaaaattatttggtgtagggtccccgttcccgaatcaaggctaccattcctcgtcgtcttgcgtcattttactttgatcgaatacgagaatatgagtatgagtggataattatcactaatttctcggtccgaaacgacgctgagtctgtgagagcaacatcccatgactaccagatatggtttatggaacagactattgttactaaagctttgaaaacggatgcactctcgttttggaattttactcctttcgagaacatcatagagaagacggttaacaagaatgtgttggtcggtgagttattttgacaattttatagtattttctttgagaaattgtacgaatacttacttctattattatacacaagatgtggtaggtgcgattatttggcagagccgagtgaccgaaggcatcgacggtgtgaagttttctctcaagatattgaatcagcagtaagttcaaatggttacttttttgggattagttcaaatggttcaaatgatatagtttaaacggttcacctatttttagttcacatggtgcacctattctagttcaaatagttcaaatgctatagttcacatggtgcacctactctagttcaaatggttcaaatgctatagttcacatggtgcacctactctagttcaaatggttcaaatggttatagttcacatggttcacttggtctattctgatggttcaagtgctatagttcaaatggttcagtagacctggttcagatggtcatgttcacaatttctgatcaagtaaataatttctatgaactgcagcaataaagttctctattgtgaagcacacaatcaacaagctttggactttcaagctcactttcggagtctttgtactccgagaattgtggttgtactcgtttgctggcgtgtgagcggtcatcctaaaccgaagcttgtgagtcatggccccgtgtcgaaggtgtttggtaatctggaaattccggaagttgatgaaatttataatgtagtattttagttgttgggtactttgtattattcgtataaacgaaggaatttgtagtttttgggtactttgtattattcgtataaacgaaggaatttgtagtttttgggtactttgtattagtttttgggtactttattattttaactaataaaacgttgttctatgtttcttttgtaattcccgaaatctgtaagcctagtacaacaggttcagcccgttcaactataatcacttagtaaaatgtgtttaacgattttataatatgtagaaacgtttgaagtttactactagctcaacaaaaaatctactattactattaaagtgtcattgataaatatttttttataaaaattgaaatcgtggtatgtgttcacataaacaacctcttatatgataaggagtagttactatgagatcacctcaaatgaagtaaattacgtgaatatggtcgtatatcaaatgtgattctgccaaaactttcaatatgcaaaataaatcacagttaggttgggttcgacatagttatcaagtatgtacattaaagttcagctgaaatatatgaaaacagtgaaaagtacatctatgtgtatgatagttcagctgtacaactatgtgtaaaattccaactgatgaacttgataattccagctggcataccgcataattccagctggcatactgtatatcaactcaaggaataaatgaaataaatgtctggatttatcaagtcaagttagattttggtgggtccatatgtttaaagtttttttttttaatggtagggttttgaggattttcatctatatttaatcatttacttgtgtgaaaaatcgaaaattcgagaaaaccctctgctgaagaagacggcggcgattctttagcggcgtcaagtattttccggcgacgagatttttccgacaaacgacgtcatttcttcacaaggttagatcttttctattaaagatatagggtttatgtggtgtattttagttcagatctagggtttataatagtcaagatctaggctttattttagtcaagatctagtgtttattttagtcaatatctagggtttagtcaagtatttgatagtttaatattttgtatttgacagacatgcctatctcttttaacggaagctctgactcctctcctagtgagaaatctgacggtttcgactactacaatgcaatacgggacgggaattggggcattccgactaagtgctactgtggaagagacgttgaaaagggtaatgtggttggtggcaatctccacgggaaaacaagattccgatgtccactaaatctgactgaggtggatggagaacacttgcagaagtggtgggaggaagccattgaagaggagttttcgaagtactatagtcggaaggacaagcgagaagaaggacctcctgcttggcaagttccgatgttcgagcccatccacgagaagatacgcattatgaatgaccggatcactgatcttgagacctaattattcaaggaactacgatcaatgaggagtgctattagtatcctccgagctagaggagggcgtggttctcgttgaaccatgtatgaaccatgtgaaccacgttgttttcattatgcaagtatttaattttgaaccatgtgaagcactttgttttaattaatgtatgaaccttctgaaccactttgttttaaatatgcaagtatttatgatttattacgatgtgcaaccaaaatatacagttgaacagggtaatgtgacgaaagatgaaccatttgaactaaactgtttcgaaccagatgaactatctctacacgcacaattcaccggaaaccacgggcttcgtcaaccccagatgacactgacactgaacttgaactcatcggagtagttagagaaggcactcacaaaaccctaaatcaattttggaattcgaatgtttcgatttagggattgattgaaatcgtttttgtcttttcaaattttgaattatgaattttgcataaagcggactctattttttgaaatttattggattttgtttttggtaatttataagcccattaaaaatggcaaaaggcccaaaaggaatacttattttagggatgctaaaacccctagtaaaaaaaggctcaagcccagcccattttcttaatcgttcggcgtgaaagttcagatgggacaggcgaagagtcacgtctattcaatttactcgtctgcttttaattttacacgaaaccagagaattcaagaaattgaaactattcactggtgaagttcatcatggagagtcctgatcatcgacagaccattcagagggtaagaacgtcggcgccttcctctctggcgtctgcgactccaacatcaccggattgttcttctccaccaccacctgagtggttagttgacatcgggtttatccgccgacatttgggggttccgcttcaccgtgtaatcccccttggagaagtggagccgacggtaccgtggatgaggtctcctttaccaggagatatggggccggattttgttccagccccaagagatttcgtcccaggtcaagttattcatcccggaaagttttttggtcaaacgaatctatccaatgagatgcatgacacatgtctaaggttcattcaaaaggtaaatgtaagaatagtgtttcgttgttgctcgtttggttaggtttagggtttaatgaaatttcaggtttagggtttagttgtgttgattgttggttatattaggtgaatcatatagtggtcgtatagttgtattgatggatattttgcgagaaattaacatttctattgttggacaggtggataatcaacaccaagcttatagaaggcgtcaccgccaactactcattaagttgcaagacctggagagaggtatgaggcggttggaggttcatccgaaagactgggtgagatacggtttcgacaaagttgctgacattccactgccactaaggaaatggtgtgttgagcacgatggatcgtcaccgaattggtcgtttttcacggagccagatcccattgaggaggacgatgaaccagatgatgcgacctcctcctacatgagagtggatgagcctccacgcgagtatcctcctgactctctctttcaataaacattatgcctttgttttgcttaagtttgtaagataaatctaaatctaaattgtggttttaaatctttattttgctaactatctatgttttgaatacaatgtatgaatctaaatgtttgaatataactatctgtgttttgaaaggaaattttgctaacaattatataatcagtcgaacggatgtttggtcgaaccatttggacttcttagtcgagccatttgggctttagtcgaactatctgaactatttgaactaatcagtcgaaccaaattgaaccatttgaacaaattagtcgaaccggataatcctagtgttgaactatctgaactatttgaactaatcagtcgaaccggatgaactatataggtcgaaccgtttgaactaaccagtcaaacacatttgaaccatttgaactaatcagtcgaaccaaattgaacacatttgaactaatcagtcgaaccggatgaactatattggtcgaaccgtttgaactaaccagtcgaacacatttgaaccatttgaactaattagtcgaaccagataatcctagtgttgaactatctgaactatttgaactaatcactcgaaccggatgaactatataggtcgaaccgtttgaactaatcagtcgaacacatttgaaccatttgaactaatcagtcgaaccaaattgaaccatttgaactaataagtcgaaccgactaatcctagtgttgaactatctgaactatttgaactactcagtcgaaccaaaataaacagttgaacctaaaagaccaattacaagccaaatgtttaaaaattcacaaaagtaaacatcattacaatgcaaatcaagccaaacgtttttaaataaaccaattgttccacaactaccagtaactggatcaatctgccttccgcattctcttacgcttcttatcatccgccacaaacggtgatgtaataaggcgggatgctccccttgttcgcttctttccggtttctattacaggtggcacctcctgcttcttcttgcccccgccattcttcttcgcttttcctttcacctctttctccgtcgtgtttgtctccttattacctgcatacattttaaaacaaaacctaagtcatatattcacatttttatacccaacagacattaattattatacttactgttttctgcaacctctggagaatgttcactgatcagtatatcccgttgttgcttgtttccggtggtcacataaccatctggcgaagcaaataacacgtcatcgtctcttgcatgcccatgttgacttgcctcctctgtttgcttcccatgttccctttccttcagatctgccacaaataacttaatagactgcactctcacatcaatggcatcaatcttatcttttgtttcatcaaagcctttggtcatcatctgcgtcagtgaggttatagatgccacaaactgtatctaaatcagggaatcgaggagggacagcagtctcggggacctcattctcaatctcatggacttcctcatccgaaatctcatttacaatacatcgagaagaaatgtccatctcacacattcctttccaccatatcctactgttctctactaatagtcgctctctccaactgtcaataacaatatctattggaccgcagtcatcatcaacatcatcgtctaagagatctttcaacagatatttctcatgataggcaggtaccaaaatgcttggaaaatcctgttaaaagaaattcatttagcaatcaatcaatcaatctcatgatagactagacacacaatcaagtaaatacagaaactctaaccttagtattcccaagctctttatatataacttccaacgggacacctttcatgctacattctttaaacttatgcttgcacatccttggacagtcactcaaagcggagcgtacatggactctaaatttcagtccaagctgtggaatagcctcataaggcagaatctacaaataacaaaacaatgttaatatcataaaacctgtacattacaccttatactcatataataatcataaattacttacctcaagaggcacaatgaatccactgaagcaaggttgagcttttggtttcacgaaaccattcatgttcttcatcattttccttattcctgccatacattccaaaaaggtgtaacggccccacggaaacgtctcgcacgcattcaaatcgccaacaatccttaacagaaactcttcaatgtttccatcattctttgcaccagcttttactaccttgaccaagaagtacaacagcactaacttcaacctatctgaaccatgcttcatcttcgagcacttagcaagaacatctacaacctttatcccagattcttttttaaatatcctcttcacaaagttaatattccccattgtattcatttcttttgggtaactgtggcaatcaaacccacttaacaacgcatgctctttaatggaatacctaataggtactccatttaccacaaaccaagcctcctcgagcaaactgtcttcactgtgcgcagcataagcacccacatgccttgcgtctggtggttaggctcctgaggcatgtggaatatatgctggaactgatcgtgtcttttgaaccatacagcttcttctttaaacttcctctctatcagttcaattgtctgcgtgacctggcacctactgcttatcttgcacactttgccgtattctgaaaaaggaaaatgcatggtctgttgcggcagtggctgagaatctaaatcatcatcctccaaaccatcattgccagcctcatcttcctctgtctctttaacagaaacctcatcatcctcggcctcataagtatcctgcaaattcaataaacattaaccaattgaagaattcatatgtaccaaactaacaattcaaatgtaccaattgaactagttccatcaaattacttaaatcaaacatgtgtcacagatgaactagttgaacatttctaactaatacgagaactaatactcaaacaaaacaaatgtgtgtcatagagattcaattgtatatacctgacgattaacgttttctaccccttcttttggaattgtattcaccatttcctcctcctccaactcctccccattcccgtctttcgcttcttcgaattgttgaatgacagcgtcaattagaggtttcaaagttgtccctgtctgatcctcttcaatttcggcggttcctttaggagaagcctcatcaccaacacgcggttcctccatagccttttcaatttcagcggttcctttaggagaagcctcatcaccatcacgcggttcctccatagccttttcaatttcagcgctttcttttgtagtatcattcgccgcaacatctcgtgctgctggttctgtcggacctgctggttcggtcggaaccaagtcggcggcatctccgtcgttctcaatttctgaagtaacttgttctgatgtcgaaacttcaccggacaacgacttctccgtcgaatcatatacagggccagcaataccgtctctaacacgagccatcaaactattagacgaatcaagaattcgtcgaaaaatcgcgaaaggcgagaaattatgaatttgattttggaaaatttgaattgaatgagagcagaaacggtttgattttaaaaattagggatttcgcttaagtttggaatgggttttaggtcgctgggcatggatcttaattggatcggatactttgttgggtcgtctgggtttttggtcttttgccaattatttgaattttctctcatttatttttaattcgacaaaaaataggaattagaagagtctggttactttttcgcagatagtggcattctctctatcggagctagtatagaacaagcaactgtatctcccgtggcaattttcttctccaatcacaagttgataaggttcgtaattcatatttaatttgagaaaattgcgacgtttgattaaatagcttgaatttaacaaaggattcttcgtattgaattttcagataaggttttcgacaatgagcctcaaagatcagaaagcaaaatttgagttcaaggtaaatacccaatcagatcgcaaattgattgactaataacaaaccatcatgaaatgtactaagtttcacaaaacatttgagtgttacagaaatataagtaactgaaataaaaacataactgatacaaaatttaaacattagagacaataagacagataaggtggtttggtactaagatctgaatcatgtacaacaaataaatgtgaagaaagttgttaaatttcatcttccatcaccatttaagatggtgtgagagatgaacattgagttgttggtagagggaggagagactaatggtactgatgctgatgaggttactgaagtggaagtgattgccaaaccaggtattcccattaccatcggagtggaaactccgattccgggagtatctggagagaaatcaggcaatgcttggtctctgtttatgtattgcatcactttttccatgttaggtcttgattctggtataatgcttgtacagagcaaaccgagcttcagaaccatttcgacttccccgagtgtaaatttatctctcaaccgtgtatctatagcgtcaactagagaatgtttcctccagcattcacaaacccatttgaccagatgtcgtttctctactggcatctcaggatcaaatggtctcctaccacatgttacttcaagcatgaatgcaccaaatgcatacacatcggtttttgtggaagttcctgttgatattaactccagagccatgtaacctatggttcctacagctgctgttgcagagaggttagctccatgatcatcaaacctagcacaaaatctcctaaaaaagcttgaaaattttcgtttaacatgacattagaagctttgatatctctgtgtaaaacaacttgactggctcctgtatgcaggtaacagagtgcagatgcaatatctctcagtattgcgagtctttgagaccaagagagaggtggtttatcgccattaaacaagtattgatcgacgctacctccttccatgtacttagagaccagcaataactcgccttttctcctgcaatacccgagaagaggtactaaattcttgtgctgtaagctccccattgtcacaacttcagccacaaactgtttcatgccttgctctgcattgtgtgatagtctcttcacagctatatctcctactagaggcagacttcctttatacacttctccaaaaccgccttttccaagacgtccgtctttgttaaacccttttgttgctttgtacaaagattcataggaataacgaagcggaccatattctttttcccatggctctctaacttctgcatacttctttcttctgtacagataatatcctccaagacccccgatcactacgagggtgagtataaccaaaagaacaataagcagaggagatctttttctcttctgttccgtgaaaagaggaactgtggaaagttcagagatgtcaaggctctttaataatcgtctgcttctgctgaaactccaccctaagatgtattggttactaatcgatgatccagttgcagccgaaaacccgacaaaagcttttcgatccgggaagattgcggtgaggttgatggttcttgacaaaagaggcttacttggtttctgatttcttagaggtgctaaagtaacattaagtagagtatcttcataatcgacccatacctgaataggatctccactcaagagtattaagcttatgtttttcccttctctgtcggaataataggaagctgaagcagaaacgacagattggattctgttttcgtctataccgacatggttgttatccatgtcatcagtctctgcgctttggaccgtatcaagctcgacagctaaaacgtgagaagaaggagatccgttagttgatctgttgaaaagtcctaagtaactacttgcatatgcttttttgagattatgtgcagatgatagcacaaaagcaatcccgtgaccaccataaaatcctggcttagggacaagagcgcaaacgaattgagtaaagaaggagagagactgagatgaagctgaaccgaaatcgaatggtcggttgaagaaggcatgacccttttgctgagtcgtgccatcggttagctgcaaaactctttctggagattggattcttgcaaagccatcaaggagaagttcatcaccagcttggtcttggttaaagccattgaagacgaaacttaagtcttgttgacttgaaaagcaaatcagattaactaagaagatcaagaggagaagaagaagataaaatctttgagccattggtattgaaaaaaccagagacaagcctcgtttattttctacgttccaagtccaatagaaatattctctccaggcaagaaagagttgacttagaacttcttaagatgtataacctgatcattactctcaaaataatagttttgtacgttttaacaatgtcaagtcggaactaaattaaagcgaaataccctcaaagcgtttaccaattaccattattggtttaagacaaccttgaaaagatagactctgcatctttttcaatatcgtttagctctaaaacagctatacaactttggagacgaaggtgtgttgagttccgaggtcatgtggaagagaagagaggataacgtgcttaagaagcatcccgttaaagaccctactttgtcaaacccatttcttgctctatgcacgaaccggttcacattaaatgatcgaactcacgaaatgatttgtacttttgttcttaacgaaaaataaatggatgattgatacgcaaaaaaggcaagcagattaatctcaaccctgacagaaacatgaggcagtgtagaaaagatcatggagtcagagtttttccagtgcctgattagcctccatagatcttctaagtcctttgatcctcttgagtataaagtgcccttatactctgtgatttaaaatttttggggtaaggtatgctttgtttacttaggaaataaagttcttttagttcaagatggtgtgtgatgagaaataacctttttggagcaaggttttatcactttttagttctaagtgttgcagtttgctgggtcaaaatttggagatttccatgaagtcctcaaaagttctactaatagtctatggtctactgataagatggtgagcgagaagctgtcatgacatatgcataagatcagattcgaaacttaggtttttcgtttttccgttcagcttttcacaattgctcccatgttcgaacttctcctttagtagatgaacattttgtacctttcgctttatttccttgcttgtaaagttaatgttttctctctttacttagtcttctttggtttgtaaagttatctacgtgtatcatttcttgtacttgtacatgcctctccaaaatggttctccatggatggatgatgggcttgttaatatatatatatcagtcactcttggaaaaaaaaaaaaactgtggctctatgtatgattgatcaactaaaatgggaagaacaaaaggaaaataagacacaaaaagaaagaaaaaaatgttgattgaaattgaaggagtaattttcaaagtcccaatgatacatgtctcaccattacaatagagaaacatttcattagtggcctccaaataaatttcttacacaatcttttttgttattaatgttaaaaaacacaaaaaaaaaaagagattaattatttgttttctttttatagtaactactagttaaattattttgtttcttaaagtaaactattcttaccttttttttgggactttgtgtctacaaaaagtagtgtaaaaaaaaaagaaacaaaaaaatcgaaaagtaattggaatataaatttgataacaaaagaccatatacataaaaacaactaaacaagtataacaaatccataaatacgaattaaaaatgaaagagttaattatagaaaactttccgatctctgaagcttcaacaccgtttgttcatccttgttctccgccgcattgtctctttccatgagagatcaatttcttcacaaagaagcttcttcttcttctactacattcctctcagcaccaatctctctttcgcatctcaattcgaaacgtgagtatttcctttttctccattctcgaatcgagcacaagtcgagtctcgcaacaacacttaacctagaattgatgattcggtatacaattttccggtgtgtatcgagctgattctctgatgtagaagccctaatttctgtgtatatttgatttgattctcttttgtgattgattgattatggcaatggtagagaagaatagttctgcgattggctatgtagctagaaatctgttactgagcttattcgtcgtcacgacgatcctctttgctctttcctgttactttgtgttacgttccactgctcataatcgcttccttagctctacatttccatctaaatcattcgtcgatgtaaggccggagaaagcgaattgtagatgtgttaaggacgagaaatcgtcggtaatcgcgggtcctttgaaggtttatatgtataatatggatccagagtttcattttggattgttagattggaagaagaaggaaggtagtgatagtagtgtatggcctgatattcagaagtatataccaccttatcctggaggtttgaatttgcagcatagtatcgagtattggcttacgttggatttgcttgcatcggagtatgagaatgcaccgagaagtgttgcggcgaagcgtgtttataattctagtgaagctgatgttatctttgtgccgtttttttcttcgttgagttataatcggttttcgaaagtgaatcctcatcagaaaactagtaggaataaggatttgcaagggaagttggttacgtttttgactgctcaagaggagtggaagaggagtggtggtagagatcatgttgttcttgctcatcatccgaatagtatgttagatgctagaaataagttgtttcctgcaatgtttatactttcggactttggaaggtatcctcctactgtggctaatgttgagaaagatgtcattgcgccgtataagcatgttattaaagcttatgaaaacgatacatcgggtttcgatagtagaccgattctgctttactttcagggtgctatctacaggaaagatgtgagttcttctgttaccttgctttagttccttgtgtttccttgtttgttctctaaatatggtttcctccaatgtgtcaaatatctcagggcgggtttgtgcgtcaggagttattctacctcttgcaagatgagaaagatgtgcatttctcgtttgggagtgtgagaaacggaggtataaacaaagcaagccaaggaatgcacaattccaagttctgtctcaatattgccggagacactccttcgtcaaaccgtctctttgacgccatagccagtcactgtgttcctgtcattatcagcgacgacattgagcttccttttgaggatgttattgattactctgagttctcggtgtttgttcgcacctctgatgcattgaaagagaacttcttggttaacttaatacgaggaataaccaaagaggaatggacacgaatgtggaatcgattaaaggaagtggagaaatattatgagttccattttccatcaaaggtagatgatgcggtgcagatgatatggcaagcgattgcccgtaaagttccgggtgttaaaatgaggattcataagtctagaaggtattctggatctgtttctgagaccgggaaagaatcaagatggtcttcattgatacctcggagtttctggtgaataaagatgagatttttttgtcttcattttcccagaggacatcaaattgtttttttgtttttgtttttgtgtagagataagtttatgttggatcaagatgatttgtcaactttttcccctaatcataggttatagatagagagacaagtcttcactctaatttgatttcttcttttcaccatagaaaaaaactaataatgttgtaagttgatttgttaaaattgttcattttgatctctctttttttttttaagttgttaagttgactttgtatagagagacttgtgtttccccaggtgttgccatttgccaaactgttttgtacttgaaggccgttttgattcaaaagccaaaaaactaaaaacttgtcagtttacaatgactagaagaactgttttatttgtcaattgatacctaaagaagtttgagtacaacatcaaccaacaacatagtcaatacattaagttaaaacatttacgtagctaaacagatttagatgcagagagtaaaagagtatagagtatagaatttcttagatcttatcttccatgcccgtccaagattgtgtgagtaacaaacatagaaactgatgagttccttacactggagaccccaatggcagataatgcttccatagaaactggcataaaagccccgatacctggagtagacggcgagaaaatcggtaagggtaagtcttggttaaggtattgcaccacttgttccatcgcaggccttgattctggcatagcatttgtgcagagtaacccaagtttcagaaccatctcgacttcctcgggtaagaattctactcccaatcttggatctctggtcttgaataagcaagcctctttccagcattcatagacccacttgaccaaatattgctttccgactggtagctcaggttccactggtcgcctgccacaaattacttcaagaagaaaagcaccaaaagcatacacatcggttttcatagacgtgcccattgttattagttcaggtgccatgtaacctatggttcccacagcggctgttgcagataagttggttccacggtcgtgaaacttggccattccaaaatcacctaacctcccgttgaactcggaatccaacatgacgttagaagcttttatatcccggtgcaaaacaacttgcttggttcctgtatgcaagtaactgagagctgaggcaatgtccttaagaatagaaattctttgataccatgaaggagatgggtttccctcatgaaacaagtactggtcaaggctaccgttgggcatgtactcagacaccaaaagtaactcacattttctcctgcaatacccgagaagaggaaccaagttccgatgttgtaaatttcccatggttacaacttctgccacaaactgtttcatcccttgctctgcatcgtgggatagtcttttcacagctatatgcctgcctccgggcaaagttcctttgtagacttctccaaacccacctttcccaacacgacaatctttacgaaacccatttgttgctttgtacagagacttataggagaatcggtgtgggccgtattccttttcccaccattcttttacttctgcatatttctttctcctgtaccaataaactcctccaagaaccatcaccacaggaatcactaataagatgaccaaaccaataagtaatggagataatttctttttttcctctttaggaagaggaacccgaggaagtgtagagaggttcaggctctgtaattgttcttttcttctactaaaactccatccaagtatataatggttactgagaagattccctgttgatgaagagaacccaacatacatcttctcttgaaagatttctgaaagattgatggctcttgatataagaggctgatttggcttcttgatttctataggggccagtgtaacatttagaaacgagccatcgtaatctacccagacctgtataggctccccactaagaagatttatgcttatattcttccccaaagcgttggaaaagtaagatggcagagcagattcaacagatattgggctgttcaaatcaataccaacatgaggcttctccagctcattaaactctactgtcttaacggtatcgagctcaatagctagcagatgtgaagaggaagtcccatttgttaagttgctgaagacccccaagtactgagttgcgtatgcatgagagagatcaatggaaggagatacaacaaagacaatcccatggccaccatcagctcccaacttaggaggcacaagcgcacacacaaaatgtgtatagaacgatagtgatgaagatggatcaaaatcaaacggcttcttgaagaaagcatgacccatttgcaactctgtagtatttgtcaactgcaaaagcccatcaggtagtattttggcgatcccatcaataaaaagatctgcttgctcgaagccattgtagacaaacccggtttcttgttgacttgacaggcaaatcagataaacgcaagagaagatcaaagccaaatatagtctacaagccattgctaaggaaggagagagactgaattctaagaaaataattattctttctggtaacaagcaatctctagagctaataaaacaaagtctagtaataacttagaggccaagaagtcaaactcaattttcaacgttccatatcctccacttttcctagcatttgctaaagaatgttgtcagccaatgcaattatattcccaaattggcatcaccaagttgacttcatgattaaataacaaaatatgaccttatcataccagattttttgcataatcttatccgtcatgtaaattaagtaaagccggagaaagatctaacggtttacactagttattctaaggtcatcaaattaaacactccatgataaccattatgcataatctaaaaccatcatgtaaatatgactgctacagaaacattttgtgctctactatggtttttccaaagctaactgaagaaaacaaaagcaagctaaatacttccctcttgcagaaatatttcatgtaactcccaaaggaatgtcaaaggccttggagtacaagatgtttatagcattcagaaagtcaagggttagatagataacacatatattcaacagggacaatcctaagcaaacacacttttcttggccaactttgataaattccaactaagttaatgtaacgttccaaggtaaagtgacatgtaaactaaatttgaatccagaggcaaaatctctataactaagatactaccaagaatatgattacaaaagtcacaatctttaactaattcagctcttaagaattccaattaaacaaaaacatgaaagagcatatacaagtctcacataaaacataccagtcatacctaaagttctaatccaataaattaacatcttttgaaactcgatcatcatccatttagctcaatatctataaaatcaaccaggataaaacttctagatcccaatacaagaacaagaccgttaaagtgttgtttcaagtttaaggaagagagatggtaacaaatcaatgcattcgaactggcgatggtcatgtcacatataccaacacaagaaatttttatacatgttataaactttcttggccttacagtcaaggaaattaatatcttctcacttaaaaactatacagaagacaagatcacttaaaaaaaacaacaactagcaatatagttaattccttaaaataaaatatttgggtagctagctatagagatttagatgcagaaatactgagtttcttagatctcatcttccatacccttccaagatcgagtgagtaacatgcattgatgaatctgggataccaatggtagatgatggttccactgaaactggcataaaacccccaatacctggagaatctgctgagaaatccggtaagggttgtttctggcttaggtattgcatcacttgtcccatgtcaggccttgattctggaacatcatttgtgcagagcaacccaagtttcaaaaccatttcgacttcctcggataagaattcccttcccaattttggatctctggtctcgagcaaagaagcctgtttccagcattcacaaacccacttgaccagatatttcttttgcactggtaactcgggttcaaatggtcgccttccacaagttacttcaagaaggaagataccgaaggcatacacatcagtttctttagaagttccagttcttattagctcaggtgccatgtaacctatggttcccacagcagctgttgcagataggttgccttgggggtcctgaaacttggccataccaaaatctcctaatcttccattatactcagaatctaacatgacattagaagcttttatatcccggtgcaaaacagctggattggctcctgaatgcaggtaattgagagccgaggcaatgtccttaagaatagaaattctttgcaaccatgatggagatgggttttggttataaaacaagtactggtcaagactaccgttggacatgtactcagagaccagtagtaactcaccttttctcctgcaatacccgaggagaggaaccaagttccgatgttgtatatttcccatggttacgacttctgccacaaactgtttcatcccttgctctgcatcatgggatagtcttttcacagctatatgcctgcctccgggcagagttcctttgtagacttttccaaacccacctttaccaacaagagcatctttgacaaacccatttgttgctttgtacagagacttgtaggaatatcggtgtgggccgtattccttttcccatgattcttttacttctgcatacttctttcttctgtaccaataaactcctccgagaaccatcagcacagggatcaccaataagatgaccaaaccaataagtagcggatgtaatttctttttttcctctctaggaacgggggcctgttcatttctaggaataggagcctgggggagtttagagaggtccagagactgcataaattctttgcttttactaaaactccacccgagtatatactggttactggtcaatctcccatttgatccagagaacccaatatacatcttatcttgaaaaatttctgacagattgatgtctcttgatataagaggccggtttggtttctgaatctctataggggccagtgtaacatttagcaacgatccatcataatcaatccacacctgaacaggctccccactcacgagatttatgcttatattcttccccaaggcgtcagaaaagtaagacgggagagcagactcaatagatatcgggttgttcacatcaatcccaacatgagccttttctagatcatgaaaatctactgtctcaacagtatcaagctcaatagctagcagatgagaagaggaagtcacatttgttgagctgttgaagacacccaagtactgagttggaaacgcgtgagagaaattcatggaaggagatacaacaaaggccataccgtggcctacctcagctccgaacttaggaggcaccagcgcgcatacaaaatgtgtatagaatgagagtgatgaagatggatcaaaaccaaagggctgcttgaaaaaagcatgaccaattttcaactgtgaagcatttgtcaactgcaaaagtccaccaggaaggatcatggcgatcccatcaataaaaagatcttcttgatggaagccattgtagacaaacccagtttcttgttgacctgacaagcaaatcagacaaacacaggagaagaacaaaaccagatgcagtctacaatccatatctaccaaaagagagaactttatgtgcagaaactttttctccggtaacaagcaatctatgaagctgctactgcaatacaaggtctattcacaacttcaggagaagatgtcaaacacaattttcaacttcaggagaagacgtcaaactcaacattttccgacctgttctcctttggaattgtagccatataacggtaaaatatattcccaacaggcataaactatgataataaatcatgacaaataccatcattttttgcataatctaatccatcatgtcaattaattactaccggaaaaacacttgatagtctactactatggttattccaaggtcaactgaaacagaaattaatcccgaaagactctcgaataccttggactacaggctggttctagcattcagactttacttagatattatatatgcaaaagtttaacgagtacttaaagtagtccccttaacttttcaacagagccaatgtctatagaaacagtaaacaaactttgcttggtgaaattgatgcaatccttgagaagtaatccacaaactttggatgagattttttcaacaaaattaaattcctttgccaataaagagaaacgaaaagtaagtagaatccagatgtactagtaaaaaaatcacaatctctggtccgatcaagtcatgccttatgaattccaataaacttaaacgcgaaatggcaaatgcaactctaacatagaacaaaccagtcccgatcaatttttttctccgactattcaaagtccttaaaccctaaaatttctctttgaacattccatcattatccaacaatgtgagacgtacataccttccaggataagagcttcgaggtctaaatctttggcgacgtttttctctgtcgccggttgaacaaagacggcaccgtcatcggaaacgatattccgggacggagagcttctaatttaggcacgtgtgtggttcacgcgttggaatatgtttagatgttgttttaattatttggcccatgttgaggtcagtattagtccaaagaagcccaaatgtattaaccgggtgaatcaaaccgattctatctgaaccaagtcaatagaaattgatttgaaaccgtttttatttggttaagggggtagttaacaatgtactacaaaagtttttacattcaaacttcaattcacaaaaacttttattttgtctatcaaatcaatcaaataaatttagcacaatattttcaattcaatttcatgcgattttattgaatcctaaatattattatattcattttattaccgcttaaaccacaaattttaaattgtagttctatattaattgaaaataaaagaaaactaaaccgaattc

SEQ ID NO: 1060 - DNA, 110980 bp, Arabidopsis thaliana
gaattcccttcccaattttggatctctggtctcgagcaaagaagcctgtttccagcattcacaaacccacttgaccagatatttcttttgcactggtaactcgggttcaaatggtcgccttccacaagttacttcaagaaggaagataccgaaggcatacacatcagtttctttagaagttccagttcttattagctcaggtgccatgtaacctatggttcccacagcagctgttgcagataggttgccttgggggtcctgaaacttggccataccaaaatctcctaatcttccattatactcagaatctaacatgacattagaagcttttatatcccggtgcaaaacagctggattggctcctgaatgcaggtaattgagagccgaggcaatgtccttaagaatagaaattctttgcaaccatgatggagatgggttttggttataaaacaagtactggtcaagactaccgttggacatgtactcagagaccagtagtaactcaccttttctcctgcaatacccgaggagaggaaccaagttccgatgttgtatatttcccatggttacgacttctgccacaaactgtttcatcccttgctctgcatcatgggatagtcttttcacagctatatgcctgcctccgggcagagttcctttgtagacttttccaaacccacctttaccaacaagagcatctttgacaaacccatttgttgctttgtacagagacttgtaggaatatcggtgtgggccgtattccttttcccatgattcttttacttctgcatacttctttcttctgtaccaataaactcctccgagaaccatcagcacagggatcaccaataagatgaccaaaccaataagtagcggatgtaatttctttttttcctctctaggaacgggggcctgttcatttctaggaataggagcctgggggagtttagagaggtccagagactgcataaattctttgcttttactaaaactccacccgagtatatactggttactggtcaatctcccatttgatccagagaacccaatatacatcttatcttgaaaaatttctgacagattgatgtctcttgatataagaggccggtttggtttctgaatctctataggggccagtgtaacatttagcaacgatccatcataatcaatccacacctgaacaggctccccactcacgagatttatgcttatattcttccccaaggcgtcagaaaagtaagacgggagagcagactcaatagatatcgggttgttcacatcaatcccaacatgagccttttctagatcatgaaaatctactgtctcaacagtatcaagctcaatagctagcagatgagaagaggaagtcacatttgttgagctgttgaagacacccaagtactgagttggaaacgcgtgagagaaattcatggaaggagatacaacaaaggccataccgtggcctacctcagctccgaacttaggaggcaccagcgcgcatacaaaatgtgtatagaatgagagtgatgaagatggatcaaaaccaaagggctgcttgaaaaaagcatgaccaattttcaactgtgaagcatttgtcaactgcaaaagtccaccaggaaggatcatggcgatcccatcaataaaaagatcttcttgatggaagccattgtagacaaacccagtttcttgttgacctgacaagcaaatcagacaaacacaggagaagaacaaaaccagatgcagtctacaatccatatctaccaaaagagagaactttatgtgcagaaactttttctccggtaacaagcaatctatgaagctgctactgcaatacaaggtctattcacaacttcaggagaagatgtcaaacacaattttcaacttcaggagaagacgtcaaactcaacattttccgacctgttctcctttggaattgtagccatataacggtaaaatatattcccaacaggcataaactatgataataaatcatgacaaataccatcattttttgcataatctaatccatcatgtcaattaattactaccggaaaaacacttgatagtctactactatggttattccaaggtcaactgaaacagaaattaatcccgaaagactctcgaataccttggactacaggctggttctagcattcagactttacttagatattatatatgcaaaagtttaacgagtacttaaagtagtccccttaacttttcaacagagccaatgtctatagaaacagtaaacaaactttgcttggtgaaattgatgcaatccttgagaagtaatccacaaactttggatgagattttttcaacaaaattaaattcctttgccaataaagagaaacgaaaagtaagtagaatccagatgtactagtaaaaaaatcacaatctctggtccgatcaagtcatgccttatgaattccaataaacttaaacgcgaaatggcaaatgcaactctaacatagaacaaaccagtcccgatcaatttttttctccgactattcaaagtccttaaaccctaaaatttctctttgaacattccatcattatccaacaatgtgagacgtacataccttccaggataagagcttcgaggtctaaatctttggcgacgtttttctctgtcgccggttgaacaaagacggcaccgtcatcggaaacgatattccgggacggagagcttctaatttaggcacgtgtgtggttcacgcgttggaatatgtttagatgttgttttaattatttggcccatgttgaggtcagtattagtccaaagaagcccaaatgtattaaccgggtgaatcaaaccgattctatctgaaccaagtcaatagaaattgatttgaaaccgtttttatttggttaagggggtagttaacaatgtactacaaaagtttttacattcaaacttcaattcacaaaaacttttattttgtctatcaaatcaatcaaataaatttagcacaatattttcaattcaatttcatgcgattttattgaatcctaaatattattatattcattttattaccgcttaaaccacaaattttaaattgtagttctatattaattgaaaataaaagaaaactaaaccgaattcttttggcaacaatagtaataaataattacccgaacactaaaagtaaaacagtgaaatataacaaagaaacctgaaacattgacaagttaaatgatacattttttagagaatgaactacttcaataagatccttcagctcttaaattccaatggttgttcatgatcctttgagttattggctgaagaagaagaggccgaaggagctgaccagttcctcgaagtaaatgagacggtaagtgaggctgcatcgacaactacaggagtaaacgagccgattccaagtgtatatggtgagaaatccggcaatggtaagttcccacttaagtaaagaaccacttgtcccattgctggtctagattctggcacaatgtttgtacatagcagcccgagtttcataaccaactcgacttcctcgggtacaaattcttctcccaatcttggatctttagcatcaagcaaagaatctttcttccagcattcacaaacccatttgatcagaaatcgtttctcaacttgcaccccgaattccacaggtttcctcccacaggctacttcaagcaagaaaacaccgaaagcatatacatcggttatagtggaagctcccattgttattagctcaggtgccatgtaccctacagtgccaaccgctgctgttgtggctgcattgcctccatggtcatgaaacctagccataccaaaatctcctaacctaccgttcaactcagcatctaacataacgttggaagctttgatatctcggtgcagaacaacttgttcagcttctgtatggagatagaagagagctgaggctatacccttgagaatcacaaatctttgggaccaagaaagaaccggactttgatcatcaaacaagtgttggtcaagactaccattaggcatgtactcggaaaccagtaaaagctcgccttttctcctgcaatacccgagaagtggaacgagattcctgtgtttcagacttttcatgctcacgacttcagccacaaattgcttcatcccttgttcgccatcatgggacactctcttcacagctacagttttgttcaaagggagatctcctctgtacacttctccaaaacctcctcttccaagaaatctatccttgtggaaacctttagttgctatgtataaggatttgtaagagaaccggtgtgtaccatatttcttttcccatggttcacttacttctgcatacttcttcttcctgtggtaataaactcctgcaagaacagccattactacgatagcaagtataacaggcagagcgataatcagcgcaaattgtactttcttatgctcagctctaggccgtggaacttgaggaagttttgagaagtcaagtaactgagataattctctgtttgtgctgaaactccacccaagaagataatggtaactgattgatgtccctgttgctgcagcgaagccaacaaacaatcttctcctcgagaagatttctgagagattcatggatcgtgacaaaagaggcaaacttggcttctcagcttcaagaggcgccacagaaacattaagtacatttccatggtaatcaacccagacctgtataggttttccacttgagaggtttatgctcacattcttctgtgctgtcttggaaaagtaagaagccggtgctgattcgactgaaatgggattgttcacatcaatcccaatgtgattattgtttgtctcacgaaaatctggattcctaacagtgtcgagctcaacagcaaacaggtgagaagagggagatccatttgttgatgcgttgaatatccccatgtaccgagttggttgcgcccgtgtgaaatccacagtaggagatatcacaaaggtaatgccgtgaccgccttcaaatcccggcttaggcaccagagcacagacgaaatgtgttgaaaatgagagtggtttagaggagctgaagtcaattggcttcttgatgaaagcatgacccatttgatgctgggagtcttttgcaagctgtagtaatccattgggaagcaatgtagcagacccatcaagagcaagatttgattgaccaaagccgttgaagacaaaactggtatcttttgatgaagttgagaaagagataagatgaaaagaggagatcaaccagattagaaacaatcctttagacattgctgctgatgaaacagagagctctgtctagctgcagagaaaagagaaataaatatgattataagaatcacacaatgtaatagcatcatctgcatacatatctgtcttgactgcaacagcttgataatattatataaatcatctgaactacacgtggttctcaaattttttaattcagatactagtttaacaaaactaatccaaatttcgttcaaaaaaactaaggaaagtgctagaagcgtactaacaagcagtaaacgttgttaaattaatcattacatgtgtcttggattcagtacccaaaatctttcaccggatttttctcatacttcacctacttatacagataattagtaagaaaacatctattgttaaacataccagatctgaagcattccttgagccattgctgctacgaataagagagtttattgttctttgtgcaagatctttttcctctctgatcaagcttagctggctgcagaaaacaaattatgaacttatgataatggtaatcacagcctaacagcatcatagtcatttacttttcattttctttacaaacaggactatcacaagtttgtaatattatattaatcaagaatcacttcatgttgtagatattttaatccagacattactttaacataaattatcccagcatcagttaataacaaaggcaactgctaaacaaacagaaaagaaaatactcaaaagtaaaaggcatcaaaagcctagggaaagccaaagcacccaccttttatagaatattgaagtagctagatagaatcaagttcaggcaagtcaaatagagaaattgcagtcttaatttcataatgtgataagaatactacaaataaaatacagaccacatttctcacactagtatatttaagtctatatcgtcctatttactttttattcacacagaatcgcatctgaaacatcgataaaaatttcctgaagaagcaatagcaagttcttccataattcccaagtaaacggtacccccaaacagtaaaagaacatagaagacacaaaacttgatgatcacatgtttgagactagctacatatattcttaaatcctttagaaacagaaagttatgataaactttgaggaaatcaactctctattacctcagaccatagctgaatatgttacggatataaaaacataagtgtagtcctttaacaatttcaagaataaacctctaaactttacctgtcatggggtgaaacaaccaaccatctctaattctattatcagttggatcacaaacttgatgatgctctcttgtgatcccaatcagctccactgacgaaactggcctcatttcaactattcaagaaaaccagtggaatataagaaaacagatgaagatttaatgtgaacagttaagaaaacttcatcacaaacaagcatgaaattcatagcaacgacgttagcaacaaaacctgaactccaggacttgtagatggaacaaaagtccgaacaagatgggatatatgctcacttgacaaaggattcaaaggagtctccgcagatggaaggtcattgcatcattcaagccaagaaatatcaaaaatacagatacagatagtgcatgaaaccatcacactgaaaccgacccaccgcagatggaaggtcattgcatcattcaagccaagaaccaaaacactggtttctgctaatctggggcttgatcatacaaattattttttgtcgtacagagaagtaacagaatgagatcaaattagcagacagagtgaagaacaactaataaacatatgaacaaaagccttatttattggaaaatgcaataaactaatgaagaaagagatatgcagatagtacggttacataatagagtaaagtgtaaagaaacatcaaaatttacaaagcttaacatcatttctacaaaagactccaaacactacttttcagtgctggatgtctttgagaaatatcaaaaatagacttcacaaggagagcacaatgccaaactaaagtaccttcacacaagcctagcatggcttttcctcattccgaaaaaaaaatctaagagaagaggagcaaagttgtcaaagtttaccgtccatccccatggataattgagtgagtgacaaatgtggaatcgttggctgaggaagaagtgtaaaaggtcttggtactgggggagacaggggggtttgatccgataatcagcggggtaaaggacccgataccaggagaatttggagatatatcaggcagctctaagcttccgtttaagtattgaacaatatcttccatagaaggtctcaggtctggcacaccatttgtgcaaagcaaccctagtttcagtaccatttcaacttcctcagctgagatttcacctctcattcttggatctcttgctcctagcaaagaagccattttccaacattcgcagacccacttaactatataccatctttcagctgacaacccaggttccacaggtctcctcccacatgttacttcaagtaaaaaggcaccaaagccatacacatccgtggcagtgcaagctcccactgtagcaagctctggtgccatgtagccaatggttcccacagcagcagttgtagcagggtctttcccatgatcatgaaaccttgccataccaaagtcccctaaccttccattaaattcggtgtctaacataacgttagaggccttgatatcccggtggagaacaacttggggagctcctgtatgcatgtaattgagagctgtagctatatctttaatgattaaaagtcttcgacgccatgaaaatggcggtttttcgtcattgaataagtattggtcaaggctaccattgggcatgtattcagataccagaagtaactcaccttttcttctacaatacccaagaagtggaaccatattcttgtgcttcagattacccatgctcacgatttcagccacaaactgcttcatcccttcctctgcatcatgggacactcttttcactgctatttgtcctttggaaggcagagttcctttgtacacttttccaaaacctccctttccaagaagtccatccttgttaaacccattcgttgcaatgtacagatctttataagaaaaacggtgtgggccatattctttttcccattcttctcttatttctgcatatttccttcttctgtagacataagctgctccaagagccaaaaacactatgattgccagtaaaatgagtagaacaataaggaccactgatggtcccttatttttagctctatgacgaggaactcgaggaagtttagtgacatcaagggtctgcaatgacaccttgtttctgcttaaactccacccgagtatgtattggtagctgatcaatgtccctgttgctccagagaacccaagaaagaactttctatctggaaatgtttctgaaaggttgatggatcttgacaaaagaggccggcttggcttctgaattttaagaggggccagcgtaacattaagtacattccctccatagtccacccaaacttgaataggatctccactcaaaagctttatgcttttgttctccccatctatctcggaaaagtaagcagccggagtagatgcgatagacataaggctgttgacatcaattcctacatgattggcatcaatgtcatcaaactcagcgctgagggcagtgtctagctcaacagcaactagatgagaagaaggggatccttgagtcgagatgttaaaaagtcccaagaactgtgttgcatctgcctgtgtgagatccatggaagcagataaaacaaaggcaataccgtgaccaccaataaatcctggcttaggcaccagcgcacacacaaaatgtgttgagaaagagaatgatctaggtgacttgaactcaaaaggcttcttgaagaaggcatgtcccattttctgtccggaaccatcggtcaactgcaacagtccgttgggaagaattttggctaccccatcagtataaagatctgcttgaccaaagccattaaagataaactctgtctcttgttgacttgagatgcaaatcagatgaagacagaagatcacccagatcagatgcaatccttgagccatttctgacaaaacagagaatctgactattctgaacgaatcttgttttctgcaccaatggtggataataatgtatccagctgcaaaacacagtcaggtcaaaacttctcagtatataatataaagtccaatctttttcattgccaagtcaatcataatttcaatacatttccacccattgaattcgtccagagcaatgaaaacaatttatgtctgagcatttcaaagttgacttaggaaatgtaatggtattattattatcagaaaacaattgcatattctaacccatcaaatattttaaacaaaccaagtcctaaaatagtaaactaaacggtggctataatatgagacttgtctatcattccctggttccagaatattctccactactcccatcccatatcatcaacaacacaccccactatcctgaagacaaaatctttagttataaaagtatgtttactagctttattaaatacttgaactgttcttaactccaattataaacaaattatttccaaattccaacagagaaaacaatttaaggtccaagaaaacgattaacagttatctattgtctaggcaaatgcaccaaaattattaaaatattcatcataccaagctgaatccaaaggcaagtccatcatgttctcaccaaatatgaacactgctaacaagtccatgttcccaccaaagcctcctaaagtaaacttggctgacatcctcttcttcagcattgttacctatgattttgaaaggaaaagccatcaataagacatgattatcaggcagaaatcgaacggacaatatgctgcagtggcaaatcccaaagagttgaccttgaacaacaagagacatacatcacattatctgccttttgggaacagatcgatcaatatagccctatcaactcattacaatttctagctaggaattgctcaacacactgcaattgaggcatgggggaaacagatgcagcgtcatctatgcctagagatttagcgacagtggtggacatactacactgaagcttctagggtttctcaattgcgcaaacttgaaagaagggaaacacagaaagtcacagagacaagtagtgcaaaagagctgtataaagtggaataaatattcttatgttacagcttcatatctgagttttatacatatcgacatatcggttgaactcaaaaggattgcagagagattgagaaagaatcccacaaatagttatcccattgttcttgagagttgattcattttcgattcttcctctcctttcttcttctttctcttctcgtctctatcggagttcctctgtttacttctctgaaacctctttttctgacaagtccatccttgttataccatttcctttccagatagacaataactgctccaagagccaaatacattatgattgtcggtaaaacgaatgcctgtacaagcaaggccgtaacacaatcacaaacaaatcctgccttagacgccagtgcacacacaaattgtgttgggaaagagagtaatcgagttgaaccgaactcacaagggttcttgaagaaggtatgacccattttcactctggatccatcggtcaacttcaacaatcctttggcaactccatggcctgtttcaccaaaacgtttatagataaaccccgtttcctgttgacttgagaagccaatcagatgaacacagaaaatcatccagatcagatgcaattctcgagccatttctgaagaaacagagagtctgattattctgaaagaaactgtctttcacaccaatggtcgatgaaattttctccagctgcaaaaaaggtcaggtcaaaactttttcactatataatacaacatccaatattttttcaatgtcaaatccaccataatttattaacttttcttgtatccattgaatttgtctaagagcaatgaaaacatcttatctttgagcatttcagagttgacttgagaaatgtaatgacatgcaacatttacatatactaagccatcacatattttaaacataacagctcctaaaatactaaactaaaatagatataaaaaaactgagacttctataacattccctggttcaaagaatattttccactatcatcaagaacaaacccacaatactaaaatcagaatctctagttaaataagtatatatctactagtttcttctcaactccaatatatcttcaggtattaagcaaatacatcctaacaaagaaacaattcataatccaaattaggtagacacagaaacttgtaaaaatattcataccaagctgaatacaaagtcaagtccaccatgttcacgccaagtactcgtctttggcatttgatacctatgatttgcagctcccgtgttctcatcaacaccaaacaatgattttgaacgaaaaaaggccatcaatcagacagaaattgaacggacaagatactgtagtggcgaatcagaaaaagtttacttgaacaacaggagatgtgcatcaacatttgcctgcatttctcagatgaatcataattcaagctcaagctaagctttcttctctcccttcccatggctcagaaaatcatatcctcaatttagaaaatcacaatgaaatcaagccgatgggagaaagcacagtgtcgccatgagccgcctctgagaaagaaaactgcgaaatcatctcggccgacagatcttgcgacggagatcagatggtaatgcccataaaggaatcgttatcgacgtaaagcgacgccgttttggaagtacacgttttactctttatttcaatttgttttttggttcaactctcgtgttattttattattaccttaattaatctaccagtttacttttcatctaattatactaaatcaacagtcacttttcccaaaactgcaagtctctccttttgccatgtatgcttaagtctaaaattttggtctttcacattcgtaaaacaattcactgccttctactattatttttcaatcgcacttgatgatatccttcacgtaaatcaatcttagagaagacaacagaccctcccagttcatccattagatcttcaataagaggaattggaaacctatctttcacagtcattccattgagttcccgataatcaacacataaacgccaagatccatccttctttttgactagcaccaccggtgaagcataaggactagaacttacttgaactgtaccactttgtaacatctcttcaaccaacttgtcaatctcattcttctggtgaatagagtaccgatagggtcgttgattaacgggattagagccctccaacaactcaattttgtggtcatgttgagtccgaaatggaggcaattcagttggttcagcaaaaatatcagggaagtctttgacaagctcctctatctccgtatcatcaccctccgtctttgctactgcattcacagaacaactcaatccctgttccaacaactcttcttctgctggcacttcacgaacatacaacaaagcaatctgaacttgatcatcatccaactttcttaatttctgtgctttcacatctcggacagaaccttcacgaattccacgtaatagcaccttctggttattgtacttaaacttcatttccaactccttaaactcccatgaaatgcggcccaaagtttccaaccattgtactcccaacaccatatcaataccttgtagtggaattagtaaaatatcagactgaaatgttgtagtctgcagattccaagtgaacttagaaatcttgccatccacattaatttttctcccatctgcaacagaaactctagttaaacctgcatattcaatcgcacaaccaagtttagcagccacagcagagtcaataaaattgtgagttgaccctgaatcaatcaaaataaacacaggcttcttcccatatgttcccctgacccgcattgttcgataaccagcaactcctgaaactgcattaactgaaatctgaggttcctcttcattgtacaaaacttcctcagcatccttgtattcatcatcaacatcgatactaaaaagctgagttttcttatgaaccaaatagtgttccggtgtaaacttctcatcacaaaaataacaaagccccttagcacgcctatcactcatctcttgctgtgttaatttctttgtattttgaggtttaaaagacaccttgttgccataattctcacctttctgatccacgtcacgcgaagtcttagaaacacccgtagtaacccctgctttagattgccaatttgtagaaaaagttttcttaggatgagccttttcatacaaacgtcccaaacgcaaacaatcacgcactattctcggctgaaacatcttcacatgcatttgtgtatccaaacgtaaacccgccaaatacacacacaccaaataatcttcaaacaaattcactctcatcttaatattctcaaacttctgatgacattccacaattccatctgtctcttgcaattttttcagctctgccattggatcatcatcatcttcatcaaatctgtctttcaacaatttcacatattcaggccaatcaaacataacatccaaacccacaccagactgaataaacgtgtatggaagccattttaaccttcaaatcctcaggagtaaaatcaacaccaaaaaattcttcaaccttaaacagccattcattgattctgcttccatcaaacctgggaaaatcgattttgcctaatctagtaagacctccacaataaggatttggttcaagtcttaccggttcagctcgatactccctctgatgatcagatccaccggatcttgccatcgttgatgttgatgaccttggtaagctccgatctaacacctcatcctcatccataaccttcttcgctgtcgatctgctcatcgcacccatcatatcagcaatctgcttcaacatcgccttatgttgctcagcgaccaactcttccaacctcgacatgcgtgaggcaatcggatcttccctctcaacacctttccctttcaaatcctcttcctgcgatctcgtagtcaccatctttgccgagaaacgacacagctttgatacctttaatacagtaaagtcaccgatgctcaccggactcttcacttctccgatcaacgaacaaatatgtaacctcactccgatgttcctgaaacacgaaaatgataaagcgttaactctcgagacgagagaaacttagctcatgaattgtttttgggttttttagatttttacaaatgattctcgatgatgatggaaatgatctgctcatgactcatatagctcctaacggccttctcacatctgcccgttataagcttccacgcgtcacttccagatctttcttatttgccacttgattccacacgtgccaactcacacgtgcgatggttctgcaacaacaatacttgaaatcgacaaaattaaacggatctccaattgtataaattcgagaacgttactctccccaaacaaaccatcattggacatagacgagccacacgatctcaatctcacgctcatatttcacgtgattccacgccacctgctcacgccgttttcttctcagacaacaatggagttctattagtttcaactagttacatatatatagagttcaatcaatgttgttacaagtttacagtggctccatcgttgaaggcttaattacagctgcagggaatcgtcggttcgacactaggttgtgtccgattttcttcttaactttaatttttaaaacgacgtcgttttgaactgttaacggaaagttgactccgttatttttctgttaacggaaatttcacggcatgccttaaatgaccaagtcaacgaaacttagacattttttaagaagttaactcaaactttgaggtttaaatgacatttcgaaagttcatgcttttttcgtcccaaatttgaaagtttgcgcattttccgacatttttcccattattacgtaactataaattttagcatttttatatttgacattaataaattgaaaaatccagttaaatattataaacaatttagaaaaaagatcctttatacttgatcaatcatttgaaagcctaaatttttaacctgtttcgaatatgaaacctgtttcgagaattcaaaggttctcagggttagggaacttaagggcttccagtgcactggatttaatggcaaggcctttccttttgaagtttaacctttcaatctcatcccggaaataaaaagctagccgatgcataccctaatcgatgtttgagcgttttactgagaaagcaattaaggtcataacgttggctcaagaggaagctcggagacttggctataacttttttgggactgagcatatactgctaagtctaattggggaagggactgggatcgctgcaaaggttcttaaatccatggggatcaatcttaaagatgcacgtgtggaagtggaaaagataattgggagaggcagtggatttgttgtagtggagattccatttactcctcgcaaagcgtgtgctggatttgtcactagaggaagctcgacaactcggtaaagatctttcgctatttattattatttaggctcggagcttgttatgtgttgtacaaggcataaggttacttgactcttgttgctattgttgatcctagggcataactacattggttcagagcaccttttgcttggtctacttcgtgaaggggagggtattgcagttcgtgtcttggagatattgggtgcagatcctagtaatatccggacacaagtaaatgcaccaattcttgttaatgttatgtcttagtaaacaatttcttgattacagtttgagatacatatatcattttcaggttatacgtatggtcgagggaaacaatgaagtcacaacaagcgttggtggcggaagtaatggaaacagcaacatggcaagttggcaacactagaagagtatgggactaattaacttaactaaactagcagaagaggtaataaatatatgtactcatcttgaagagagtgtcatgttaatgcttgaagttttatgctgaattttggttttttactttctatggtagggtaaactggatccggttgttggaaggcagccacagataaaacgagtggtccagatcttggctcgaagaacctgcaggaacaacgcgtgtcttattggaaagcctggagttgggaagagagcaatagcggaaggaattgcacagcgaattgctagtggtgatgttcctgaaacaatcaaggggaagatggtaaatattttcccattggatcattttgtaatgaatttgagaggcttagctagagtgcaaaaatgtgtatatatgttttaagtaatttacttttactttttatgacggtcaagacttcatctcattctttctttccttgagaatgtggcagggaattggtgtgattatattgatgaatgcgcaattaaaaaaatattacttctacttttttatcaggttataacatttgatatgggtcttctagtggctggaacgaaatccggtggagaagccgagggaaaattgaagaagtttatgggcaaagtgatgacataattctgtttattgatgaaatgcacttgctcatcggtgcaggagccgttgaaggtgcgatagatgctgctaacatcttaaaaccagctctagaaagatgtgaattgcaggtaaattttataaattctttttatatctaatgatgtcaaatttttcaattcatagaactggaaactcaatttttaccaaatgtttttttatttgggtacggttgtagtgtatgagtacaggaagcacattgagaatgatcctgcattggagagacggttccagcctgtgaaggtacctgaaccaactgtagaagaagctatacagatcactactgttttagctaaaggcaaagaagtgaacaaagccgataatgaagccgaggaaggaagacctactgttacggaagccgataatgaagctgagtaagtgttactgaattgagtcgcatatgattcatatttgtacttaaatctctttttttgtatggatattgattgctcagtaaccatagagtcatagagaatttcccacaaaaaaaaacgagatttggttagtgttcaatgagatatgagtgtcaaattttatttatatttgatcaacgaaacatgttttaaagaaaccctaaaaacctagctcccataccaaaatcataagagataagtagctctccactgtttgcctcctgtctcaagattctatcgtcctactctattcttagtcgtctccatgtatttccgctagaggaacggaataacaaggtttcctctatacggtttcttagacctaaataaaaacagccctagccctagctggttcactcagaggtcacacaaatcattcaccaacatatatatttctatggttttagccaaaaaaagaaaaagaaaaaagatgagtatatggtgagtcacacaacttaatcaaacattaatgtagttgtatctaaaaaaatcaggtgtgtaagagcaagtccattgggggaaccttatgagtttcttaaaagaatcctaaagaaaacaaaccaaaaaataaagcagaattgagatattaagcaaggtgcgcaccttgcattaggtgttttttggtctgtaaggtacgcttacgtggcatgattccattggattactaaacaaaacaattttctctttttcatgtttttttctttctgtcgcaaatctctttctcttctcacaatctcttcatcatctctgagccttagtgtatcaagtttctctctatctctcttgcgatttctctctctcgcattgcgttcttctcgttgtctctctttgtctatttgtatctttgtctctctctgtctctctttgtgtctctgtgattgtttcaatcactttctctaagaaagtgtaattgcaatgagaagacgaatttgttcatgggtttactccacagtggttactttctttgttgaattcatatgaagctttgtgacgattggattttgtgatcatatttgctatgaggtaaattagttccaatttgaatgattagaagtgctttggtactattaccaggtttatgaattaatagttgagtgtttttgaagaatctagagcttgtaattgttgatgccaaccacgtgtttgatgaaatgcctcaccggatcaatagctatttatgaaaagtaaattcatgttatgataagttggttttggttttgtgtgttgcttttcttcatgcgtttcctttggaggatcacataaaaatctgcatcttgtagttcttttatgagttcctgcagtatttgtggaacaaaatttagtcatctttcatagggctttattgtaaaagctgggaaatcattttgtttatatgctttgtgattagaagaaggatatttcaatgtttatactaattgaacgattatatgtgatgtctgaaactggttattgttttgcaggcaaggaaaggatgttgtgattgacattaaaaacggattggtagcaggaatctaaaacagggccttacttgcagaggtaaaatgacaactatccatggtactgatgataatatattcgaggcattgaggtaattgatgtttggttatttgttactgaacaaacagggccttacttgcagaggtatgaaaaagagtttctctacatgctatatgtaaaggtgatcccatggggtgatctagactcactcgccatgcttcaaagacaactcggcgttgacatactcgtaacaggccataccactagtttggttttgtatcacttatctttgttaccactattttggttttgtatcatttttgtttgacaccacaaaacaatattcacacaagtacttttcttgcaattctactatataattatctctataaaatcatatattcatatgaaacctatcttatttctctacttaatttcactcttctttgttccaatcttctttttcactaccagaaacccaataaccaatcttattttttaataaaagaaactcaagaaacaatcttctttaaagccaaaccccaagaaattctacttcatccaaaattatgttgctacaaaatttttttctttaagaaacccacttaagaattccaccattggacaataaaatttttaaggattcaacaaaaactctaaaactcttatttactcaaagtttagtattaaaaaattataaggagtccttaattaggactccccaatgggggtgcttactacaagtcttgcgtgcatgtagatgttctcaagttgttgaataagttgttgttccttggtttccactcattgcttctgacacaatatttgacataaaactatatttgatgataatacttcgttggtaagaggattagattctgatttgttagaaattttgaaattatccttggtttagaaatgtgtgtgatatgagaataaagaactagaatgtaatgtgcagagaaaagtaatagagattagaaggtgataacttattcacaagaaatattaattaacattgaagaaattattaaaaaattaatagatttaaggtaatattttaacatatacattattatttaaatgcatatgaatttcacaaaagaaaagaaaatatctaattcaaaataactgtgaactaaagattgaactccacgatttaacgtataatgtgcttctgatgcggcatacgagattatactaatctatatatacatttttgcagccattttagcaaataaatcctggacttggacttatttacaatctaatgcaattagcattaaatcttttttccaaaataattcattttactttaaattttttatttaaattgtcaatcacattatcaatcaaatttaatcccactaaacttcaaatcaatcccttaaaattagcataaacatatttgttaacaatattttaaaacaaagttttttgttaaataaatattattcttactaaacgttttttgtttaaataaataaattttgtatttgaacttatttacaatgtcatgtcactgatattaattatttattaatgaaaatatttaattaaagatttaaatcttctaaatccttgcttttagagttattatgtcattaccttataagcaaaaatattaattctttaaatattattatttatatatttaaaatttataaaacattattaatatttaaacttataaaaagtttgatatattacaattttttaacatcattatataatatatagagtttaaaaaaattttaattttttccgtcatattttatgattcaaaattttaaaaaatgaatatatattaatcaattagcaaaaaatgtgtgggtgcaacgttccgcatcgacaaaaatatttagacaatgatttataaacatatcataaataagatcaatattaatataaataaatggtttttttacgggacgggtttggcgggatgggtttggcaggacgttacttaataacaattgtaaactataaaataaaaatatattataaatagatacaatttgcaaaaaaaaagttatacgaactttaaaaagataaattgttaccgcggtgtaccgcgggataaaatctagtctctatagatattcagagcaataattgtattcaacagtaaactaatctatactatataaaaagaaaatccaaaacctcagaaattaaatcttaaaattgtcaaatttaacaaagcaatataataagaaagatatggaaaagagaattcaaaacacctattaatctatgtgtttggattaaacacgacgactaattgaccacataatcattgaatgaaaaataaagaaaaaaacgagaaccaacacagccgccaccatttggttatgatgacggcaacctccaagcttccattgagctccacatgtgtagcaaaatgaataaccacacctatacatcaaccataaacattacaatgttaaatacccgagaacataatcaaattccaacatgatttatatttataatcacagttaatagctatagaatgtgattaatgataatacctgcaatatacattgatggttttatgcgacagtttgatcatgtgttggcactttttacattgacgcgatattgttttaggatttcgacccaacgtcttgtattccttgcatgacaagtcactatgccacagaactttgcagttaatgcaaaaggctttgcggcatttaaagcagcatctcctaactccatcttcagtagactcaacgagctcggttttcgacatcaaagcccaacaccttggatttgggcaatgaaatctgtcacatacagggatgaactcctctttgatcctatgttcccacatctcttctagtttaggtgtcaaaagatgggaacagcttttaagagataggattgatttgcagccatcatgaggacatctcggaacatctccctcgattagtctcacttctatatgttgtttcatccactctacaccgaattgatgacggcataaagcaacagaaaacatcagttcatgttcgatattaacctcaccgcaagccttctgctcggtaggaggcgtacgtatgcttattgattcctttgcaagcttaaacgcaaacttggcttgattttcagtcacagtaacaggaatgctagatgtcagttctcgccttatgcattgcacatcatccattagcaaggcgatgttctctttctcaggcgctaatctgcccatgacctaacacattcaaggtaaaacatcaataacaaaaataagcaaagggatatgtgaacctgaacagccaagaaagcttaccaattcatataactctaaacgatcacagcagattgagatatgattgattcccaaactcacggcttcggttaatcctcgcttcaatgccataagctcagcctccaaaactgtaactgtggagtcatgaagtgatcctttcatctgaaacaagagatattcatcctcttctctgaaaattgcaacctcaaatcccgccgataattgagctgatgttttctcccttaccaaacccttaaagtaaaggttgtatgtgtcagaatgaaagtcgcccggtgagggttttccggtggggtttcggccatagtctctttccagggttccttctttctccatgaatctgttgcacatacttgaagatttgtttttcgtagggggcctaaggtttaatgactcgacacatacaattctaggttttatagattatatatcagaagcggctcctagctcgttcgtgtgattaaactaattaactttataattaaaagggaactaagagaaattaaaaaagaaagagccctatgcaaaaaaaagaaaattaaacttttatcaaattaaggaatattttttcatatatatcaaaaaagtaaattaaaattaaaaaacctaaacaaaaacgatagggaaaagtaatgttatcggaaaagtagtactattaaaaaaaaaaaaaagtatttttgttgatctctagacctcataagatacaaagaattgagaaaagagtgtttcataacaactatggatattcagcatatacgaccagtccaccatgagcatacaaatcatcccaatcatcttcattcaccatcataaaaataaccttggccagtacgtggacaaccagtaggacaagtcacttgacccttcttccattcaactccacatttgtagcaaaattgatacccacatctacaaaggccacaacgacattacaataaaacataaacgttttgtctctagttatgtcttaattgagttaaatatgtattatatgtacctgcaagtcatgtggttgcacccttggttaagctcaatcaagtgtcgacacttgacacattggcgccatttttgatcgtttgctagaagctttagcgtcaagtcatcaagtacagggtcagggtgaagtttcttgtactcagcacacgataaatcagaatgccatggtactttacaatcaatgcaaacgagtccagaacatttgatacatgcacggtcattggatttattagaccgagaaatctcggttttggacatcaatgttgaacagtttatatatgggcaatagattctctttgctaaaggaatggactcttctttcatcatgtgtttccatagctcaatcaccttaggtttcaaaaccttgaaacagttttcaagacttagttttaacttgcattcatagtcaagacatgtaggcacagttccgtttcgcagtttcacttctactaactgattaacacaaggatagcaatgacggtgaagacatttatccattacgaacatgcgatcggccttggtttcttccagacaaatgacacaagtttctcccttcatctctgaggccctactggtttgagaaacaattgcctctcttgcaagtttaaaatcaaacttgatattgttttgagaaaccagaatagctttactagaatcaaatttttggctaagaagttggacttgttccaatagttgttggacaactcgttcctgctttggattacatttactatttgttatctgcattgaaaaatcagattcattcttgttaaaccaaatcagatatataaattatttctcgcaagaattacaagccagcaattaattcacaacaatctaattaatggcaaaacataagagagaatataatttgtttagttaagaagtacgtataactgaactgctctgcttttttttttttgtataagaaactattttcatttaaaaaactgcaactaatttagggtctcatgaataatttaaagtgcatattatgtcacactgcactaaggacgtttaacttctccatttttgtcttttcatcttgacaaatatttatgtttcattcaatgtatgaaaatgttgtaagttttaaagaaactgattcatttaagtacgcccaacggattctcgatagtttctcgttataatgttattattattttttttttttaaagtatacagtagtagtttttccttgatatccttatttttaaaagggtgatttgcagatatatcactttttcattaaataattaactaactaacaccataaatttataaatgtagtaaataacctttaaggggtgtgaaaagacatcactggcctggtgttacgtttgtcagcgaggaaggagaatgtttagtgtgagctgacgtgactttattattggtgttgaggtgagaaaaaaaatcaggtggtaggagagaagtcctttttctctttcttttttctttaccccttcccaattgtaattcatattatctaatcttaaaaaaaataattcaagttcatgatatatcaattaaaaagttgtatagttttctacatatatcatgacttaaattttcaaggcagacacaaaataatttagatgtgaatagtgttgtcaatgaataacataaccttttatatagatacacaatattttttgatggaaagatattaaaccctaagggataatatatagggaacccaatggtttaaatctaaaccaataattaaatcacttaacatccttaattaaaagaaataattcattttaaaacgtatatagaacaaggtatacggaaatagtatatttacaaatagaatagtatctctcaaattgcaacaacaaaactcaatttcatcaccaagacaccaagcgcaataacgaaagtcgactctctgaatccaaattgtgttccttcctctgtaattcgaaacccccagatcaaatctcacccaaaagtaattaagagactctgatttgaaaacaaaaataagtaacgatgtagctgtaaggactttactggggagaaagagagagggggagggaaaaagaaagagagagaaagagagagggggagagggagaaagagagaggagagagagaacggaagagagaggtacacagaaagagagatgagagaaatagatagaaaggtgaatttggaattaatatacaaaatatagaggatatcagttttttttttttttatgatagtttcttaattataaactttttgttggttagttttgccaatttccctttttaaaattccctttttggtttttgacttcgttgtttttttagacttttaaaatatgcctaagaaatagttaaataattaatcatccgaatatcaagtataaccgaaaacgtagcatacgattagaaaagatcttaaaactcttagaattaaaaataaaaaagagataaaaagtgtttcaaaacaacaactattaatctatgtgttaatcaaaacacatagactaaacaccataccaatccatctaaatagtcacggggagaacaaacacaaccacaaccctagctaagtacttaaacattatcagctgtacttaactatgagcataaaactaacaactaaaagacttacgaaagcaagaaaaatgaggactattgctacccaatccatcacctcttggagatgatgagagcaacaacctccaagcttccattgagctccacatgcatagcaaaacttatagccacacctacacatcaaccacgaacattacagtagccgaaaacataatccaattccaaagaggattcggaaatcataatgactatagaatgtgattatagataatacctgcaagttacaggcatgcgttcttccgatagttttatcttgtgtaggcaacttctacattgacgccacactgttgtaataggctcacgaccggaactcttgtgttccttgcacgacaagttactatgccacggaactttgcagttaatacaaaagtgtttgcggcatttatagcaacatctcctaactccatcttcttcagtagattcagtgagctccgtcttcgacatcaaagcccagcaccttggatttgggcaatgaaatctgtcacatacaggaattgactcctctttgatccttttttcccacatctctctttgtttaggtgtcaaaagatggtcacagcttctaagagttaggtttgatgtgcagccatcatgaggacatctcggtaaacctccctcgtttagactgacttctatatgttccttcatgcactccacacagaagtaatgactgcataaatcagcggaaaacatgttctcacctttgataccatcgttaaaacagttaccacaagtcttcttctgaggcctaggtatgctgatgttagaaactagtgtttcctttgcaagtttatacacaaacttaatttcattactagccacaagaaaagggatgctagatgaaaattgttgtcttatgcgttgcacctcatccattatcaaggcgattttcttatccttaggcacagatctccccatgacctaattattcaaggcaaaacatcgattacgatattgaagctaacgcatgtgaacctaaatgaacagccaagaaaacttaccaattcaaaaatctcaggattatcaaagaacattgagatatgattgatccgaaaactcacggctttggttagtcctagcttcaatgccataagctcagcctcccaagctgtaaagtcggggtaatgaagtgaaacttttttcttaaacaagatactatcatcctcttctctgtaaattgcaaccccaaatcccgccaatgaacccttgaagtaaaggttgtacgagtcagaacttgaaccgtcaggtgagggttttccagtggggtttggggccatcttctcgtactttttgtgcaaactctaagattatttagtgttaaggtaggttttatgactcgtagaactctcttaaacaaatcttatatgataagttaaggataactattgaaacaagaaacgagagagaaatggaaacttaaagcatatctacttgtttagatactctcacgaatatctcaacaaaacataatattttaagaattttaattatttaattaaatttaaattagtgagggaaaaaaaactaattactaagataaatgtgaaaaaacccataatatcctatataagatataaatgaaaaatgtgaaatggggttcttaataagattattacggaccttttattaagcctaaccaaatgtgaaatggggttattataagtaatttcggggattggcaactatttgtttctcttgaataaatcaatacgtattttaccaatcattaggactctcgtctcacttatgtttttaattaaaattttggataaattaacaataagacatgagttcttgatttttttccaaatacaaagctccacaaatcaaaagaatcagagactataattagagatagaatatcaaatgagagtaaacatcatgggacacaaacaaggcaagagatcagcggctagacttttcgagagagaagcaatttttataggattttcttaatcttgttttacttttttttttgtaagttaacaacataacattattctgtcaacaatattcattaatttaataggtttagaaatgtaaaccggaagtgaaaacgtttacaaatctgatgtcataaatcataaagctagagtttcaggctaaagaatgagcttgtattagtgttttcacgctcgactcggactgtccggtccgaccggttgaaccatgacccaaacactttttttgtttgggtttagttctaaaacccgaaaaatttaaaaccaaaaaaatccacaaaaactcaccattaacccataacctggtgaaccggttgaatcggtcggtgtgggttttaaaatattttctttattttggaataaaatatgggattttagattttattcaatcatttttagaaattttttcagttcataaactcatttgatgttttagattttgatgaagacttcacaatgccgccttaataaatgaatcgaatggtgagtgagacacgcaatattagttatgtgaattcaccatgttttattagtttattttcgtcattggtgatatcctactatatttgttacggtattagacatttagttggattttaaaaatttaatcactttattttattgtttgattacatatatataaaatatatttttatttttttggtgtaaatgattttatattttattaaacataatctgattttatattttataaacatgatatgattattttaaattaataagaactctaaaaactctatcatctctattaatattaaatttattaaataaattttaatcagttgacccgtggttcaacctagttgacccgatgatccagtaacacagaagatagccctgtaatcagtgttttcacgcccaacccgaaccgtccggtccgaccggttaacccgtgacccgaacacttttccggtttgggtttagtgctaaaacccaacaagttcaaaaccgaaaaaacccacaaaaactcgcaattaacccgtgacccggtgaaccggttgaaccggccgggtgtgggttttaaaaagttctcttgattttacaataaaatatgggattttagactttattcaattatttttaaaagttttttcagttcttaaattcatttgatgttttagattttgttgaacactttaaaataccgccttaaaattgaatcgaatggtgagagagacaaccgagattagttgtttgaattcacgatgttttattaatttatttctgtcattgatgatctcctaatatatttgttacggtgttagacatttagttggatttcaaatttttaaccactttattattattgtttgattttttctatatatatatatatatatatatatatttgggtgtaaatgattttatattttgttaaacataatataattttatatttgattaaatatgatatgattatttttgttttatatttataatactaattttgttttttataaaatactctaaaatttctattaatattaaatttattaaataaattttaactaattaacctatggtccaacccggttgacctgatgacccggtgacccagaaggtagtccggttcatcgtccgggtcgggtttaaaaacattgcctgtaattaaatgttgtggaataggagaaaagtaaaaaaaaaaaggttgacatttttgtaaaatgtgcaaaatgaaacttaaattaatcgaataacaatatagaaaatccaaagaaagaaaattcaaaacaactttgaaatctatgtattaatccaaacacagagactaaagactataaaattcaatgtaatcggcatcgtaattgggcttagtgggaggatcaggtaaacaccaatcacaaccacaaccgtaagcccaaggattatcatcttcatcgtcattattgtcaccatcatgtccatcatcatcggcactggttgtttgagaaacaattgcttctcttgcaagttcaaaggcaaacttaatgtcgttttcggctaccagaattgcttcgctagaagcaaatttctccctaaggcgttgaacttcttttataagttgtttgacaacttttatctgcttaggtttacatttaccacttgttatctgcattgcaaatcagattcagttttgtttaaccaaaacatcacaatgaaaccgtcgtcacaaaacaagatatgatatagataaaagtgccaaaatattcacgaaaaaagttataccaaagtaaagtaaacacttacgttttggtaaagctcattgtcatcacaatagatcacgatctttctgatccctaagtcgagtgattcacttaacccacgaatcaaagccctaaccttaactccttcaacgtcactcactgattccttcatctcaaacaacaactcatccatctgatcacaaatggcaaccccaaatccagccgccacattatccgtactcaccaaccccttagagtacaatctgtggacgacgtcgtccaaaacttttgccgctgaagattgagtttcgacgaccttaatagaaccctcaccttcaaggtttggtgtatattccatctaccctccgtttcttcgaaatcgtgcctacttcatctctatccatgactgttttatctttagttcccaagatttatgggaatgttaatgagtgaatatatataggaaaaaggagagaatattgtagccgtgcttgagaagctgataatatattatccgaaattagtaatatttgcaaccgtttttggttagtattgattggttttcttcttttttttccgaagatttacatatattttctacagattctcattactttgctatttatttctgcatttatgatgctacaaatctcatataaattccagacgacaaataaaaaaaatgagaagaaaaataacaagttattttgacgacctgataatttattacataacgctttcatatagaatcgttgaagaaaaaactaaaaaaggtgtttttttttattattcatttggaattgtgtgacatatgcattaagcaaaatagaaaatttagcaacatgaacaaccaacaaacaggttattttattatcctaacaagaaggaaagaattattaaaatgagaacaaaaactaaaatagtatacgtttatgcatcattgctcgatgagagcaacctccttgcttccattctgctctgcatgtgtagcaaaacgaatagccacacctatccagcaaccaagaaaatcaaatgtgaactagttacgcatgcaaaaacataatcaaattctaaaagaattataatagcatagaatgtgtttctataagttacctgcaagttactttgatgcatccttctgaaagttcggtcatgtgttggcactttccacattgacgccacattttctgatttgccaaatctttaaatattctatcattttctgtaggagttggatgcaatctcttgtactcattggctcattgcatgacaagttattatgtcatggaactttgcagttgatgcataagggttcaccacattccatacaataacatcttctaacttcagcttctctattccatttagagagctcggttttcgacattaaagcatagcaacttggttttgggcaataaactctgtcccacataggaattgtgtcttctttgatctttcgttcccacatctcttagtttaggtgtcaaaagatgggcacagcttccaagagtcaggttcgatttgcagccataatgaggacatctcggcacacgtccctcaagtatcttcacctgctaggaggatccacagatatgcttaactcagaaactattgtcgcccttgctagttcagaaacatatctgatactacttccctccacaaaaatcgtaaagctagacttaaatccttctcttattcgttgcacatcattaattagtagggaaatattgttctcatctgtcacgaatcttctcgaatatgacatttattcaataggacgagataattttagtatttcatattaaaaaacaaaaataaagaaagaaaaataattcctactcatatacatattactatgttagcttcaatgcattaacataggaaacagggaaattcctatgactataacaaaaaattagccccaaaaaaacacttactaattcgtaaacgggataataatcacaataaatcgagatatgatcgatccccaaacccgcagcttctattagtcctcgctttaatgccataagttcagcctccaaaacagtaatatccgagccatgaattggtgcattcagctgaaataagatatcatctctatgcccgcaaattgcaaccccaaatccagccaatgagtcatcgccaaccaaacctttgaagtaaaggctgcacaactgaggactaatgctcgagcgagtaaatcccttgagcatcttgtcctctgcttaccgcaaaagtaatatgattcattcatgtatatggtgaggatccaaaataatcaggggaaattatcttggtatagatttttaataatttatcttaacattaaaattagtaaagaaaaataaactagttaaaattatctcgaaaataaaggcaaggttctatcacactcaaatctttttgtttttttataacaaattttcttgttgggaactaactgcgtgacattcataattttgaataaggttgtggttttttttctttcttttttttttttgtaatatttggtaaattaacggtttgtggattctcattcccctatgggtcttggttttaacaagtgaataaaaaccataattataaattttggctagaaaaccacaatttctcgattgatggagattaatctatctatctatctaattatttttagtctcaccataatttaattttagtatcaagctttgctggattaatataatagacaattaaaaaaaagtaaatgtgatcagaacaaagaattttcttcggtattttacttttggagaacatcaataaagaaaacatcatcaagtgatgagctatagacatagatttcaaagacggcaaataagaattagaattcactataagaaaaacataatttcttaagaatgaagatagaataagaataactagatacaaaaagcctcacaagcaaaagaggatccacaagtaatatttaaacccaaaaaaataagcagaaaaaggctaaagtatgcattctcctccaccattccgtgacggtgaaggcaaccttcaaccgttgagactaaaaataattttaaaagaacacaggacaaggagtctgggggagattagaccagcagcaacaacaaaggatttattcaaacattaggatttaagatcaagctatatatgattggaaaaaaaaaaaaaaaaactgaaatccaactgaaaaccttaaagaattttagttttgggacaatattcgttaactcaaataaaccacaaccataacccctagatatgtacttaaccattaatctacttaaccatgcgctcagtagttagtaaataataaacctaaggaaaaaaagagaaatgaggacaatgaagaccatagaaacgtccaccagtttcatcaccaattggcgatgatgagagcaacctccaagcttccattgggttccgcatgcatagcaaaacgtatagccacacctacacatcaaactatgaacattacagtagccgaattctaaaaaagattcagaaatcatatataataactatagaatgtgattagagataatacctgcaagttacattgatgcgttcttccgatggttttatattgtgttggcaacttctacattgtcgccacactgttgtagtagccttgttacccttcatcttgtattccttgcaagacaagttactatgccacgaaacattgcagtcaatgcaaaagggtttacggcatttagagcaacatctcctaactccatcgtcagtggattcagtaagctcggtcttcgacatcaaagcccagcactttggatttgggcaatgaaatctgttacatacaggaattgactcctctttgatcctttgttcccacatctctctttgtttaggtgtcaaaagatggtcacaacttctaagagttagggctgatttgcagccatgacgcggacatctaggtacacctccctcgtttagactcacttctatacgttgtttcatgcactccacacagaagtaatgactgcataaagcagcggaaaacatctcctgaccttcgatatcatccacaaagcaaattccacaagtcttcttctgagtagtacgaggcataggtctgatgttgcgagaaactagtgtttcctttgcaagcttatacgtaaaattcgcttgctttcctgtaacaagaatagggatgctaaatgtaaattgttgtctgatgcggtggacgtcatccattagcaaggcaaatttctcatggtgaggcacagatctctccataacctaatcatccaaggcaaagaatcaatcagtttaagatattgaagcaaagacatgtgaaccttagcagccaagaaaacttacaaattcaaaaatctcaggatcacaacagcaaattgtgatatgtttgtgtaaggatttgcccactcaaaacgtcgacttttcttgagaacaaaccaaacacaacaccacaagcaagaaaacctctctgttggacagagtgttgagacagaacacacaacaagacccgaactttaaagagaaacacagaaagtgcaagaacacaaacagagaacacaaagcaagtttggtaacccagttcacatcaacagatgctacgtctgggccgagactgtgctcggaatccactaaattagagatagtgtttacaagaagaattacaagtgaccactcgatacccttcactagtactcgagttcactctgtatcactctcctagacctaagaaactctgttacaagcttatgataataacaagtctctcaatatctcttagccgcctttgttctcacaactctctcaataacctagagcacctcttttatactgaatacaactagggctcccttgtgctgacgcggacactgttgcaccatggaaacgccaaaggtactgtcttgaaaccgcgtctgttaaagcactccaacagctagcaccacatacagacaaaacttgtcttctacagctgaaggcggcaattttccttttgctggttcactatgaatgtggtcccaagctaacttaaccagggtttgatttacttcacctgggttaagctccaacggatctttgctttaaacatttgtaaccttccttgagcttcaagtcatcatattcttcacaaatctccacctgatgacatgaggatcaaaggtaacaacacacacaatactttagagagagttaacaaaacctgatttagtttcccggattccagtctcggcttccttgagtctctactcagactttacccgtaaaaagtccaatgcagtttggaacttgtttacaggtagaactttcgtgaagatatcagctggattcttctcagtagatatctttgacacttccacttttccatcagctatgatttcccggataaagtgaaacttgacatcaatgtgcttggttctttcatgatgcacattgttcttggagagtgcaatagcactctgtgaatcacagaagatctccacattcttctgctcataaccaaaatcttttagaagacctttcaaccagatagcttctttcactgcttctgtaagggacatgtattcacactctgtagatgactgtgcaactactctctgcagtccagacttccaacttatagtgttgccacccaaagtaaacaccagacccgtgatagatcttctcttgtctagatcagctgcgtagtctgcatcacaataaccacagatactgaagtctgaatttctcttgtaacacaaccttgtgtccacagttcctttaatgtacctcagaacccacttcacccctaaccagtgttcttttgcaggctggctcatgaatctgctaacaacgcctacaggataggccaagtcaggacgggtgcctatcatggcatacatgatgcttcctacagcgctcgagtatgggactgagttcatatactcttcttctgtgcttagcttctcttcagttgcagatttcatcttcaagtgagctcccagtggagtcaatgctggttttgattccagcatgttgaatgtcttgagtactttgttcaagtagctctcttgagacagccacagaacacctgcttctcgatctatgatgatttctataccaaggatcttcttagctgcgcctagatccttcatttcaaacttaatactcagctctttcttcaatgcgtctatggcttgcatgttgtttgccgccacaagcatatcatccacatagaacaataaatacatcgtggaatcatcagacagtttcttagtataagcacaactatcataatcacttctcttgaaaccaatttcagtcatgtaatgattaaacttttcattccactgtctaggtgcttgcttaagaccgtacaaagacttgttcagaagacatacctcattctctttgaataaggattcacatccttcaggcggcatcatgtagatcttctctttcaattccccatggagaaacgctgtcttgacgtccagttgctccaattcaagattttcttgagccacgattgaaaggaggattcggattgaaacatgtttcacaaccggtgcaaagatctcatgatagtccacgccttctctttgagcataccctttggcaacaagtcttgccttgaaccttggttcttcaactcctggaataccttgcttatacttgtatatccatctgctcccaatgattctctgtttctcaggtcttgtgactgtagtccaagtatcattctttagttgagactcaatttcctcattcatagcaagtctccacttgtcccagttttcatctctgacagcttctttgtaatctgccggttctactgcatcaccatcttctgttgtatatagagcttctgcataatagtcttcatcatcgaatcgtcttggtgctctgatttcccttctttctctgtctcgaaccagatgataactcaaaggagattgatgtacatctgtctcttcaatatcatcagtttcatatcttggtggtgtactagtcactgcgcctcttgtagcaggtgtgacttgagcttgtgattgttctccacctgagctgttatctttgtcagcttcaagatctaaatcaatgtatgacccagcgtggtcatcctcttcacaggaaacttgttcttttctctgcatcagatccttgtacactgcattctcctggaaactcacatttctgctcactacacacttcttttcttcaatcagccaaaccttgtaacctttcacgccacttggatatccaataagaactcccttctttgccctcagatttaactttccaccatcagtatgaacaaatgttacacagccataccttctcaagtagctgtatataggtgcctttccagaccatctcttgtcaggaaactcaaagttaatcgcagagcaaggagttttattgatgagtagcactgctgtatgtgtggcttcagcccaaaatcttttaggcagccctgagtcacatagcatgcttctcactttctccataatagttctgttcatgcgttcaacaactccgttttgttgtggcgtgtaagcgcaggtcctgtgtctctggaaacctttttcttcgcaaaacccatcaaacattcggttacagaactctagaccattgtctgttctcagagttttaactctctcaccactttggttctccaccaaactgatccaacttacaaacttctcaaaagcttcatctttagttttcagaaaataaacccataccttccttgtatagtcatcaatgaatgatataaagtactggcagttccctagtgacattggtactgtaggtgccccccacaggtcagaatgaacatactcgagcttctttttagtgtcatgttgagccaagttgaagccaatcttcttagctcttccatagatgcagtcttcacacgtatcaagcattgacaccttcttcttatcaagaaaccctttcttaatcagcaagctcatgtttttctgactcatatgacatagcctcctatgccataacacagtgtcatcattagctctagccactgcaagtgattcatcagttgcaggtttcccatggagtatgtagagcgtgtcataccttcttccctccaacagaacttgattaccagatttaattctcaacataccattctctgattcaaacttatgacctgctttttcgaaagttcccaaagataacaggttcctatccatatctggaatgtatctcacattttgtaatgttacagtgagaccattgtcgttgacaatcctgactgtaccaactcctttgactcgtgagatagacttgtttcccattctgactgaacctcctgcttcttcatcaaaatcttcaagccactccctcttatgggtcatgtgatagatgcagcctgtatccattatccactcatcttccaaatgaatgtcagtagaggataaagcttctgacacaaacattcctgcagattcaacaaagttaactgagccttcaaccagatttccttttcctcctgaggattctcctttgttgcttccttgattcttgaactgaggcttgtttttgttgggacaggtagacttcagatggccatcttctccacagatccaacatccacgtttagacttagacttagatctcttccctttccctttatccttttgttcacttcttcctctattttctgccttgtccttgacatacagaccctcagcttgacctttaatacttttcttaactgacccaaactctaactctctagagtaaatggcagcagccacttcgtcaagagacaatacagtcttaccagagctatatttcaaagtatcctttaactgatcaaacggcttaggaagagacatcaacaacagtatggcttgatcctcatctgagactaaaacatttaagttctctaaatctgctactatatgaagaaattcatcgatattaccttcaatagagagattctcggacatcttgaagctatagagcttctgcttcagatatatccggtttgggagagctttagacatgtagagcctatccaaggcttccagcatcgcagcagcagatgtctctttcttaatcttcctcaaaacccgatctgaaacactcaacacgatggtgcttctggcttttctcttcttctcttcaaaagcttccatcttttctcgttcttctttctcatcttcatcagatttctctgaatctctttctttccccatcggcgtctcagattcccttagaacagcacttaagcccaacatatcaatgtgagctaagagcttctccttccacatcgtgtaatccccacgaccatcaaacttctcaacctctattcttgctccagacatggtttaaccgtttgttaacactacggaaccacaaacggactgtaaccaaggctctaataccaatctgtaaggatttgcccactcaaaacgtcgacttttcttgagaacaaaccaaacacaacaccacaagcaagaaaacctctctgttggacagagtgttgagacagaacacacaacaagacccaaactttaaagagaaacacagaaagtgcaagaacacaaacagagaacacaaagcaagtttggtaacccagttcacatcaacagatgctacgtctgggccgagactgtgctcggaatccactaaattagagatagtgtttacaagaagaattacaagtgaccactcgatacccttcactagtactcgagttcactctgtatcactctcctagacctaagaaactctgttacaagcttctgataataacaagtctctcaatatctcttagacgcctttgttctcacaactctctcaataacctagagcacctcttttatactgaatacaactagggctcccttgtgctgacgcggacactgttgcaccatggaaacgccaaaggtactgtcttgaaaccgcgtctgttaaagcactccaacagctagcaccacatacagacaaaacttgtcctctacagctgaaggcgacaattttccttttgccggttcactatgaatgtggtcccaagcaaacttaaccagggtttgatttacttcacctgggttaagctccaacagatctttgttttaaacatttgtaaccttccttgagcttcaagtcatcatattcttcacagtttgatccccaaactcacggctttggttagtcctagcttcaatgccataagctctgtctcccaacctgaaatgtcggagtaatgaagtgaaacttttttctgaaacaagatgctatcatcctcttctctgcaaattgcaaccccaaatcccgccaatgaacccttgaaaaaaaggttgtacgagtcagaacttgaaccgtcaagtgagtttccggtggggtttggggccatcttctcctaccttttgtgcaaacttgaagatttatttagtcttaaggtaggttttatgactcgcagaatatatagagaagaggcggctccaactaatgcaaaaggcaattagcataacataagcataaaggatattaaaataaaggaaaactctcttaaaagatcttctataacaataaacgataaagaaaaggaagcttagatcatatccattatttttggactttcatgaatatcttaacaaaaagtaataatatttataataaaattgacttattaaattaattttaaattgtgatgaaaaacaaaccaattacgcaatgaaaaatgaattttctactatgtgttgttttttgaatcaataaaatttttgttttagtgaaaaaatcaatacgtattttaccgatcaattgatcgatcattattagtaaatgtttaaacctagctagcgctacaacttaaattctcaaaatcaacaaaaaaaaatcaaagaaagatataagaaagatataagtgtttcaaaataactgtgaaatctgtgagtctatctatgtcgtagtatataggacttgaacccatatcttttagtgtaaaagcattaatgaacatgttatcaaacaatgtgccaaggagacttccacccatatgagtcacacaagaattatatcaagtcaacgacaaagaaaaaatgaatagaaatcacttgatgatagaagaagaaacaattctcttctttcaacttttttttgttcttttttttctgtttttatttggaactgcgtcaaatatgcatgaaggaaagtagaaaatttagcgatatgaaaaaatcaacaaaaccaaaattttattttattttacacaaacaagaactttgttgctgcaacaaaaggaaattacagcagctgatctctaaaaattttagcgactgaaaattgtggtcacaggtcgctgtgattggtcactggcgattggtcgctgcaccaacgatagacaaacaaaaaattttgattattgtctgtggtttcagtcatctgcgacagataaacgaacatggccttcagcaatgggacgcatgcgcccatgattaatatctactaattctatatttgccacattagcgtctgatgttaaatacgttgacaaagattgttaaccttccctttaactctttgtgcatcggaaatcttatagctagagccaggaaaacaaccatgggataataccgatgcaagaatgcataatatatagagtgtctttgcaaactagtacgttttcgaaacttaattagaaaagtaatataattactatttataatatgtaatatagtcataatacgtttttcttcctgagagagagagaggtgtaagggagagagagagaggtgtaagggagagagagaaacgtgtaagagagagggagagggtcatgtttttttttgtttttgtttttcttttttattacattttttccctaaaattttaagaactataatactcgtttgtaaattttattttcctaaaattgatcatataaataaaaatctatgtttttttctctatcatttgatatgcattttgtttaataattttgaaattttattttattgtaatggtgaaacgaaagatataaatacaatttgtacagcataatctgtacaccgcaatcattacagcgtaatctgtgcggttgtatctgtacagtgttatctgtacagcgttgtctgtacagcattatctgtacaacgctatctcaaagaaaaacaattttttttagagagaaaacaaattaaattaaaatacataaccaataatacttgaataatacataaaaagagttatacattcatcagtaatacttgccactttgaaagaagtttaggtaatcttcaaaacgctatctgtacatcgctatctgtacaccccaatctgtacagcgctgtacagtggtcaaaatgtaagaaaattttaaaaacatatttggtttcgaacaaatatccttctttacagatgcatttcatcatttgacagcactgtacagatatttgttcgaaaccaaatacgtttttaatttttttttatattttgacaattgtacagcgctgtatagataggggtgtacagatagcgttttgcagattacctaaacttctttcaaagtggcaagtattactgatgaatgtataactcttttaatgtattatccaagtattattagttatgtattttaatttaatttgttttctctctaaaaaaattatttttctttgagatagcgctgtacagacaacgttgtacagatagcgctgtacagattttatttatatctctagtttaacaattacaatacaaaaaaattcaaaattattaaacaaaacgcatatcaaatgatagagaaaaaaacatagatttttatttatatgatcaattttagaaaaataaaatttacaaacgagtattttagttcttaaaatttgagggtaaatgtaataaaggaaaaaaataaaaaaaataaaaaaaataaaaataaataaataaatcctgacccacctgacccacgctctctctcacacgctgtctcactcccttatacctctctctctcaccaaacaaaaacaaaacgtactatggctattatactaattataaatagtagatgtactacttttccaattaagtttcggaaacgtactattttccaacttattcctaatatatgctaccaatcccccagttttattttatccttgttgccattggttgtagattaggatcatctcgcattggtaactctatttgctgttaatctttgttcgtgtttccagttgagggaaagatgcagaagacagtggacaatgagaaaaatttctaagcacattcattaatatcttctcgctttttagtcttttttctctccgttcaatcatatgattgttatgagaattctccagaagaatagaacattttttggttttcacgtttatcaatatttacaatgagctagctataaacaaatttgttaaatcatataataacatggtacaaagttaaaccaacctgtaaaagatggaaaggtaatgttagaaaagttagcttaactcgtcttatgtcgtactacttggcttacgtgtgtgtcaacttacgaatatgttttgtgttagttgttagtcttagctttgatacaaattaatgaaattataaacgaatgaagttgtaggtcaacatcagttagaaatacaatttagaaataataaaagttggtaataaaatcgtgccaaagtcaaagctgcacatgatcgtatgtatgatcattttatagctgtcaaataatgtagaatataggtagacaaataattgacgtgaataacaacaatcaattcaagctcatatatctaaaagcaaaaaaaaaaaaaaaaaacgaatgagtttcaaactcaaacattaacattaagaagtagaacctattaagatagttttcctttcaaaaaagattttgtaataggctttacgtcttactgcccatggagggcatgtatcagcacccttgtatgtatacccaagctgagatgagacacaataacaagaacaataaacttccccgccgtcataactcttcataatgaatgaacctgggcaacgactatgacaactgttgcaaagtggtcgtgtagatctattgttaggtagcaattcaagttcaccatggtgtctgaaacttcctcctgctttggcatttctgatatctccaagtacacaaaatgtatgcaatgtgacaccgcaatcgttacaagtgtagaaccaagtctctggatttgtttctctttcgcaaatatcacaccaatatttgccgcttgccttttcttcaccatagcaaagagtgagtggatgatcatcgtaccttggaagcattattgttaatggcatagtagcacaacggaaatccaaaaagtaattgcatttgatacaacctaggaggactttagcacgttcgttgtcgcagttgtggcaagttttcttgttaccttcttcttgttttacgtagagtaagtgatgatcgtgacttccatggataaaaggcattgtaatcgaactgcatattaagtcaaagttcacacctttagaagagtagaagaatccttcacaaaacatttgataacaagctctgcataaaaagtcatcgtcgataatgctttcgaagcaaagaatgagaggttctgagctcagaaaatgtcgtttcttcttagaaatattagcacacttttcatggagaatgaagctgcaatttgattttgaacacttgtagaatgtgtaagaaccaatgggaagaacacatgctccacacaagctactttcttctccgtctttgctgaggctcatgaggttatgctcatgagcgaaatgagtgattgtgttgtcatcattcctcttgaatggctcgatatcttcaacttcttcaggtactccatcgagctctttcccattccatacgtctttccttgttgcacatagtgaatgaatagcatattgaggacaaagagaacaagaataagcaccacatgaccaatcaatctcttcaaaacaaactccacatcgccattctccaagaccaagaggatacttgaacgaaacgcggtggtcatggtgattgacgttaataacacgtggtaaatgagcacactttttgtgaaccatgaaatcacattgatgacacacataaggagcccgatcaccttttgtcccacaagcatcacaaacgaaggagatcaatcttggcataagattgagtgtatgctcatgtaccttgagatttgaaagagcaactggtggggtttttgtttttgcgcataccaaatccaaattgaacttacagatatcacaatgatagatgaattttccagtgtcttctccgcatagatgacattttggatcagtgtaagtgggtgctccttcggtgagaagcttgagagggtgtttggtgtgacaaggatgagtgatctctggtgagtcaattactagggcagcgcatacccacccaacgaacaaccgacagcaaagacagatatagccatctacgtggttgtcataacaaacatcgcaagtcatattagtcgcaaaattacccatgaatagagggtggtggtgccacggcatattcagatcggcttgggcacacatgggatcaataatgcaatcgatatccacattgagtttacaatctctgcaatgataaagaagacgcttggtgtttttaccgcaaagatgacatttgggtacggtatgatctggagctccagttgtgagaagtttaagacaatgaccaacatgagaaggatgttcgaatatctctggcacgacttcgaacaaaaacgtacatttcttatgaacagtaaacttgcattcaccgcatgagtaggcatcaccataggattgatcgcaagcatcacattccaaaccatcatgattcttaacgagggatacacgatgcgggtgtccttttatcttgaaactcatgacggatgcaggtagcagaggtggagagaatggaaattaatgtttgggggtaatagcactttggttcgtgtaataatagtggatcaatgaagttgttcctctatatactctacttatatcaatgccacttgttatattatgatatataaactaatattaacgttgacaaatcttaactaatacaactagtgggcacgtcgttggtctttgtttaatttaaacgctaatgtcaatggttctgttcgggttgtgtctgccatgttacatttttttacttcgacttctttattttcatttatcttatctcttctaactctcaactagtcgtctttattgtttataagtcaaataatagcaaatcattaccctatagataaagaaagattttattttattgtatcaatccagatcatcgaaggaagaaatcaaagtcatgacagctaaccttgagccgactatatggtactttcgaggttaggcattgaaatgagtataatacacgtacgtgatatgaccaaaaaaatattgaagtgacgtcaatgatatttttgttttagactaatttttttatatatagttttgtaaaaattattcatttagatatctattttaacagagagagtaaaagaaatttgcattttaaaaatgatagaaagttaaagctaattaaacaataaaaaaacaagtattattgaacttagaggtttttgtttgcaaaccaacgtctcataccaaagtgaagtcatccaattcttgatgctcttgtcgatgaggcgagtgcgacacgatcagaaggtggcccttgaggtagatgcagtcatttttcttatgccatatgcaatagattgaccgaatgaaaagttacctgaacaaagacgatttatcttttattctatgagatagatcacatatgataatttttcgttttatttagttagtgttataattgtccgagtaattacccaatagggcacggtgaagtgtgtagtaatatattcggggtcaaatccataaagagcagtggtatacacaacgagaaaattggtttttggttttcagatttgtaaataaaaatacaaataaacaacgacgtatcttataattataataaaagcattgggtcggacttaaatggcataagcaagcgacaagagcgtggaaggttacgatggatccagagagataaaagtttgacgagtcagcccttgttccagaaaaccagtttcttgctcaacacccggtaatgttttcctcggactctcattgcctttctttctcttttttgtaagctgtatatctaagcagttatatattttcaaggttgggctagattcatggttaatattccccaagcctttgatgcatagatggagcacatagtgcaatcgttatcagaaaccgtggcatgtttgaaagagagaatagctgtgctgatcagaatttaagcaagcaagcagaagttaagtggaaatgttgattatttggaaaagaagagaaaataatgagagtggaattattaatggtcctctacttcttcatcatgttttgaagttaacaaatattgttttcgaaatgcctattttgtcaagttgctaaaattcatattaattttggaaagtatttagtttctagtcaaaacaccaaaaatgagtacttaaccaaatgacacatatataggcgattgttcatttgatacataaaatcttttcaggttggtgtttcttaatatattcaccttttatttttatgtgtgattactttttccgtctccttcatttagtttagaatttcaatatacaaacattgctccatttgttcatatttggtttattttgggtcaagttttaaaatttttgatctttgcaaatctagataaacgcttatgtactaaacagtaatttataacttaatttaccaaaaatcggctttttcatacctgcacaaatgaactatgttgaattcacagatttaacttatatgtgtgttaaatcatacatgcacttttaaaaaattttgaatttcaaacccaaagttaatttttttgtgctaaatcttacagaaacgtgtaaaaatttcacaccgttaatccactgtgaaatcgtggtgacatgaatgacacgtgtatatcgccaacacaaaacgacttcattttacgaaaaatcaaaattttaaaaacttagagatttagtctcaaacccatgacctctattgtctagagacacaacttcaccaacatgctaacataattcacattgtagttttacaaataaatatatttgtaagcttcgtggtttttcttcttcttcttcttttctttctccagttataacatcatcgttaaacttcacaatctctataaaatctgaaacgacaagtcgttgtagttactagctcgatggctcttcttccctcaaattggctccgatgatattgtcttctttcttgattttttacctcataaaattggtcagattaaatcgccaaacctaatctatttgatttgaattttatgaacatagatgagtttttagaaagagtcgttctcttcttcgatcaattcggtgaatcttaaacccaacgaatatgaattgacgagcaaaacaatgtcggatttagacgtgaaagtcgtatatttcactatattcatttcacttacgtatcgcgtgagactttttctagtatataatatacttacaatcataaacatgagatatcgtcattcctctttttgtttttcaaatatttttaaaagtaacttttaacataggaaactttcaaataacaaagaaaactatttaaatttgataatatctatataacattgataaaaagtaaaatatatatgaaacagaaatctattaaatatttgatgtcaaaaatctaatgttaacacgataaattattattttgcgttctaatttatgcaaaaagattcagaagaaaaaacccattataaattatgtaagttacgaaaatttaatgtttacgattaattaataaaaagatgtacacaaataaaccgaacaaaattgatgatataaagaatatacaacaaatatttactggcgtgggtgggggcgacggtggcggcggtggaggccttggaggaagaccatgaccatgtttgcaacctccagcctggactccacatcggtagcaaaatttatgtccacatctatcaagaaaatacaatgataaatcagattaacacatgtaaccaactttcaaaaggaaaatgttaataatagagatgatgatacctgcactttacttgtacgcatcctttagaaagttcaatcatgtgttgacactttccgcattgacgccaccttttctgatttgccagagctttaatctttccatcattttctgtagggtatggattcaacttcttgtaatcgttgcacgacaagttactatgccatgaaactttacacttgatgcaaaagatttgaccgcatttgaagcaacatctcctaacttcatcttctttagttgatatagagagctcggtttctgacattaaagccgagcatcgcgagtttgggcagtaaattctccctgttacagggattaagtcttctttaatcctttgttgccacatctctcttattttaggtgtcaaaagatttatacagcctccaaattttagcgtagtcttgcagcggtaatgaggacatctcattacacttccctcgagtagcctcacctctatatgtcgtctcatacagtcggaacaaaatcgatgacgacacttaccaacacaaaacatctgattctcattaatatcatcatctaaacagattttgcaagttgttttgcgagtagccttaggttggcgaggaggattcacagatatgctgatttcagaaactattgtttcccttgctagtttataagcataactaattctttttccctccacgaaaatcggaaagcttgacttgaatccttctcttatacgttgcacatcaatcattagcaaggcagttttattctcctctggtacgcatcttcccatgacctacgtactcaaagcaaatgaataatgacatgatcaatattcagatttttacacttggtagacaagtacgaaaaacaaccaatactaacgacataaaccctaagaagcaatgttcgtttttatattaaaacaaaaagaaaacttacaaatttataaattggataatcatcacaatatattgagatatgagtgatccccaaattcacagcttcggttagtcctcgcttcaatgcggtaagctcagcctccaaaggtgtaatgttggagtcatgatgaattggtcctttcatctgaaacaagagatcatctttcttcccgaaaattgcaaccccaaatccggccgatgagtcatcacttaccaaacctttgaagtaaaggctacacaactgagaactagtgctaatatcgccggaggaatttaccggtgagggttttgcggtgtcatcttttctagggagtccctaagcatcttcctatgctacagtctcttgatgagattctagagtccaatataattaacaagaattaacaagaatccaaaactaaaagggaaaatatctttggataaacttgtataatgattctagttagcgaataatattccgaaaatataggttatgtttaagaatttttaatttattattttatctatatttttttttgtgaaagggcttaattattttatctaattgcggacatttgtaattttgattccattttcgtgaattatgtaagagtcatcttctttcatgagaatattttgtttgggattcaaaagttatatttgtaattcatagtttagctttcttgtccatcaagtttcgatctatttgacaagtttttgagttcaacttttagttctatatataagactgattcgaaagtctttggagtgagaaaaaaataaagattttcttgtataatatatggttgtattgtactcttcttttccatgaccatgaacacgatttcgtactaccaagataatatattggcgataccaatcaaaaataacaaataatagaaccaacgagaagaaaatgagctatgaaacaaagataattaactaagtaggtgattggttgggctgtaactgtaaaatttttgctgtagagattttgctgtaactgtgttgactgtagctgtaacttttcttactgtaaaattactgttgtaagtttttaacttgaaatatttataaaaaatggattagtaataaaagtttttttatagtaaataaaatgtcttgtattactaatttaaatatatatattctgatgatataaaaataaaataaaatcttatgaattcttaataaaataaatctaaattttacctatgattattccataaattcattgcaatctaaattttttcttttaggtttgataattatcagcttttttagaacttatctttgttttttgttatatatttatgttgataatttatttttttgtatttatctaatgaaataaaatttctacagccaagaaaatagggctttgataatttactctaatacaaccttaaaaaaaagaaaaaaaaaaattgggatgtaagtttaaaaataaaggtacagcacgattggtttgtaatcaaggctttaagaaaaattaaggttgtaagtcagactttttttttttttttacgtcaaaaaaatttcataaattaaatagtgttgttacagtgatgtttttgaagccaactagggaaaagtccagaatctgaataaaaacaagatgaattacaaccaagtttcgccagatcgtgtgcaatcatgtttccctccctcttgacgaatttaaattgaatgcttctgaattttccagcccaaaactgaatatctgtgagtagattcgctaaaaagcaatgtgaagcagaattggtaacaagttgtatcaaagtttggcaatctccttccatgatgacatgtgtatagcctcggatccaaatttgttgaagtgctgctaataaagcctttgtttctgcctctatcggtgtgcttgtatggtctagtaccatggatccccaatgttcaggtgtcccattatggtttctaataatccaacctcctgtagcttttcaatcctgcacattaaaactagcatcgaagttgcattttatgtaaggcatctgaggtttaacccatgtagtgttccccgctgctgtcgttcgctttggaagccgtctaggaccttgagtttgggtagcattaagccattcgtttgtttccgccttagcccttacaactgttattgatggactttctcgaagattgttaaaaaccacattgtttcgtgctttccaaattctccaaagtagccagaatgggataagtttctgagaatctgttatagtggtgttctggagaagtaataaaatatttgaaatgttatcttcaatgttattagatagtatagagcttcgatataaaggtgtgtcagatagccgccaagccattgttgcaaaaggacatgtgaaaagtgcgtgattgatagattcattctctcgacgacatcgtggacatccaggatcgatgcgcattcccctcgtggtgaggcgatccgttgttggtaaggctttagacagtattctccatagaaaatgttttagcttcggcatgattggcaaattccagattttggtttttagatctactgaaccatggggtttagccattgtagggatggtgtttgacgggtcatgcgttgataaccaataacccgagcggactgtatagtcacctgtggaattgtagctccaaataagacgatccgttttactccttgttgagagatagatgcgtttaatatagtcatggtcagattgatccacaaaagtttgcaatttggcattatcccaacatcgactatgacctctatgctgaaataaattgtcaagtgatagaccattatgttgttcatccgttagcaaaggacgaggagggtgagagtcgacgacattgtctatccctaaacggatagtcttaccatcgccaatcacataccgtgtaccttttctgaggagggcaataccagaaagcaaagaggaccacccgtaagattgttgagaccttgttttagcatcaattatcgagttatctttaaaatatcgagccttcataacccgcgcgaaaagagaattgggatattgaatgattcgccatgcttgttttgcaaggagggcgtcattaaattttgcaagatcccggaaacccagccctccttccttcttagaatattgaagtctcttccaagcaacccatggtattcctcttttatttgaagctttttcccaccagaaattcatcagaagagactctatctcagagacaataccttgaggaagtttgaaacaggacatcgcgtagacgggcattgccaaggcaactgattttagcaatatctcctttccggctggcgagaggaattttgcactccatgaagcagttctttctttaacacgatctatgatataattgaacatttctttttttttcctaccaaattgttcgggaagacccaaatatttaccccctcctccttgatttggaatgttcagaagtgtttttagtcgtgtttgagtggaaccgtatacacgagacccaaaagtgattaatgatttctgaacatttattttctgcccggaataatattcgtaaacatcaaacacatctttaagagcttgacagttcctcacattagcttgacaaaagaataatgaatcgtctgcaaattgaagatgcgttatagccggtgctccatttccaattcggactccgcgaatatccccacttgatgctttgaccttaatgagatggctgagaatgtctccacaaagaatgaacaaatatggggataagggatcgccctgtctaatacctcgagtcggcgaaatatatccatgaggtgaaccattgatcaagactgagtaatgaacagatttcacagcagccattatccaacctatccatttatcgcaaaaaccgaaaagtcgcatcgtcgtttccagaaaatcccactctactcggtcatatgctttgctaacatctgttttcactgccatatatgttttcgagactcgcttccggacttttaaggagtgcataatttcatgagcgatcataacattatcattgataattctccctggaataaacgcagcttgcgaatccgagacgattgagtttaggtgtgctttaagacggttcaccatgcattttgaaatgactttgtataagacattacacaaagctataggtctgtaatcggacagcgtttgaggattttgaatttttggaatcatacatatgttagtgtgattgacgctggtcttcatatgtgatgattcgaaaaaaagtttcacctctttaattacatcgttaccaacaatatcccaacattgtttgtaaaaacgtgctgttagaccatctggacccggagccttatcgtcaccaatctgacaaattgcttcaaaaatttcactgtcacgaaaatcttgcgtaagctccgagttaattatgtttgtgacagatgaagggaaatctgcaaagtcaattggggatacttgtattccgttagtggtgaatatgtccgtgaagaatttttgagcatgacaaccaatctctccatcacccatgtacatatgtccttgatcatctgcgattgaatttattctgttttgggaaattctggtttttacgcaagcatgaaacctcttatgttttttgttcttataattatattgtttagttttcattatcgtcatgaataatctagaaatccgattaatttattattttttagaaattaataaaaataaagaactattaaagagacaagaagaaccaagataagagtaccaatacaacactcctcaagcatcctttgtcgatgtgggcaacctccttgcttccattcggctccacatgtgtagcaaaacaaatagccacatctatccatcaaaacatgaatataatgttaattaggcaaacaaactttaatcatcaaaatttgaatggattataattaagaaaatgatttgagagatacatgcaagttacatggatgcatccttccgaaagtttgatcatatgttggcacttttcacattggcgccactttttctcatttgcaagaacttttagcatcttatcatctgatgtaggattattacccaatttcttgcaattgtcacatgacaagttactttgccatgaaactttgcagttaatgcaaaagcgctccccgcattggaagcatctcacaaatccatcttctaaggtagatttagagagctcgattttcgacattaaagccgagcacctcgggttcgggcaataaaatctctccgttactggaatggattcctcttcaatcttttgttcccacatcgcttttagtttagatgtcaaaatatgaaaacaacttttaagagtcagcttagactcacattgataataaggacatatcagtacagttccctctagaagcctcacttctatatatcgtttcatgcattccaaacagaatttatgattgcataaagcaacataatacatttgctcagatttgaaatcatcattgaaacatatactgcaagtctcaggatccacaagtaagctgatttcacaatctattgtttccattgcaaatttaacttaattttgagtttagatgatgatccgagccaaacacatgtttagattattaattaggtcgaaaaactgatatataaacatataaaattcggttgtgcgtgagtgtagttagtatgaaagtaataaatacatcctacatcctatagagaagttaagagttaagactttaactagataaatcaccttttgaaatgatgtattacagatctcattttatatattcctagttttagttaattcttaatgtatttaaataaatgtataaatctctaaattaaattatcataaaaagtattccttgtagagtgttaatagtatagtaaagatatattcttctttatataaataattaatcatttcaagtattaactttaaaaatttattctagattctctaaataaaatagcaaaatttcattatttaaataatatgtggatcttttgtaaacacttctcctcctaattgggcaactaatcatggagttattttttaattaatgtgtggttgacaaaaaaaaaacaaatatgtggataaagaaaacagattttaaactaaaagagattgcaaaatgaattagttcaaaactatataaagaaaaagagattcctagaataaatcaatatgaatcataccaaaaaagtggaaagataaaaatgattaaattaaaaagaaagaaaaaatatatagagaggaaaaaaaagagaaattgttagaaatgtcctttcattgataccttcttttttaaaaaataacccctcacttcgatatcattttcattttcctcctttaatttttaatgggcattttacccctatttaataaataattaagtaaacaaataaacatttgaattttcccagcaaaatatctgaaacattttcccaacaaaaataattgatcccataatttttggtgggaaactttatcttagaaacttttagagtttacaaggtttttaaaaggatttaagagtgtttttaaaggatttacaggggttttaaaggatttataatgattataaaatcgttttaaaaagatttacaagggttttcaatgattttttaaaggatttaaagtgtttttaaatggtttataagagtgttaaaagatttacaacagttttaaaatggttttaaaggatttagaagtgttttaaaaggatttacaaatattattaaatgaattacaaaagtgttttaaaaagatttagaagggtttataaggggttttaaagagtttactagaattttttaaaaggttttttaaaaagagtttaaggaattgctggaatctttgtaaattaattttgtcattgcgaaatgtttgtcttaaaacggttttaaaagatttatgaatgttttaaacgatttgcaaaagtttaaaaatattgataagggttttaaaaagattttaaaagcttttacagggtttttaaaacatttatagggattttataagtgttttaaaaagatttacaaaagttttaaaagaatttataagaatttaaaaagattataagggtttcttaattttttggcatgaaaaaaaattaaaaaggaaaatatgagtaccaaattatttttagcgagaaaccttttttttgcaccaaaaattactttggcaagaatatttgattttctcattatattcattcaacaaaagaaaagtagtttcgacgtttagcacataaaagaggtattttaaaaaatagacaacataaggagttattcttgaaaaatgcatttttgaaaatgcaccaaaaaaaaaaacctccatttctacaccaaagaaagaattgataatgaggacaacttagtacacctccctcaactagctttacttctatatatcgtttcacgcactccacacaggattgatgacggcaaaaatcaacagttaacatctgctcagtgttgaaccaaggattcacacaatagatttgtttagagagggaaaacaaatctagtaatttctcttcattaggtattctatccaagactcgattacaaaagatgttctaatctcttctgaaatacattagggtttgctcaagaacagaaaaagaattaggattttaaaaaggtatagctgcatccataatggattgcctacgtaccctgtgaagggatcaagccattcgtagttctcaatatgtataaagttatgtgtttcttgtgagtatccaaagatatctcttttgtgaagtccctaaggcactttatataggatccttaaaccgcctctctcgcgatattcttcggaagattcttatttatccttaggtcggttctagaggataatcgtcctaaggatattctccttattcttcggaggttttggggagatttcctgatttcgacattatcttcaaagattctcctttatcattttcgaaagtcccataaaagatcctattttaccggaaatgatccttggagaatgaatggtttttacaagtctttgcctcgcgtgtttttcacggctcggtggtcgtttgagaggtggcttcggggcaaacggtatgtaccggctgtagacgagctgtcagctaggcgaagtgcagacgagctgctagctagacgaacttcgagctaggaaagctacagacgaactgaggtggttggctcgggtacaaattgcccgagtcaaagctgggttcagtatacttcgttccgagctgatcgtctcggtaccaggttattcgggataactggatttctaagcacagaccaaagcagataagaaactgtatttagccgaagcaaaagctcggcactagtgtttatgataactgggatttagtttccgaggcggttgactcggtaccagtgtgtttagagtaactggatttcagtagatttgaatacccacggttgcgacccgatttgattcaatcttttaccagcgtttagaaacgagctggggcaccggtgttaagtataaccgggtttcagaagatagaattcatagcctgctcggaaaaacattcgagcagattcttatcttgaatatttatatagcgcgctgtaaccgaagcggtgtaaatgaaactttgaaaataataggccgtcgcccgttatcaaagtaaaaagatttagaaatcaaattccaagaaaatttgaagtagaaaaatcgaagttcaaatttaaaccgaaacgagagtttaaaattgaagtgggagtatggatatacggaccccactccccccccctttttgcaagtttacgcaaaaaatatagcagagaatgcatatatatgatttggacatagggatgatgatatctacggcatggacgatctgaatctctgagattgtaaacgtcgttgtatgaaaatctacatttaagatgttgttcgttagaggagatctcatctttgcgtagaaagagagaaacaaggatgaatgctagtgatataagtgagaatgtcaatcaagcttaattaatatgtaagaaagtaattgaacttatcttttatgagggaggtcgtcgagacagaattggagatcgcatcattgatgaatgagtggaaaccttgagcgattgctagtgacgatccattgtcacttgttggtgtaatgtacttccttttgctgatttatagaagaactgataacttccgtttgaaccgttaaactattgatcccaccgttgaatctttagctgatagtcatacgaagattttgtccgaattttagtcagatcggatattgcctgaggcttctaccgtcttatgaagttgctgtgacaaagtgaatttttcttcctttgctatatttgttttttggtttcggttgctccggtagcaacatacgatcctcagtgaatataggaggcagtatccagtgatgcttactctttggctgacttctggtgatctttcttctttacttctctttccattgaatattcattacacgacatgtttttgagagatctgaacaacgtcttgtgattaaggaagataaagcagaagctctccaaggcgaggaagggacaatttttcttagatatatgttaagacgagccgattgtagatgaaagacgagcttgaggccggaaaacgatcttgatgtccgaggaagaatagagtttattcgtcttatagctgaaccttgtaaaaggttgcctacgtacccttagaaagggatcaagccacacgtagttcatgttatgataaacgagctaggccattactggaggaaggtcgtatggtaggtgacgagccggcagacgtgcgacgagctggatgaacagtggtagagaggcgaattggacaaaccgagttctgctgaaggtttagacgagctgggcgacgagtaggtggactatgcagtcaatggacgaactgccgctaggcgaggaggtagatgagtttcagttgagggatgagtcgatagctagacgagttggacgatctgactagctgacagctaggcgaggaggtggtcgagtgatgggaagagcttgaagacgatctgaggagcttgaagacgatctgacgagcttgaggacgacctaaggagcttaaagggcttaaaggatgctgaagagcttgaagacgagctgagggacttggtgaagagaacgagttgataagcttgacgaagaggagcgagctgacgagctacttgagacggacgagctgacgagctttgtgagacggacgatctgacgagctttgtgagacggacgagctgacaagctttgtgagacggacgagctgacgagctttgtgagacggacgagctgacgagctactctgtgtctgcgtgtcaggcggcattcatcgagggatttgacgaaactacccttcgccttaatactcctccttggtttggaacttattttgggcttttgacttgggttgcagttgattttgttaaatctaaacaacgaccttttttgttgcgttcttagtgattaagatatatgttgcgttccatgcctccatgacacatggtccgtggtgatgaagtgtggcgatgacgtgaagctttcgtaaattgaagaccatcggtggcgaggtgaagacgtgaagcctaagatgggcatgttggtggaatcgtcctggaaacgacgatggacgtaaaatcggtcacaaaggtggttgatctgatagccgcagacatgcatctttgggctacagccaggacgtgcttgtcgcagaaaaacagtaataactcttgttagatgtaatcaattgaggcaaggatgagtccgttagaaagataagccttgtagcttcaaaatgatgtgcagatcggctcctgatgttttctgaatcgttgggagtttgctttctaatccagttgctcccacagttcgaatctgcgatttgacaggtgtcatatgtttcattgaaacagtgataacgcttagtaaacagctcggaattggatgaggtcggtctctgttgaaagataagcctcggggctttcagttgatacttagatcgcctcgtgatgccttttagatcgccgggtgtttgattccgaggtcaacagatcggatatagatcgatctgtattttgtcagactttctgcagataaacggcagtatctccgagaaaacagaccctaacgaagtgagctcgggcttgttaaaaagagcctcagggctttaaattgatctacagatcgcctaggtatatcattgcctagttcatcaggattttcaaggaaaacgatcccgaagctgactggttttatagagttgggtctcatgactggctgcactcgcttgaggtaaacgtttatatctcagcatatatcttcgattaaggtgaggtcaacttctccgaaaagacgactctttgggcgatccgtagaggtattaacccttacgagattccctgtgatttgccgggaaatcggccccgaggtgaactggtctattcggacggatctgttaagaaacagacagcatcgacttcagaaaaacggcgataactctgagcagagatatccgatggagttacggttagattccttggaacgctgatctccggggcaatccgtggaatggttgtacgtcatctggttcattgtgtcttgacgggaaatccccccgcaagtagacggatctgattgtcttggcttgatgagcgtacatcgaatacttggatgaatgatatgtgaagagagttctttgtcgtccccacagacggcgccaattgttgaaccaaggattcacacaatagatttgtttagagagggaaaacaaatctagtaatttctcttcattaggtattctatccaagactcgattacaaaagatgttctaatctcttctgaaatacattagggttgggttttaaaaaggtatagctgcatccataatggattgcctacgtaccctgtgaagggatcaagccattcgtagttctcaatatgtataaagttatgtgtttcttgtgagtatccaaagatatctcttttgtgaagtccctaaggcactttatataggatccttaaaccgcctctctcgcgatattcttcggaagattcttatttatccttaggtcggttctagaggataatcgtcctaaggatattctccttattcttcggaggttttggggagatttcctgatttcgacattatcttcaaagattctcctttatcatttccgaaagtcccataaaagatcctattttaccggaaatgatccttggagaatgaatggtttttacaagtctttgcctcgcgtgtttttcacggctcggtggtcgtttgagaggtggcttcggggcaaacggtatgtaccggctcggggcgcgcttgatgactccattaagctcagttggctgtctcccgagccgatatagatgtttcccgcagcgttctcacgattggctcgggctgtgctcatatgattaacacccgagtcattttacaaactctcttcgggacggtcgatcgaataaagtcccgaggtgctttgttctaggctaggggccatttatatgtttaaccatgaggtgattgttattcttagactgtttggctcggtcttgcttgtggggggaatccgaccccaacactcagcttccaagtcatggtcgaaacagatagggcaagtcgaaggcatatctttgctaacttcatgaagtactatcgtttccaaactttccattgcaagtttataagcatactaatttgagttctagtctccagaataggattgctagacttcaattgttttcggatgcgatgcacatcatccattagcaaggcaatgttatcctcaagcgcggatgtccccatgacctattaacattcaagaaaaaacattaattacgatattaaacaaaagacttgtgagccaagaaagagttaccaaatcgaaaagtttagtatgatcgcagtaaattttgatataagttatccccaatctcacagcttcggttagtccttgttttaaggacgtaagctcagcctccaaaattgtaatggtggagtcatgatgaagtgaacccttggtatgatacagtagcttattctcttggtcacaaattgcaaccgcaaatcccgttgttccccgctcactaaacccttgaagtaaagcctatacatgtggaatggtgaggaaattagttcatccatagacatgttgcaatatgtctgtgaagactctttccaatatatatagagcgtatcccctcttgaattccaaatccagttaggatttatttatttgtatatttataagtaatatcctaaaagaaaaggtcaaattttccttatttgcatgttttctatgaccctaaaccctaaaataatcaatggaaccaattgtagcgtggttcaatgccagacatatcatgaaagatggaagtaaaaaataagtatataagcatatcccgtccaagcaaagtagaatttacatagtttaagtaaaaatttattatatatgtagaacttaaagattttattatatttacatattggaactttgatttttgtgttaatccgcatgggttctactataattcaatatcgatatcactataacataaataaatcagaaccaaaattaaagagacgagtcactaatcgtaaaattaaccaaacatttttgttgttttatgggaaatctgttttctaataaaaacatgaaccatcaaaaaaaacgattgcgttactatcctaaggagaaatacaacttaataattattaacgtctttttgggggctctgaaagacataaaatagctaaaacgccaaccataagcacccccatgagaacacttataccatactccacaagcatctcctttcgctgatgaaggcaacttccttgcttccattcatctccacatgtgtagcaaaacttatatccgcatctatacatacgaaaactacaatgttaataagccgaaacgtaataaattttcacaaggatttaatcataaaacagtaggtaaagattgtgattagagacgatacctgcaagttactaacatgctatgttttgctagtttgatcatgtgttggcactttctacactttcgcaacattgttgtagtaggatatacacccgacctctcgtacctcttgtattgctcgcacgacaagttgttatgccacggaactttgcagctgatgcaataagacttactacatctaaagcaccatctctgaactccatttgacataaaagccaagcacattcgatttggcaataagctttgtctgccacaacaacggattccttttggctcctatgttcccacatctctcttagttccggagtcaaaagattggcacatcgtacaacagttaacttggactcgcattgataatgagggcatctcatctcactttcctcgagtagcctcacttttatatattgtgtcatgcactccacacagaattgatggccacataaatcaacagaaaacatatgctcagctttgaaatcatcattgaaacagataccgcaagtcttcctctgagaaggcgccatatctatgctaatttcagaaactattgtttccattgcaagcttataagcaaacttagcttgatttctagtcatcaaaacagggatgctagaagtaaattgttttctaatacgttgcacatcatccataagcaaagcaatgttatcttgctctgggaccgatatccccatgacctatacattcaaggcaaacaatatctaattaaaccctaacacattgaaatattttagtgtgacacaatgagaggagagggagaagtcactgtctattgtgcttaaaaatatactgtggaaactttagaacacctaacttgataaaaagagccgtacatgttagcttctaaaacaagtaaatctgatcatgttatctatatgattacgcatgtgaaccttaaaagccaacaaaaaaaaaaacttaccaattcgaaaatctgatcatgatcgcagtagaatgagatatggttgatccccaaacccacagcttcgattagtcctcgcttcaatgcggtaagctcagcctccaaaactgttatggcagagtcatgatgacgtgaacccttgatatgatacagtagcttatcctcttggtcgcaaatagcaaccccaaagcccttagtttcctcgctcacaaaacccttgaagtaaagcctattcatgtggaacggtgagggttttaggtcatacatagtctagatatatattgcgagttgtctatgaagattcctcccatatatatatagaagccaaaattttagggctttagggttaggccgttcgtgagttccaaataatatatattttgtatattttagaacatccctaaaatttagggaacctatcattatccgttagaacccatgcccatgtgttcgttcttataagaatatcttcatcatgttgcaattttgtgaaagagcttttcgtggtggagcttgtttttttggcctacaaggacctagaaaaataaaattcctaattaatagactttatttgatctacgttgaactggaacgtctgacagaacttgttaaaatagcagtttcttttttgcacacttaatatttatataagaaaccatgaccaatgatgtgttacaacttaaactttctatttagcttgtgtttttagtttactagactttaacccgcggatactgtggagacaatttattttcttaaagttagtatatataaaagtttgcaaattgtatctatctataaaatatttttgttttatagtttacaattgttattaagtaacgtcctgccaaacccgtcccgccaacccgtcccgtaaaaaaatctatttattttattaatactaattttatttatgatatgtttatgaatcattgtcttaatattttgtaattttgtagtaattaattgctatcaaatatctctacggtttgcttcttataatcgaattgttatagtcataaaaaaaaagcaatatcaaaaatgataattttgtagtgtttaaatgatattaaatattttggaagttttattttaataactaatcgtataattaatgcggagagattttgggaaggtagttaaatgcaaacatttaatttgtagatttactttctaattatcaaaaacaattattaaatatcagtgacagccactataaataagtcccaagttgaggatttatttcacaaaatgactgcaaaaatgtatattccccatcaacaaagaagatataaatacagaatatgaactttcgacatagaaaaaaaacacatgatgaattagctttcactcaataatcaattggagaggtttgaacatgcatgccatttgggtttcaccattgtgttcagattgaattggatcggtttcgtcaactagaaccatccgaccaatggttaagatggagttgttaactacccatcaagaaaaccctatgggattgagtcttagtggtcatataaaagaaaaaccagaagcatttgatgatcaagacattctttcggcatccaatttcaaataaacatatcacttgcaaaatttggaatcgtttgggaacccattattaattagcgatacgtagatattttataaaataccaaaatttggatagaagaatatgcatatattattatgacaactatatctaattagtaaggtaaaaagaatattagaggcaactaatcacatatattcttttacaatttcagagttgatgatttcgtgctgctcttgttcagtccgtcagcaggaatggccggttaagggtgtgttcccgttgcggtgttcggctaactggaagcgttgcacaaacatttggttctttatatcaatggtcaagtgaaaagagaggatgatccactcgtccagaacttgatcgcgaaaaccagaacatgatttgttggtattacgtacgattctcgatttgtagttttgataaaaaaatttataataaagttttaggttgtaacgtttttgtataatcgagacaagaaaaaattgtagtacgacgatcaaaaacaaaacatcaaaagcaaaataaaatttcaaatcttatcataataattaaaccaaagttttcatctttttatgtcaaagatggaaatgactaggatatgattttgtcatcctagcttcacttgcatgctcatcgttaccaatcctctcgagtttccgataagcgtcacgatgttgatcaccgatagaaatgttgataacaataaacgtcccaaagaattaaaactacccaaaaggtaagaaaactaaagacgcaaacacatgtcgacacagttgttgaaggagtatctggcggattagttgttgaatgagtgcaaactcttccagtgatccatttggctccacatatgtagcaaaactcgtacccgcatctaccaagcaaccatgtaatgcaacatagagttataatcaagttcacacaaaaagaataaatggaactgtaaaattgatatgtatactctctatgttatggtttctagattggtttatagggaatgtaattagaggttatacctgcaagtgatatgtatgcatccttccgatagttcgattacgttttggcaattttcacattgacgccacattttctgatttgctagagctttcagctttatatatctgctgtaggatttggacccaagctcttgtaatcgttgcacgacaagttgctatgccacggaagtttgcagttgatacaaaagggttcaccgcatttgacacaggttctcatagttacatcttctcttgttgagtttgagagcttggttaccgacattaaactcgagcacagagggtttgggcaataaactctctccgccacaggaatagattcctcttcgatccttagttcccacattgcttttagtttagatgtcaaaatatttccacaacttccaagagtaaggttagactcgcattgataatgaagacatctcggtacacctcccgagagtagcttcacttctatatgttgtttcacgcactccatacagaattcatgaccacataaagcaacggaaaatatctgctcaggttcgatattgtcaccggaacagatactacaagtcttgttatgatcaggcatatctatgcggatttcagaaactattgtttccattgcaagttcatatacaaattcaatttgattcctagtcatgaccagaacaggaacgctagatgttaaacgttttctaatacgttgcacatcgtccattaacataaggatgttctcttgctcagaaacagatctctccatgacctaaaaacattcaagacaaaacaccaataacaagattaggggaaattggacatgtgaaacgtaacaatcaagtaacaaacttaccaattcaaaaatctgataatgatcgcagtaaatggagatatgatcgatccctaaacgcacaacttcggttagtccacgcttcaatgccataagctcaacctccataagtgtaacaaccctagaatcatgaacttgttctttcatctgaaacaagagattatcatctttgtcgcaaattgcaaccgcaaatcccgctaatagctctgtggtttcctcgctaaccaaacccttgaagtaaagactatacgattcaattttgatttctcccgcgggttttggatcatcttccatgtatctttactgtttttgagtctttacagttctcctagacaatttatcgaacacttaatgtgcaattttcagttctgggttttttaagcttttgataaccaaaaaaaagttccctacgtgaccatgtttatcagtttgtgtgtgtaaaacgaaaaaagaaaaaaaaacggagattatctctccgaaaaaaaaacaatttgaatggtggaaaaagacattattgtcctctatgtatatatataaattcggagaaatcatatttttcgtcttcagaaattctgaatcagaatcaaaaggtaattccttttccattgaaatttcttgatattgatctggaatctggtttcgcacaaaaaaaaagaaaaaaaaaatctgtaatctggtttggatatatatatatatatatataaataacccttttaaaatctgttgtaaatattttaaaacccttttaaaatcccttgtaaattttttaaaatttcttgtaaattttttaaaacacttttaaaatctcttgtaaatctattttccgcaaaaaaaaatttacaaggacttttaaaagcattttttggctgagaaaaatttgttacgaaaaataatttggcgggaatatattttatttttggcgggacaaaaatttggctgaaattttttttggcaggaaaatctcagtttccaatttcatgtttctattagatgagagtaatttggtcattttgttcaaggaaagtggtatttttaaaaatggataatataaaatggtatttttaaaaatggataatataaaagggtattgttgcaaaagggtagtaaaaaagtgtagttttgcaaatctctcttatttcatatctatttattttattatatttattccaaaaaaaaattatgcatatctaataatatacccccaatttaccaatacgagatcaatcttttggagttagaaataatacatgtattatgtatgttattaattatttaggatttttaacatgtaacaataaggtcaataattgtttctcaaattcagtgactcaattttaatgcaaatgtaaataatatttaaatttctctaaaaaaaaattacaaagatttataagaaagaagtcaaatgtttttgtttaaaattgtatagaaaaactaatttatatcccataatacattatgccaatttataaaaacaaatatgctaattctcatgagtaagacattggtagtaaagaaaaatagtttggtaaagtcttgcattcatcgcaatccacaaacattacgttataatgcgtgaaaaactatcttttggaaatatttaatccaaacaagtgtttctttttcagcataaataaataaattattttaaatattgtttttgtataatactacatatatatatttagatataaaatttacatatttttatatattaattttaaacccacgcgttgcgtaggacatctacatatacatttttgaagccattttagcaaataattcctcaagttaaaacttatttacaatgtcatgccactaacatttaatgttttaacaaacttatttttaaatctaaatataaaattaattatgtatttatgttactaaaatttaggaaactaaaagaaaaaatcacaaaaataatttaaatctttccaaatctaaactacaatatactacacactaacattccttttaagggatcaattagcattaatcacaataatttttccttttaaatcatttattttcagttaataaaatgaatcaaaccttatattacaatacatgcgtcaatattttcttttaaaaaattagttacgtaacattttaaaattttgaaacaataattatttctcaatccacatttttcgttttaaattgcaattgtacaaaataattatcactccctaaaaatttcttttatgatttttattaaattttgttcttttttttggtaaaaataaattggacatgtattaaactgatattgctgacacaaataatgttaacaaaatgcccagatttaggccattaaagtaataaaaaagttagtcaaaaatacaagtatatcaatcccaaattatgattaaactaagtatttatatataataattttcaaaaaatagcattatatatattaaaaaaattgaagtaccttttttaagtacttttgtgttataaagtaaaaatttacaaaaaatgtcatcacactaaagtcaaaaacaattattatttttaaatattattgatatattttaactttataaaacattattaatatttaaacttattaaaaattaaaatatcatgagatgaaaaatatagcgggacgggtttggattgatatgaaatatagcgaaacgggtttagattgataaacacatgttaaatatttattttcttattttatcatcaccaatttttttagttacaacattaatataaaattacataactttattactaaattaaaaacaataaaatttaatattatatatatatatatatataaataaaacatttgtcccgtggtgtaccacgggttgaatcctagttacctagtatatatatatatatatatatatatatctttgaggaaatttgatttgaattctctagttggagtgaaatattgtatagtgaacggaaggtgctcgaagaaatgcgtgagagagttgttgttttgtatgattatgtgtgtttgtgttgagcatagtacaatctagttttttgtacgagttgagctttgaatgatgagttctaaacagtgcttctgatgatgagatcaatgtaaataattgtatgagttcacaaacaattattctgttgtgtagagagagactcatctccatggcaccaaggtggaaatgggctttaggtttcctctcaagttgtaacgtatttctatcagagcaagctgagcttttggaccgttattgtttcggtagactagtttttggtgccgagaaagataagagatggattcagttatcttatgaagaagctttctttttgttctacaaactgaaatgcatcaagatctcccttcacggtcgttctctggtaaacggggtagatttatggcgatccataagatcctttaagccaaattttacgatcttgtacaaagcttattcgcatctacgatcaaagaactagattgtgagatcagggttacaatatggagttgatttcatggtgtatagacatcacccatctcttctccactctgaaaacgccgttcttgttcagtccattagcaggaatgatcggttaaaggtgtagtcggatattcattgatagaaagtacctgaagaaatgtgaaacttgagcttcaatgatggtgagtggaatttggtaactcatagtttcagttttcttgttcatgaagttaggatctgtttgacaaagttttatgatttaaaattttttacatccatggatctggtttggatagtgagctgaagttgtttgaaaatgtcttgtctaatctgtatgtttgtgtttagagaactacactgtggaagagcaaacagttcgtagatggagaaactgatcgccaaagtgaaaaagcagaacatgatttgttggtggtatgtctattgaaagtttgatttgtaaagtttacgtgtaggctaagtaatgaatgaactagatcgtttcaacataaataatcgacacaaacaaaacaatgtagggtgactaactatcaaaaacaaaacaccaaaagcaaactaaaaattcatattcaaattttatcatcaaccaaagttttcatcttttgtgtctctcatcagaatttcatataatgaaccgtaccataacgtttaatcaaagatggaaatgactactacgatatatataggattttgtcatcgttatcaatcatcttgagtaccacgacgtagatcaccgatatatttctccagctcttcttcatgcgctcaatgtgaacgtttataattaaccccaaatacctaaaactaccaaaaagataataggcaagaaaacgcacaagaaaacgcaaacacatgtcattgaaggagtatatggcggccttgaatgagtgcaaaatactcttccagtgatccatttggctccacatttgtagcaaaattggtgcccacatctaccaagcaaccatgaaatgcaacgtagtgttataatcaagttcacacaaaaataataaaaggaattgtaaaattcaaatcataccctactctctatgtaattagaggttatacgtacctgcaagtgatatgcatgcatccttccgatagttcgattacgtttttgcaattttcacattgacgccacattttctgatttgctagagctttcagctttatatcatctgctgtaggatttggacccaagctcttgtaatcgttgcacgacaagttgctatgccacggaagtttgcagttgatacaaaagggttcaccgcattttacacaacttctcatagttacatcttctcttgttgagtttgagagcttggttaccgacattaaactcgagcacctagggttggggcaatatactctctcctccacaggaatagattcctcttcgatccttagttcccacattgcttttagtttagatgtcaaaagattggcgcagtttgcaagagtaagtttagactcgcattgataatgaagacatctcggtacacctcccgcgagtagcctcacttctatatgtcgttttacgcactcaacacagaattcatgaccgcataaagcaacagaaaacatcagctcaggttcgaaattatcatcggaacatatactgcaagtcttgtcatgatcaggtatatgtatgctgatttcagaaactattgtttccattgcaagttcatacacaaatttaatttgattcctagtcaccagaacaggaaagctagacgtcaatcgttgtctaatgtgttgaacgttatccattagtaaggcaaagttctcttccgcagaagcagatttctccatgacctaaaacattcaaggcaaattaaaaacatcaataacaagattgaagcaaagggacatgtgaacctttgacaatcaagtagcaaacttaccaattcaaaaatccgataatgatcgctgtaaattgagatattatcaatccctaaacccacagcttcggttagtccacgcttcagtgccataatctcaacctctagaactgtaaccctagagtcatgaacttgttctttcatctgaaacaagagattatcatctttgtcgcaaatcgcaaccccaaatcccgctaataactctacggtttcctcgctaaccaaacccttgaagtaaagcctgtacgagtcaggtttgatttcgctggagactctacccacgtgttttggatcttctgctcgtactagagtgctttcctcctccatatatgtttctttagttattgttttcaagccttttaatttctcttagacaattaattgaacattaaggttttttaagctttcgataaccaaaacaatttcccttgcttttatacgtcttcaaaaccttagccatttttatgtggaaaacgaaaaagacaaaaacgcagattatctctacccaaaaaaaaacaatttaaatgaaaaaaaaagatactattatcctcagtgtgtatatattgttggaatctctctttatctgccgctaaatctttttacttcttaattcccttaatttatccagattcattataagcatatttatactacttctaagggctttaatggtttaaacgcagcggttgtggttgcggttgcgggagtttgcaaaagcgggtggttgcagtttcaagcgttatttagcgttttgaccgactagtttagcagttgaaaacgggtgcgtttgcaggagatttacgactggttgatcagcgggtacgatagcggtgaaaccaaaatttaccaaaaaaaatttaatatatgattaaaaaaaattaaaaacactaaaaactataattatgaaaaagtataattttttaaacataattaatgatttaaaaccataaataattattcaaataaattttatgttcaaaacaaaaataattagtaatattgaagatttaaagttagagaattatttttttatagaattaatgtgaatataaaacttgataatatatattttaatttgattatttttcttttttaatttcttttctttttaaatcaaccgcaaccgcagccgcaaatgcttgtggaaaggaatttttgaaatccagcaatttcgaacagttcgaaactgtacggagcagtttctatgattggtaccaaccgctaacaactacaaccgaccgttaacaaccgctaggtggttgttagcagataaaccaatcaagccattagttgttttgtcttaacaatacacaaaacaacccacttaatatttgggcttaacatataacacatggcccatttgtctctttcttctttctaattcttcctacgacaaagctttctctttgtccctcttcctcttctacgatctcttcttctctctttgttgcagtctcttctcatcttctccactctcgtctctcaagtatggttaattacaggattaatttccaacatctattatatatataaactcgttgaaatcataatttttttcttcagatattaagtaaacaaattggccatcgacgagagactcaaaggtattttttcttccatggaaatttcgtgaaattgatctggaaacttgtttggatatatattttcgaaggaagtttgatttgaattgtagtttgagtgaaatatttatatagtgaacggaaggtgttcgacgaaatgcctgaaagagctgttttgttgtatgattctgtatgtttgtgttgagcatagtacaatctagttttatggtcacctttagctttgaatgatgagttctaaatagtgatttgatgatgagtgtagagagacccatctccatggcaccaaggtggaaatggaaaggtgctgaggcaaaggcacttgcagaacctgtttcgaaaacagtctcggagctgagatcttcattgacccaaaccgaggctttaggtttcctctcaagttgtaacgtacttttatcggttgagtcagaggaagctgagcttttggatcgttgttgttttggtagactagttgttggtgctgagaaagataagagatggattcagttatcctttgaagaagctttctttttgttttacaaactgaaatgcatcaagatttgccttcacggtcgttctctggaaaacgaggtagatttatggcgatccatgagttcctttaagcaagattttgcgatcttgtacaaggcttattcgcatctacgatcgaagaactggattgtgagatcagggttacaatatggagttgatttcgtggtgtatagacatcatccatctcttgtccactctgaatacgccgttcttgttcagtccattggcgggaatgatcggttaaaggtgtggtccgatatccattgcagtgttcgactaaccggaagcgtcgcgaaatcattgttggttctttacgtcaacagaaaagtcaacacagagaagatgaatctgcctttgtgtttagaggactacacagttgaagagcaaacaatacgtagatggagtccagaacttagccgtgaagatgaaaccagaacatgattaagcttacatgttaacaagtcttgttgtaatgctgatttctagaagaatataaaatgaactaggttccgattccaacataaataatatacacacaaaaaaatgtgttacataccaaaaacatacacaaaagtactaaaacctttaaacataaatcaaagcctcgatacatttttttgaactgttccaaattttgatcaaagatggaaatgactaggatgtgattttgtcatcctagcttcaccagccggttcatcgttatcgatcctcttgacattcctataagctgcataagcgataacgtaaaagataactagaatgataagtaccacaatgttgatcaccgatacttttctccaactcttcttcaaactcccaagaacaccagctttacaagaactacactgataacagagcatgctctggtcgttgctccacaccatacagtcctggttcggtcctatcatccctcctctcgtgtcccatccggtctcattcacatatgaaaaaccgcaatctgttggtggcttgcaacaaccggactgcaaattaacaacaacaattacatatcataaaccgcaatattaataactcttttatcataagcaggtaaagaagagagacactaaacagtgaacactctaagtaacaattattacaaccacaatattagattattaggctcataaatataataatcaacaccaaaatatatatagcaaaagaatctttcataaagaaaataaacaaaacagagcatttctagattcaagatttatgacaaaacaagaacttgaacaactacacttttgaacgttccatgcatcttcatcatatttttggttactcacgtgtaaagctgggaatttgaacatatatatgtctactttaatagaaaaatttcaaaaatacaacaaagaaataattatttgggtccaaaaaattgtatacttttgtgggtcgctccaaaagctaataatagattttaacatatgagaacaaaactgcaaaggccagaaatatttctggcaaataagaatcgaagcttagaatcattgttcaaggaatcataccttttttacatgcttaaaattgtttcattggcttctacacaacaatcaatcaatcaggtcaaataaactaataaaataatttttctacattttattatctttttttttttttgatggagtaagctagaggcaaaactaaatcagatctatactccaatactcatagtcaactaagttaattaataaaaaattaacacaaagtttcttcacttggaaaaaaaaagataataattatcttttcaataattgagtctccctcgtcatatgggtcatgaacacatggaggacctaaattgttatttcaagaaaataaaatttaaagcatgtccccaaaaaaactaatatcaagaaacttatcaaaaaatttatgaatctgaatatcactagatttgattctaaatcaaccagaagaaagaaaaaaagataacatcaaagagaaaaataattctagaaagttttttgtttttgaaaagtaataattatagaaagttacctcaacagggctaagtcttctaaggaagaacatatcagcagtttcaggtacaccattaaaatttcttccaatctttctacaagcaccagaatctctaagacaagaactaattttaccccaatagctatcatcagaaactcgatctttcaaccaaccagagtaatcttcaagataatagtcaagataaccccggttaagtacggttcgaccggatcctttatctgtaaccgcgtaagcgaagatgatgaaaccgataagagcagcgatgatgagaagcatgactactaggtatagccacataaggaacttgttacggtaacaagctccagcgaatccagctaaagatacgaccatgattgagattccgatgacgatgagaggccattgaaggaatcttaaacagtcggtggagttagctcggctgcttaaccatattccaccgccgaggattggtattgagaggaggaaagtgaggaagttgactaaacctatgagatggttgcttgttctcatagcttagggttttgaggttttcctgagctttgtttcttgtgcaaaaagactgagaaatgcagagccagaggcgttaaagaagaggtgatgaagacataatgggtttacatatctctgcacatgctttgacacgtgtcagtacagtctgattttgctattgggtagtgtgttattgtcatttgattagtttattgatgtttaccaagaaaaacaagaaaattttgtttatttttttgtcgtgacgcaaatatttgattttattatttttaaggctgttttgactaaaataaaagatcttcatgatattgatatctaagctgcatatatataaagttaaagtgataagtttttacgtaataattaggttttgaaagttacgtaagataggattaggttttgaacgtttgagatccacatatgttagtgaccatgtcggtagctcagtgatatttttgaagattttatatttgtataattactgaattaatccacatattcatgtttttgaacattttttcttatggtgatgaaatcatataattcatcacttgggttggtatgctcattttttctacatatcttgagctagaagagttaaatatcaagacaactctcttaaatggtattctagaagaataaactatatagattgattttttctaagaaaaataagtaagtggtgaagttcaaaatttgaaatgatggacttaaggaagaatatttcaagatgttgatatgctttttaatggaagatgtttaaggctatatacactccattggagcacatttcaaactcaaagcagtatatgaacaggaagagaagaaacatgagaggatcaaagtagaaaacatatgtatgtgtttactaaagtatataaacaagagatttggtatggaattttgctttacctcagaagatattattggagttactagattgtatataatgtgtagactattcatttgatcttgatcttgacataagtagttcaatctcagtttatgcctaaattttcgaaatttatagtttcaactggcattgtgttttgatattgcgctgatgtcttttgaccatgacatcacttcattgtaacgcttaaccaattttgttattaaaagtcataattttgcaagatacttcaagtggactattaattattcaaaatactccaacggattaaattacttatagccaatctcagtcttgaacgaaatgctacgaaattgtatatctcgtctaattaaagtattaatacaaatgagaggtgcttattcaaagaaaagaaattacaatacaactataatgttacgtgtagggaaataatgcgacaatacaaaggaatcgattcctttttcatagtctttgtaaattattcgtcaatttcaaatcaatttgcatggaacacatacaaaagccggttgtcataacgtccatatctcttaaagaagtcaattgaataaatccctacaccgaccttactgaatacacacatttctatataatacgatagaaattttgtattttaataatttacactagtttcgtcatttgttatcatttggattctagtcccgcatatatctgtattatttgtaggttatgtttgttggagaatccaaaacaagaagggtttaagctcaaaatagcttttgttagatagataattaatgagatagcattagctaattaggagttttcatttagataggaccaaacaaaaattgttattcttcaaaaatagaagggttgtctgaattttcagccctataatagttggaatctcaacttttcaccataaatttttagtcacttaaaaaatcaccataaaaaattttaatctcgataaaactacatatactttcggatttgttcttaaaactatgcctccaattgaaccgaccaattaaccgataattatacatccggtttgacttatctaaaatttaaccaaattaatccgattttgactctattttaacccaattttgacccaagaaaatgtaaatgaattgtcttctaaaaagtaaaagtatttttatttatttgtgataaacaattaaaaatattaaattataattaattttagcaaaacttaatatgacaaaatataccccaaattatattttgagctacattttgttataaaattttgataatatacaaacatatacattttccttttaacaatcatttatattttttttataaatttaaagttatgtctttttttaaaacaaaatattcatttttcttccaatcataatatatgaacagagtgaaatttctcagttctcttcttatgcatcttgcgcttcttgagttaatatcatcaaaatttacgatctgttaatcaatgatccctcaaaattttgtaaggaaatattttgtcatttgtccacttcagattccgcttaagcggtgatgttgatttggaaacttctttaaaagctcgtaatctgttctgtatagaaaccagtttgaacattttgagttttcttgggctaaggcccattgggccacagaaaaattgatcactgaagttagagaatttgatgttaaacctattattggctagcttagaggcgtatcttgaattttaaggtttttgcaaactatccaaacattgtagctcacaaattaacttggattcataatcatatacatatgatagttttgtttcataaatattaattgaattttagttttatcatgtgaaaataaattgatgatattattactcatttttattttgagtaacgatttcattttttttttgttttgtgatcgtcataaactatacacatagagataatttgaacaaaaaattcgttcactttccaaatagtttttcctgacttttaacaccactaatcattcaaaatattattattcttgaaaagccatcgccaatatagcaacgaaatcctaaacatatcaaatcaaaccgttttttggggattcaaaacaagtcatattgtaataaaagagtttggcggtttgttcaattctaacaagggttttgtcacgccagaatcttcgaattgaatttggtgcgtacgtcatgcggatatatattttggatatgaataaataatacacatttttcatcgtgatttcaagcgacataatttaaggcttacatgcctattcaaaatctactgaaattttttgaaacatcatcaaaagaaatttgggaaaatgtttaacaaaaaaaaagaaactttggaaaatacacaaacggacaaacgcaaaacgttcattcaagttaatcaaacattttgttttagtccgagagaatactgcttttcacttgggtccaatttttttttttttgtggtccattgttatggtaaacatacaaaaaagcttttatatgtaaatggaagaatccgaagtttgaaccggagactaggaagccagaaacatacacactgttaagttgttaagtttttctaatttgaaaacctacgtaaattattcatttgggccattgaaaaacaggtcagaacaaacaaaaaaacacaattcatttcccaagtaactgaaaatctttaaagaaagcacaacatatctattttcttttaccattaaccccaaactcatattatccctttctctaaccaagacgaccacaatccaaaccctaatcaaacccaaattttaaaataaatagactacaataaagcaccagtattaatgtagttgacagtactgctccaaatctctctccctgaatcaatctgatcaacatgaccatgaccatgaccacttcctcctcccatgttcatctgccaggggaatccccacaaaaccctgtttggatcacttgtcgccatctgctccataccgcctccaccatttccaaacgcataccccgtgttctccatctgatggctcgtggtcccatacacgccatccatggccattggagactgagagcttccgaaccctagatgtgaagaaacccctagaggttgcttgttcaacaaggcatatgctaacccaagctccatctgttcgttgctaatgttattattattatagccaaaactcgccgttgggaatgatttgccgtcatgggtcatcgtgggctcaggggttgttctgaggcttttggttgcggaggaggagcgtttgtgtttccggtaagcaccaccgattgggatgtttcttaggattccacccttggtccagtatctcctacaagatttgcagaagtagcgaggttgagagagactgtagttgttgtagtagcagaactttgtgttggtggagtcacagcgagggcatcttaatgattgctctggtggagctggcctagtcgccgacaatggtttcttctggttttgataatcttgtgttgaacatgaagatactcccatcacattctatcaaaacacaaatttaaatgaacatctaaaaccaatttaatctcaaacaaaataatcataagaatgtgatgttgattagtacctgatgcatcgaagaataatccatctcaaccaattgagaaacttctttgaaatgtagaggagtatgagataaagagaactaggagaaagaaaggagagataaagagtgggagataaaggaaaagccaagcatcttacctcactatatatagaaaagaatgtggaagtagctagagaatttggtggcttcctcaatattatatgattacattttttaacgttactaatcaatgttattaccgtacgagggaataacgtgatccaactcggagcataaaatgtgaaccatgaagccgtttttattaataaagatttatcatgcctacttctgatttacaactaataaaagatcctttttcatttagagtggagacacaatacaatttgtctctaatttatgcttgttcatcggcttttatttgtatcatattaaacgaaaaaatatactgcgataccttaatacttcactttacatacaaataactatgtgttccgtagtcttacaaaacatgcatgttagatatatatagattgttctatcatgtacaaaaaattatatgttgcgtacattacatgtgatgatgtggcgaaagattgtttaactttcatcatatcggaattcgaatgtggtcgtgatgtacatgagaaatagtcatatatgtttttgttttatcttggcggattttgttagaaactttctaaattcaaaaacaaactattaaaaatccttaggcttcaaagaaaataatttatttgttcgattaataaaagatttgccattatatatatattgggacaacctttgttttttgtcttctggttattaatttgtatagaaatgatgagaagtgtgacctaggaccgtactatgatgtatcagaattggttgtttgtacgatgaccattttcaggcacccatctccatgtgtgtccccaacctcttttgtgtcacaattcttccattgagttgtcgtcacccaccacatggaacccaccttcatcttctaattttagtcaaaagttctactctcgcgtgaatcccaccacgctctctctagctggtcctatgtggtatcatctgtattttcttctccccatttgttatttttgttttgtcggcagttaaatttaatattactccccaaaatgttgggtgaaaggtagaataatactccatagttagttgtgattaatcatttcttggaccacattgtttctctgaggactcgaggtccacaaatatctgtgtttgtagcacatggttcatgacttttgcttccattattttaaatattcttgcatgtactagtttaggttttgtaacttctaagttatgattgtcggattcatgggttagatgttttgcttccatcacgattcacactcttgatttatgataggaaatgtaagaaaacaaaacattgtatattatgattataatagtgcatgcaactacctatatgcttctacaatattttatcaagcattcaagccatatctatatttttcatggactgtgttttatgcatttcctaacctccaataaatttttaataataattgtaaatgcgagttattgtattctatctaattatttttctttcttatgccattatttcacatcgattatacgacatcaacatccacaataatgagccaatcgtctataatgataatatctgcagaaatatttaatttgatttaagcaaagtacttgcttcccaaagtagcctcaagcttctctttgtcattcaattagttaaattatactcctattgcgcatattccaagatttattttgttaaatccccttgtaaactattttgaaaatctcaaaaactttgttaatcaactactaggctaaaaacattcctcgaagtacccataactcggttacctggtttttataacatattcttaatctaaaatctatttcaaacctctaaaacatataataacatgatcgaagaaaaaacacatgatcaactttttaaattaatttttaattgaaaaataaaacatctctctaacggaacaaatgaccatgcaaaagcaaagatttggccggagaatgtgtagcccatgatatccctatcaggtaaagtaagtagagacacaaaacatcgattttcgtaaaagggactaatatgaagaccaagatttggtctaaaacgacatgtatcggcatgatcacccatatccacagccaaatagatagtatattatatacatgtacgtaaatatgtgttttctttgattgttgtatgatcttagtataattttctagaaaaaaatcttagtataatatgatatttgaccgttggtatttgtgaccatctctacataggtgaagaatgagtaaatctattgagcatttcacacatttattttgatagttgggtctagggtgtatatatataaaatattgtggctatttcaacacactctcgtcagaattgattcgtataaaattattgggattatatatatgatactaatatgaaatttgattggttattgttttgggtgtccaaatctccggaaccaaaattcgaatgattacgatacgaaaacctactatatatactagattaaatttggtacatgacaatgggagagattgagagtaattaaatgattaaaatttgatttattcctattaaatagtgtaatttgttttgattatttctgattttatctccggctcttttttgtgttgaatgtatctttaagaatatttgtttttgtgaccgaaaatatcatatatgtaacgaataattcgcaacaattaagtggcaaaattaaaccattttttaattgattagttagatatcccaataactaaactgataaagtaacaatttaggaaaatgattacctcttttgataagagataaatgagaggtaaaaatcattcaaaggcgttactgttgtcactcattgttaatgcttagtttgtctccaaatttgctggcgactaactattctcgtttagacaactcgagaacatagagatgaaaacgtgagtatatacaacagaactcaaacaaaatattactattatatagataccaactaatcttgagtttatattttacagacactttggaaattaaggtgaataaacgttttgcaaggctgtcacattctacgactaaaattagtgattcataagaaatgattggtatccaagtaaggaatattgatcattacattgcaattggaccctcctcgtggatcaagtttaaaccaactaacgatgaccatttcatatctcttttgagttattgtaatataatatatttatttatttcattacaacaatcaatttttattaacaaattatagtttcgaattttagatcagataaaagaaacaaagtgattgaggatccgcatgataaggattaaaaaatgcgacacgtgacgaaaaaagaaaaaatctttgaagaaatcgagaagagagacaaagaaacaaaagtggggatcccagaaggctctgatagatatgagcatgtggtctcagtcaaggccaagactcaaagctgagaccaacccacttctattatagatacatacaatatttgttttatatcttgtcatgtattgatgtatatctaagtagatttatcataattatcgtaccatgctaagtgctaacgaataacgatcgttcatgaatccaaataaaatcacgtcaggtgctgcgacatggcttcttcattcggtttgttactgtttttttttcctctctttttctttctatgatcatcataaatgttgtaaaactatgttaaaaaatcgattcatgtctttttgtgtatgatgaggaagttttaacatttctttaggtatcatatatagtttatctttttgcatactataatatagttaactattttgtgcaaattttataaatcataattttttaaagtttagaatctatattggtattttcgtcctatacgaaaacaagtacaaagaattaattatacactacaaaaaaacgacattaattaattcatatagttgtacaactaatactataatccatcggttcttttttgtttgattttaggaaaaaaacgatattaagaaaacatattaaatgtattattctttgtgatttacaattttcaataattctaaacgaatgatattcaataatttttattaatatttacaatttatcaattataattaacaagtattgcattaataacttaaaaaatcaattttttataaaaacaattattctagaaaatccaaaaaaaaaacatatggagtatatattagaaaaaaatcccatggctgataaataaataattgtatatatatatatatatatctcacgcatacatatataagatatgatatcattactctataagatataaataattttattctatattttgaatagtccattttcatatgcaatttgaaaatttataacattataaaaaagggtaataaaacaagtagtggatcggaccagagattttgaggcgcaatttccaaagcgatctgcatctattcttacctccatcttcaagcaaagcatcaacgcctatagattcccatgcaacgctattttctttataacatataataaaaatatttctgttgctttttattcgtttcactttcctgacattgtttttgtttattcttactttctattcatagaattaatgaatccttatcatatgatccgttataagtctctgctttcgaacttaggaaaattaaattcgcattttttttatcaatgacaataatcataatcactagctaggttaggtataacttataaggtctcgcacttccttgattttaaaataactttgtctttaccaaacaaaaataactgaaccgtaaataccaaaatattttggataacaaaaaatattttttaaaaatatatatttcaaaatattagttatttctaactaaaaatagttgaaaatatatataaacagtaaaaatatttaaaaataacaaaaaatattgaaaaaatgacaaaaatatccaaacataactgaaatatccgaaaatattcaaagcaaataaccgaatgaatactaaattttaaaaccaaaagaaccggagccgaaccaaaatcgaaccaaactttcaaaataatcgaataaatattaaactttagaaccgaaaaaatcgattaccgaatagatacaacctaaactgaatggataacagaacgtcgagaattatttttaatggtcaaatcagttgccaacaattttgaggcattaatactctcaattttgccaaaacaattttgatctatgaatctggaccgactctactctccaacccaattggtattttccatctacttaaaatatgggcttgtacggcccaaattattattttactcatatcgttttaacgtcattaatgattttctgaagaaacgtaaacatttgcactgtatgacgttttagagtgacaaaaacaacagatcaacaaatttcgattaccgtagacgacacgatgtttcacacccgactacgaatcacgacgacttatacaaaacagcaaaagcgtaaagacttgaacttaaaaccatggcgagaccgagacgaagaaacacagagatcggtgatggcttcacagagatattcaacagagagattggtttctctcatccaatcaccatctctcgtcgaatctccgcttctgaggttctcattttttttcaaatactcttccatttctctattttctccgatcttgaactctctctttacttgtttccatttttgaatgagacttttcaacttgtgaagactttccaatttcttgctcaaaattggtatagaaatatgggttttggatagttatgtcatagttatcagaaagtcttctccttttctagatttcagtttcgaatcatggatcttagtgttccaaagacgaagtgttatggcttatcagtgttttgtaggatgttgagaaaatctgaaccaatccaaagacttatatcagttaaaacactcaaattttaagttctttggattgaactgtattgttgtttttcttttgttacttcaggggagagtgaagaaactagatctttacgggaagttaaatggtcatgagggatgtgtgaatgcagtggagttcaattcgactggcgatgttcttgtttccgggtccgatgatcgacaaatcatgctctggaactggttgagtggaagcaggaagttgtcgtatccctctggccattgtgaaaatgtgtttcagactaagttcataccttttacggatgacaggacaatcataacatctggtgctgatggacaagtaatcttgtaatcttaagaaatcgttaagtcatttcagcgttgttactttctttgtaagtagtttaatcatttgatatccattctgtttttgcaggtaagacttggtcagatcctagaaaatggtaaagtggagacgaaaagactagggaggcatcacggtcgcgtgtacaagcttgctgttttgcctggagatcctaacgtattctacagctgtggtgaagatggttttgttcaacatgttggtctctatatctctctcatgctcctccattgtgtttctcattgtggtctctgaacttgtctttattatttttgggcagtttgatatacgcagcaacagtgctactatggttttgtattcctctccgttcacacaaggatgcaggagacatcactccagcagtaggatcagattgaattctattgcgatagatccgaggaattcatattatcttgcggttgggggttctgatgaatatgcacgagtctacgatactagaagagtacaattagctccagtatgtcgccacgtcttaccagacgctcctgtgaacactttctgtcctcgtcatctccgggaaaccaacagtgttcacatcacgggattagcatattccaaagctggagaactattggtctcttacaacgacgagcttatttatctgtttgagaagaacatgggttatggttcgtcgcctgtttctgtctctcctgagaaactgcaagaaatggaagaaccacaggtgtatataggtcaccgcaatgcacaaacagtgaaaggagtgaacttctttggtccaaatgatgaatatgtcacgagtggttcagactgcggtcacatttttatatggaagaagaaaggaggtaagcttgtccgagctatggtgggtgatagacgagtggtgaatcagttagagtctcacccacacataccgttacttgcatcctgcgggattgaaaagagcgttaagctctggacgccaatgtcaaatgatgttctttccctgcctgaaaagatcgataaggtaaatcaagtcttctctcaaccaatgtttaatgttgagacagtgtcacaaacactgaaactgtattttgtgggaaatgcaggtgatggaattgaacagggtggggagagaagaccaatcgagggtaacactgactcctgatgtaattatgcatgttcttaggctacagagacgtcagacgtcggcttttacagagaggagatacgtttcaactgacattggcagtgatgaaggaaatgatgctcgcttcattgcaagcttagtagccaacgacgatgagtcttcagacagagaatgtactgtaagctgagtcctctcaactagtgtaatagattacaggtcttgttccaaatacagatacttgtggattttgcttgtgtgttgtaatttataataaggaaaagaaaataagaacgagaaattagtaatctaatcttctttcgacatgacgaccaaagcaaatcttggttacgcaggaaaacagaaggttaaaaaacaaaacgtccaaacaagttcatggacccatgctgtgaatttctttcattcaatttggatagagtaatgaaatgaggagtttgcacaaggaaagagactctttcctttgtacaaaagcatagactgatacagttcttgtaagctctatacaaatggtaaatgcaccatagcgccaattttttccactagttcagccttatatagtatgcaaatgtagaccaaaatcaccttctgaatcaagagtaggcactgaagcatcaaacttttgctgatacaaagccaacagagtaaggtatcctcctgcgaatgagagaaacaacttcgttaagtacattatattatcagtaaatcattgtctataagaggtagcgagaacaagatgtctataccaattgagtttaaactgctttggaggagccgatatttgcggttgttgactctaaggtctggtttgatatgggcaaataggcagagcagtttcgactatgaatctcccaacaccggaatcagccaaaaaatccttcttttgagacagtcttaagtgaaaatccaaccaagaagaattccgagaatcaaatcccgtatgttctgttatacggatctccaggaccgggcctccggaatttaggctcttcaaaaccgctgtaaacgttgtcattaaaacccatccgttcattccttagaagctgggtaatcccaagattgttaccactttgtggttcattccacttattatcccagtgtccatttgacaacaatggatttgctgaagcttgtctaggcagctgtgtgaaaggagacaagccagttccttgtgtttgatccgttggcctcgagctaatcccatatgggtcagagaacgaagaagagaagttgtttacgttcctgggatcgtgaaatccattgacttgttgtgcagccagagacctctgcgccaacaattggagtcttgcatcattatcaaatgaattcagttgagaagagaaccctgatctcaaatcaaagtctgctgtttccatcccattatgaagtcttccccttccaacagctaaaattgcaggatcaataaactcaatatctcctgcagcattcaaatttccacttggaggtggtacatgatatgcgttcctcaacaaattggctgagtcaagtaaacgagttcctgcaaattgcaaagtatgtgttacaggagtttcagcttatggaaagttgaaactatcctttttttgggaatgtaacatataatacctgatgcaatatcagaagacaggtcgcctctttgatgtgaagagaaaccgggaggaggtaacctgttgggagcagaaaatccgggaggagcagaaacttgagtcctcgccactacaagaggacaatggtgaaaagttaagaaaagcagaggaaacgacagtttgatgaaatactagttggttaaaccaattttaattgcgaaaaacaactataggaagctatgatatatactaaccaggactcttgtaagaagataatccaggactagtagcaaattgttcatatccaccggaatagtttgaggcaaaaccattttgactgccaagcttatcctgatacatatcacggttcgctccaaactcttgaagaggctgatctcttgacaactgcccatatatgctgtaacttctattgtcatacgcttgactatttgattcttcatgccgagcaaaagagaacctagactggtcattatgttgctttaggaggttagaagattccagagtactggccctatgatcactctgaccaagtaattttgcaaaattgtgttgcgaagtcaacgattcatcccagggatcaaagtctaaaatgtttgaaatgatatcatcctctgtattctgaatgttgcttctgccttcattagcaaataatgaatgctccatattggacatagctttctcagaaaatccatttggaagatgcaatctatcactacctatttcaaaggaggatccagtttttgaatccatcccacaagaagtttcccggttctggaacgaacgagaagctagatgatttgaatccagaattgagattgatgaactaaacttagaagtcgagtggctaacagcctctgcaataccacgtctgttgttattgaatgatgagaaatcattgacttccaacggttccttaacatctatctgggattgcaaacctgatctccaatcccactcaggccttgaaccatgaattccattcagtgatatgtcagcttctgcataagtgtttgtaggagactgttttctacattgctcgagattttgtacatcgttatcagattgtgtaatagaaccaagatcacaatgagtaccgataaccactggaacaccaggggtttcatccctagaatttgtagttatccccatccatgcaacatcagcagacaatttaccaacatcgaagacatcttcagcaatttcacttgtgtgttcaagagaattctcaacagcagaaggcttgtcaatgactctgctattgtaggaagactctactaaacaggatatctgattgctactagggtctctattaggtgatgtagttctcttggactcgggatccaacacaatcttctgctgcaaaggcttcaacacaccaggtttgcttttttcagccaatgattgaatttcttccttgagaggtgctttctgaagactgttactagaggatacaggcccattagctgcctttgtaacaactgtagacgtagccaaagttccattctctgatgttgatctttgattatccaaagatccatttgacaaagctgaagttgctaaagagtgttgatttgttaaacgtgcccccctgtaatagcattttcaattttttttaaatgaccccataaaatagttcacatagacagcggcttgcagaaaaaaaacttaccatgatgctgcagcaggaagagcagttgatttacccgagctcccactaggtggggaactcttaggagcactaactgaagtctgcaccaattaaatgaagaaagaactaaacattaatccaatacagcattttcgtaaaacagaaagtcaaggaaaataataaattctaaaaaaacacatgttcacaatttggagctatagcagagctaagtttctatggaatgctgcacatcgacacaagtttatagtgagcacatccatgcatttacccatatatgactaactaaggtggtaaagccacatgagataagaatgtaaatgtgaagtttcgttgatacggatgacacaagccaaaaagcaccttatatcacggtaaattagaaaagcttatagagcttacactagaaggaacttttgcaattggatttccagtagaactgtcactggtataagcatccaatggtggaggtagcatgctccctgaacggtattgcatagtatttgttgctccagtgatttgctgaactctgcttattcaaagttactaaaagaattaactaaccgtctaaatacctgacttccattacactacatcttctccacatatttattcccactaataataatcacgagtacaagaggaaaacttaaaacaatatgataatgaagattaccttgtatgggctgatatgatctcatcttttgtaaaactatcctcttgagagccaacctcatgcaaatagaggcaatcctgattgttgcatgcctgggaatagaacaaacaatccatattccaataatatcagtagcaaatttcaactgaaaagaggaaagctgaaagaaaatttctgggggccagagagcagaacaagagtgcatatagggcataccacgtttctcaaccatgcatggcaatacttggttgtcccaaaacatgccctgcagatataaaagaaaaaaaaattgaagtcaatgaacagactgagtaatcagttttaaacaacagggtactcgagatgacttacttcagtgctttaccatccaagataaacccatgaacagactgaatacatcgaatggcctcttcctctttgccatatgtgatgtatctggagtaatatttggttataatcagaacaaaataataatacaaaacaaataacatataagaaatccattcatgctaaacgataaatttggttgattgacactagaaaacaaaactcacacactgcatgtgttgttaggaaactgttggatgagacctgttgctgttcgggacatcgaaacctttagaacctttccatactgaccaaaatattctttacgctggagaagctgaaaagaaaaaagaaaaattcccgtaaggccgtaactaagcagatcgtatgatataattacaggtttttcgaggaaaaaatgacgtacatcttcatctgctagattaaggggcaatccaacaatgtaaacaagatttctttgaaccactcggacacttgttagtggctttctcccatcagaagatttcggtttcgacttttgtatttttttgcgatccatgttgccttcagaggccagtctgagaacagaaaatagataagaaacatcagcaaactaaaactgacactgaacaaaagttcacatctcaggtgtcatatcatatctcaacctctcctgatcaacagtcatcccaacaatcttttctttgtcatatggagtgcggcaagctggacagcgcccttctgattgatctttctctgccatgtccattatatggtgccagcaccaaacacaaatctgtaagattgtaggtaaatacatatcagatcagaaaattatcagcagaacaaatgtcaatgatctctgaggccaccacaataagtataaattggtatgctctaagtatataccacaagccttcaaagtaaaccatagcacaactgaacctaatttttaatcctgatcacaaaaaacaatgaaaatcagagagagtgtctggacctgatagccacatttgcaaggcttcaattgctggtcagtcaaatccatctcctcagcacacaaagggcaagtcttttcaccgtaatcactcatttttttcctgaacaagacagagataaaaagactggaatcatgtctcatcataagacatacaagcaaaagcaaaccatactgacaaaactacctaaactttagtaattcagcaacattcgtgtatagtggcacagaataaaaagatcgacagttttactaataacagttcaaattgaacatcttcccgatcaaagaaactaatattatacactaatccaataaaattgagttagcaaatcttaaactaatccaaagtatcaaactttcagatcgaaatcgagaatctaacaagccaaagtccataatgaatccgtgcatgggacgcgacggttcaataagagacgcgtcaacgaaacagtacaatcgaaaaaaaaacatatcgacgacaatccaaaatctccatgagatttctacatacaatcggaatcagtaaacacgttgatctcaataactactccggaactaaaatcgaaacaccagaattagggttttgagattcggcgattcaaatcccaacatgaaagagtcaattacgagagaagtgaaaacatacggctgagtagagagattcgatcggagattgtggaagatgaagaagattgagagaagtgggagattgcaagagacaacaagtgagagagattggatggctgagattttggccgcttctagatccacgattgcctaataagaagaattaactatgcccttagattattagtttattacggatctgccactatctccggttcgattatttttggttggcgtcggttaaagactgatttaatttggtggtggttttatttcaacccaatgattatattttaatttttgttcttctacatatccgatattttcagaaatcatgtggaaataaatctaaaaatttagaaatttagttacaagttttataaaactaatcgtctaatacaatgaaatttcatcaaaataattatttttctataaattatgatgatctaagtaccggattaagaacaaattacaaataagaatactgtacacaacaaaactcaaacatgtgacttcagaaaatattttactcgtaaattaaaacataaacatacacgaatactatccttcatatatatctttgtatctaagagtaactcaatgttcaaaataaaatacagctaaaaaaagtaataagcaaaagaatatgggataaactattttaagctgaaaaagtaacaaagtgatagaacacactcatgcatcattagtttatgtaacaaagaagaactcattttaagttgttgcaatggagacttgcttcaaaacctttgaacagtccacaagtttcaagcttttaaacgttctacagatgaacaatggaataaacgactaggccattcttttcaaaagagtgttcataagggaaatatcatccacatgcatttggaagctctttataagctttcgattttgcccgtacctaatgattttcgtttgtccatctaggaagtactcgatttaaagtttagaactaatttaaacaatcattgttttgataaggttaagtatttgaaatcacttttagatgactttggaatagttttagaaggttataatccagtgaagtttaacgatgcatcgttattccttaacataaatagaactctaacttaaataaatttcataacaaaatcaatatttttaacgataatgttggaacataaattatatagcgcatacgattatttagaggaatttgtaaactaaatattaatatcttgttcgaactcgaaaatagcttacttttttttcttcataagtgttggctttgatatataacaacaaagtgttacaatagtggaaaactccacttacagaattcgataggctaatgagcattacgatattaaattatcaaacacatatagataatctcctttaattttcatctactcagaattgaacattttcataatctgcaagttctgctttatcttgtctgctttcattggaaatgaaatggtatatgttggtcggtaaaagacgaatcaaatttgtaaactaacaatgaactattgaaagagtaaatcttacagaaatctcaaaagaaaataagatactaaaaagggagaaactgaatctctcacttaatccccattcggggaacctttacacttaacacgcgatctgatggagccatgagtgcaatccaatcaatccaaaacttctgcaaggccctcttacacagatatcctaacgaaaagtaaccacaaagatccgcttctcaactccaaaaccaatttgcgcaaatagagattttgcctattttgctatctctttcttcttaaaacaaagccttcttaaaacaaaagtccaacaacaaaagtcaaaccgagcccaatatagtaacccatcgaggaagggataagaaagccatacaacacagagacatgtgtcgcctcatgaggaaatcacagacacgtgacgagaagaacgtgtttgtcgagaatgccaaccactgccggcatgttttctgagatcgaagaacgcctacccaccgaaagttcgttcactccgcaaaaccagaagcttcaagtagagcactgaagaccctctaaagaaattgcacatctagtcttcctcttccaaacgaaattaaactcagatttaacaaacgaacgaaactttctttcatatgaaggaaagcgtccaccattccaaagtagcatgaagcatcacaatgacgtaagcaaccaaaaagattttccggtgagacttaacgtcgccatgcccatcaagtgaaactactacaaaatttgaacgacaaggcttatgaagccgaaactcttaaacttccactttttcttcgtaatgaagaaacttaataagtttattagaaataaagacaaataaaggcaaaataccaaagaacggcgacgataaaaccggatttaccggtaactataactagaactcaccgtacggtattgaaacaaaaagttggaccatgtccgaacacaacctcacaaacatacgggaaggcatacgaaacaaagaattttttctttttctcaaaattttagagaaagaagagaataaaaaaattctgatcgaaaatagcttacttaaaaatcataattgaatagtatcttttgtttttaaactaatttagtctatataataataatattattaaccatcgtaaaccacacatgatattcaatacttataataaattaatcgcataaaatacaatacttaaaacgagtgttatataattttacgtaacgtaaaacaatacaaaattttaattcctgaacgaataaaacgagtatattaattaatttattgatcgtattaaaacgaatatgatccaattaagattacaattactaaaatccccacactattattgtcattatttaactatggcagatagatagatacagaaccgtaaaggacgttaggaagaggaagaacgttgacgaagtcaacaacgaacagaaaccgtcgatttgaggcggctctaatctcaaccacacgatcttctctgcctttccctcttctctcttcttcttcttcttcatcttcttcctcgcaattaccgcgaaaactcatctctgctcaatcctcaatctcagtctctctgttgactccgactgttatataaaaccatacaaataccttcagattcactacttcaaacctcaaagcaaccactgaatctcgactttgatcaattgagagagaaatgaacaccggcggtggccaatacacggattttccggcggtggaaactcacggaggacagttcataagttacgatatcttcggtagtttattcgagatcacatctaagtatcgtcctccgattataccaattggtcgtggagcttatggaatcgtttggtatgtttccttctctgagctttttcttaagttttattctttgagatcggagtttttaatttctggattttgattttgtgaagctctgtgttggatacggagacgaacgagctagtagcgatgaagaagatagctaatgcttttgataatcatatggatgctaagcgtacgcttcgtgagatcaagcttcttcgtcatcttgatcatgaaaacgttagtgtttttgttcgattttgtgaaatatctgtagaaattagtaaataaatcatgattagggttttttgatttggtattgcaacagattatagctataagagatgttgttccaccaccactaagaagacagttcagtgatgtttatatctctactgaattaatggatactgatcttcatcaaatcatcagatctaaccagagtttatcagaagaacactgtcaggtaaactaaaaactgttcttggcttttttctgggatttatatttgatagaagagacatgaaactgatacttgatttggtgtttttgttgtcatggaaacagtacttcttgtaccagctacttcgaggactgaagtatatccactcagctaacattattcatagggatttaaagccgagcaatcttctgttgaacgcgaattgcgatttaaagatttgtgatttcggtcttgctagacctacttcagagaatgattttatgactgagtatgttgttacgagatggtatagagcacctgagcttctgttgaactcttcagattacacagctgctattgatgtttggtctgttggttgtatctttatggagcttatgaatagaaagcctttgttccctggtaaagaccatgttcatcaaatgcgcttattgacagaggtaaaatattttagagagttatgtaattttagcatggtttaaagattctgccttttcacggaatatgtgatgaatttgtttgaatcttgcagttgcttggcacaccgacagaatctgatctcggttttactcacaatgaggatgcgaaaagatacatccggcaacttcccaacttcccacgtcagcccttagctaaacttttctctcatgttaacccaatggccattgatcttgttgacagaatgttgacgtttgaccccaacagaagaatcactggtaagtttcatacatgttctctgttggtttttcttaccatcactatgttttgattaaaaactgaaaataccatcttgtgcagttgaacaagctctgaatcaccagtaccttgctaaattgcacgacccgaatgatgagccaatctgtcaaaagccattctcttttgagttcgaacaacagcctctggatgaggaacagataaaagagatgatctaccaagaagccatagcactcaatccaacatacggttagaagtgcagcagccccgtgaatgcctggtattacccaataaccatccgaatggctacttagtatctttgcctgttcttttattcatgtacttcttccacatatgtaatcttgtaacttttatttgtttgttcatgttatttactgctagtgattaagtgtagctccaatgtaaagtactccagttattaaagaatatctatagacttttttacttcacatactcttgagtcttccctagtaaacaaagagaagagagaatataattttgtaatgtacagagcctcaatatttgtgggagacattatagagctagagccagagtcaatgctgtcgccgtgagttgtctattctcattcaatgactttcaatagattttagtgggattggctttaggtagcttgcattattgaagtagaaatggtcaattccttagcaataattaggcacaaatgtgtctttctttagtaatattgtaatatcctttgtctgacaatttagagttgacttctaaaacgttgggttggaaataatgttgtcttcacacaggctgttacgaagcagacagtgatggctcaacttgcatcaacggaaacctttgagtttttgttttactttcttaatgtttctttatttgaagctgctgcgcatggagaataaaatatcgtggacccgagaaagtcatcattgctgtattattacttatactgtatatatgtttcagaatttcaggccattgttgacaaaaatagtgaaagatttctgcttgattttgagacatggctagttcagttactggcgatgcagaaacagcgatatcagcagattcaagcaccaaacgccgtggtggaggttggattacctttccgtttatgataggtgagagattctgtttctctgtttttatatttctcataacttcataaccattagagcttggaagaagaagttgaatttatcttatctttctatggtgcagctacgttgttaggcttgacaatagctgcgtggggttggttacttaacttgatcgtctacctgatcgaggaattcaacgtgaagagcattgcagcggctcagattgctaatattgttagtggttgtatctgtatggttccagctgttgcagccattgcatctgactctttctttggaaccattcctgttatctcagtttcagctttcatttctcttatggtaaagttaataaagagtccttgacatttgtttttatcagtttctctctgaaacagaaattcactaattctactcttgaccagggtgtagctctactgactctaactgcttcacttgacactttaagacctagaccctgcgaaacagcttcaatactatgccagtctccttcgaaaacccagctcggagtcctttacacggccataactctagcctctataggaacaggtgggacacggttcacattagcaactgctggtgcgaaccagtatgaaaaaactaaagaccaaggaagctttttcaactggtttttcttcacaacatatctagccggagctataagtgcaaccgccattgtctacaccgaagacaatatcagctggacccttgggtttggtctgtctgtagccgctaatttcttcagttttttggttttcgtctcggggaaaagattctacaagcatgacaagcctttgggaagtcccttcacaagtctactatgcgtcattttcgcagcattacgcaaaagaaaagctgtggtttccaccaacgaaaaagactaccacaatgaatcaatcacaatgcccacaaagagtttcaggtagaaaaaccggctcgaaaaccgcagtttcattcttgcactgagaggccgttctaatgagttttcaaatacgcaggttctttaaccgtgcagcattgaaacaggaagacgaggtaaaaccagatggcacaattcgcaatccatggagactatgcagcgttcaacaagtggaagatttcaaagcagtcataagaatcatccctctcgccttagccacaatattcttgagcactccaatcgcaatgcaactaagcttaacagttcttcaaggtctggtgatggaccggaggcttggtcctagcttcaaaatccctgcaggctctctccaagtcataacacttctctccacttgcctatttatcatagtcaacgatagggttctctatccattttaccaaaagttaacgggaaagcacctcacaccgctccaacgagttgggataggccatgcgttcaacattctaagcatggctgtgactgccatagttgaagcaaagcgattaaagatagtacagaagggtcattttctcggatcatcatctgttgctgacatgtcagtcttatggctcttccctcctctagtcatagtaggaatcggtaaggatttgattccggataataattcattctacgagttcagatcaatccgaccatgttcttgttttttggttgcaggagaggccttccatttcccagggaatgtagctctgtgctatcaagagtttccagagtctatgagaagcaccgcaacatcgataacctcggtggtgattgggatatgtttctacacaagcactgctttgatagatctgattcaaaggaccacggcgtggttaccagatgacataaaccatggaagagttgacaatgtttactggattttagtcataggaggagtcttgaatcttggctattttcttgtgtgttcttggctatacagatacagaaacctcaaggatgatgatcataagcaagctgcaaatgtctctcactgatctttaagctggagaaagaaagaacatgtcctttgttgttatcatttgcatttctttacagagagctttgtctgaaagtatctccaatttgtagccattgaaaaacagtttttcatatgtagaattgatttggaaatttgtggtaatataatcgttttgtttctgtgattcctgagtacaaaccagtaacacaattgatgttgagcttgtgatgcttctgtagtgcctaagataacaatcttgtgattctcgggctgctttttgatgttttctgtctttgacagagacactcatgacattagtgaatatttttgcaggagttatgattaaggaagatggtgaatctgaatatgcggaagacaaccattttaaaaaggaacaggtgacaaagaatgtgatggagaatctagaaaagttgattactacttataggatgacaaagcattattcttcttaagatgaatggggatatggtgaatcttggatgaacaataatgcatcggtagcatcaaagcttgtcccggtgagtagtctattatcattcaataacttgttgattgttttgtgggctacttgcattgttaatgtaattccttagtactaaaagacaaattggtctttctcaagctagttattcctctacatgacatgttaagttgacttattgaatgttattagcttgaccgaggttttgctttcacacatgctgttatattataataagctgacagtgatagtttaactcccagcaacgaccacagtgagttttttagtttttcttgtgagactagaggctgctgcacatggagaataaaaatattgtgatcatcagtttgaatcattctcgttgttgtttcattggcttatttatatatatgcttttttttctggcaattgttgaaaacttagtggaacatcacttgttgttctttagaaatatgtctggttcagtttcccgcgatgcagaagctctgaagtcagcagattctagcaccagacgctctggcggcaggatcaccttcccgtttatgataggtaatgtagtttttatgttttcattgttgcataactatataaagccacagaagaagaagagagttcatgtatattgaagctagtttctttgtcgcagtaacgttgttcggcctaacattagctacgttgggatggttacagaacttgattgtctacctgatcgaagagtacaacatgaagagcatcgcagctgcgaagattctcaacattttcagtggttttacctttatgttccctgccattggagccattgcagcggattctttcttcggaacaattcctgttatcttggtttcatcattcatttctctagtggtaaagttgatttgactcactctcatttgttttcatcaattcctctcttcgaaattctcaaacagaactcaccaattctactccttgctcagggcgtagttctgctggctctaaccactttgtttgactctttaagaccccaagcctgcgaaacagcatcaaagttatgtcaagcccctacgaacatccagctcggtgtcctttacacagcaataactctaggctgtgtgggagcaggtgggctacggtttaccttggccaccgctggtgcgaaccagtacgaaaaaactaaagaccaaggcagctttttcaactggtttttcttcacatggtatttagctgcctctataagtgcaacagccattgtctacgccgaagaaaacattagctggagtttcgggtttggtctgtgtgtagctgctaatctgttaggcttgatagttttcatctcggggaaaaaattctacaagcatgacaagcctttgggaagtcccttcacaagtttacttcgtgtcatcttcgctgccatacgtaaaagaaaagctgtggtttccaccaacgagaaagactaccacagtgaatcaaagaaaacgcccacaaagagtttcaggtaaaaccacctcaaaaaccgccatttcagtctgatttttacaagaaagggactcgttgaggccatctaacgaatcctcgtgtatgcaggttctttaaccgcgcagcattgaaacaggatgatgaggttaattcagacggcacaattcacaatcaatggagactatgcagcgttcaacaagtagaagatttcaaagcagtcataagaatcatccctcttgtgttagctatattattcttgagcactccaatcgcgatgcagctaggattaacagtacttcagggtctggtgatggaccggagacttggccctcacttcaagatccctgcaggctctctccaagtcataacacttctctccacttgcctatttatcatagtcaacgatcggtttctctacccattttaccaaaaactaaccgggaagttccccacaccgattcaaagggtgggaataggccacgttttcaacattctaagcatggctgtgactgccatagttgaagcaaagcgattgaagatagtacagaaaggtcattttctcggatcatcatctgttgctgacatgtcagtcttgtggttattccctcctctagtcatagtaggaatcggtaaggaattggatccagatcattttattcgactcagaagtgagttccatctatttatgttcttggttttgtcttttggttgcaggagaggccttccatttcccagggaatgtagctctgtgctatcaagagtttccagagtctatgcgaagtactgcgacatcaataacctcggtgttgattgggatatgtttctacacaagcactgctttgatcgacctgattcaaaagaccactgcatggttaccagatgatattaaccatggaagagttgacaatgtttactggattttagtcataggaggagtcttgaatcttggctatttccttgtgtgttcttggttttataaatacagaaacctcgagaatgctgatcatgaacaagatgcaaatgtctctcactaaggtggagatggaagatgtaatttgttgttagcatttgcagttctgtaaagcgggagctttgtctgaaagtatctcgaatttgtaggcattgaaaacctttttttaactgttgttgtagaatgaatttcgaaatctgtggtaatataatcgatgtgtttttgtgattccgaagagaaaccagtatggtcaagcaaagcgaaactcaaggtttcttggtattgaagttactgtagttagtttgtttcggttaagcatgacagccttgtccattgctttcatagcaaacaactgatccgttccaacgagttccatccactaataaaacacaaatacaacatttcttagtttgatgacttgagaagtgtagaattagatattgagctgacttgattttattgattcacaaattatgatatttatacacaatgatctctatcaaaaaataaacataaatccttaaaatataggttataaactctatcaccaaagatattttactaatcctaatcggattacacatatccccaataagaagttggaggaaacaaacacattactctcgctcgctcactcactctgcagacaagtctaattgtatgtctccgttgttgttcatagcttttcttgtttattttgatctttcgtgctaacgaaatctggctttctttcaagtacgatgactttgataacaatgtgattggtctatttatggattgccatgactatttatttatatttatctgtaaaagtttaagagaaaaatatctgccaattcataattcattaaagaaataagaaaaacaaataagtattgttcggaaactaaccattacatttttttaactcttaagtactacaagacgaacaaggaaaactgttacactgatccgttatttaacgactctatctataactattttaaagtaaattactaatgaaactgaatctaactaagattttctgatgaaaaaaaagaaggaaattttgaccaaagtcaaaccaagcttataaaaaggaaatttttgttctcatcgctatcagaaaacttttacagagaaaagcgagagaaagaagaagaatggagattgattctgagatttctgattcatcgtcaagcaacaactcgatgatccctcctcttcctcaaaaccctattttgactgtgaaactctctccgatcattctccatgtacgacgttgctcgaagaacattaaaaagaagaaacgtacacggacgcctttgaagaagaagaagaagagtattagtagcagtgtcgaatctataatcggagtctcattcaaatccgcctctcagaaacattccaccaccgtaactcgcgacggaggagttaaaaagatttcctcttgggtgaaatctaggttacttggagaaggggcttacggttgtgtttacctagcgacaagtaaagatgacatatacaaaacagagagagcgatcaaaagtgctgatgttttaaaggcttggagtcttatgcacgaaggaaggatcttaagaagtttgcaatctccgttcgtgattcgttgttacggccatgaaattgcacgagaagggactggtcatcaatataatttgattctcgagtactgctctggacagtgtcttgcggatatgatcgaagataatcaaggagggataccggagtttgatgtcaagcagttcgctatagatgttctgtctggtctcagttacattcaccgcagaaacattattcattgtgaaattaaaccggacaatctcttactcagccctgttgatcaccggtttaggtctaatgggtttttgacaaagattgcagatttcggtttatcaatggagaaaggttctaaagagtatggaaacggacgtgggcacatgagagggacaactaggtacatggctccggagttaataggcggtgggcttctggattttgctgttgacatttgcgcgtttggatgttctgttttggagatgctaaccgggaaaagggtttggggagaatatggtgatttggctcatgatgattgggttgatttgatcggtcacagtgatctcactcctcaaatctcgattcggttatctgcagaagctcaagactttctgatgaggtgtttggttaaggagcctggttcgaggtggaccatcggtgaactcgtggaccatccgtttctctgttcagatgaagagttttctcacaatggatttgtttatgattgagtttgtttatgattgagttctgtttcgtagtattggtaactgcaagtattttgtagtatttggtaaagtattataattgttgttaatggattcatgttgagttctctgtttcattattagtttgcagttgcaaagtagagtagtcactgtatcaattcaccgaaaaccgagtctccctattcaccaagatccttcctttaccaaaagatagattttttgcagtgatcttgcatattttgtgtctgtacatagctggaatcttggaatggagattgctagctccttctgacccggccatagtaggcgatactttattccctcgtcaagcaatatagctgaagaaacctataaaagaaaagactgaaaccatcacaaaagaaaaagagctcgagaaaccaatttagacatgaaaagctctcagatttggccagccatacatactgaaaacgtcaagaacaatcacagagcagatcgcttgacgcaatgtgaatgaatcaaatgagcatttcttacaaagtaacactataactactaaaaccacacacaaaagatgcagcagaaacagtgtttatgtgaataattagtccacaaagttctacttttctcaaacacaaacagaacaagaacacttaaaagattcaaagagacatggatctaatctactctatcataatcattctggtttgtacccaattcaagccttaagtctatcaaccagaatcaaaattttcactatataaaagacaaaactttatcaaatcaatgttcatatctaccttaaggaaagccaagattttgatgacagtttcaccaactaacttgttgttaagaatatctcaatacatcaacaccacagtctctacgtacacatcgcactcacttatctccaccatttttagaatgagagactccattctctcttcaagagcatttttagggtaaaaagtgcgagaaaaccaaaactcttggactaaaagaacatttccagaggttttgtcatgaatggtgttgttttccaaaataaaacctttattttatttttatttttatttcttaaaacttagattttatttccaaactaattgtatttattattattatagtcttcactgttgattataactaattaagatcataaaagtcttataaaactataaagcatatgttaaaacatattacagacaatattaatttatagaacgttatattagaatatgtcataaaatgtataaaataaaaacacaaaaaaatcattacttataaataaataaccaaattctattacaatgcttctatatatgatcaaccaatgcatttctaagtgatagatatgagtctctttatattaaaattttggattttcttcattttaaagtgtttagttaagtttatatatgaaaactatatttatatttatgagatatattattattcggactactatgacaggaaaaagaattagtaaagtgatttatgcaatatatatataactgttagaactaaagtgatttggagtaaagtgatttggagacttttggtcgacgtaatccaaagaaccaccgcgtggttaccaaatgacataaaccatggaagagttgacaatgtttactgggttttagtcataggaggagtcttgaaccttggctacttccttgtctgttcttggttttacaaacctcaaggatgatgaatgatgatcatgaacaagaagctgcggtatctcactcatcatcttaaaagtaaactgtcctttgttatcgtttgaagtcttgagctttctcatgatcctaacgagcatattctaacctcaaagtattattcactctctagtcattgaaagctagtatttttcagttttttgaaactgtttctttcttgttctttccttttatatatcttacacaaatgacacatatatattgtataaatgatcaaacttctattcaatagataaagtcttctgaaattcgtaacaatctcactcgtaaacaccaaatcaaatcgtattttaatttaccttgtccaagaattc

SEQ ID NO: 1061 - DNA, 100328 bp, Arabidopsis thaliana
gaattccgctgataacccgaatagcattttcaatgtgacttgggagttcgatgttgacccgggttttcagtactatttccgctttcatttctgcgatatcgttagcttgtcgttaaaccagctatatttcaatctttatgttgactcaatggttgctgctacggatattgatcttagcactcttgtggataacactttggctggtgcatattcgatggactttgtcacgcagacgccaaagggtagtaataaagtccgtgtgagcatcggtccgtcgactgttcacaccgattatccaaacgcgattgtgaatggattggagattatgaagatgaataactctaagggtcagttaagcactgggacatttgtgcctggtagtagttcaagcagtaagagtaatctcgggttgattgtaggttcagccattggttcgttgctcgcggtagtcttcttgggaagttgctttgtgttgtataagaagcggaaacgtggccaagacggtcattcaaagacttggatgccgttttcgataaatggaacttcgatgggaagcaaatactccaatggaactacgcttacaagtataactaccaatgccaattaccgtattccctttgcagcggttaaagacgctacaaataactttgacgagagccgcaacatcggtgtaggcggttttggtaaagtctacaaaggagagcttaatgacggtacaaaggtagctgtgaaaagagggaacccaaaatctcagcaagggcttgcggaattcaggacagaaatcgagatgttatctcagtttcgtcaccgccatttggtttctctgatcggttattgtgacgagaacaatgagatgatactaatttacgagtatatggagaatggaacggtaaagagtcatctttatggctcaggtctacctagcttgacttggaaacaacggcttgagatctgcattggtgcagctagaggcttgcattaccttcacacgggtgactcgaaaccggtcattcacagagacgtgaaatctgcaaacatattgcttgacgagaacttcatggctaaagttgcagactttggactgtccaagactggacccgagcttgatcagactcatgtaagtactgctgtcaaaggaagttttggttatcttgaccccgagtacttcagaaggcaacagctcacagataaatccgatgtttattccttcggagttgttctcttcgaggttttatgtgctagacctgttatagacccaacacttccaagagagatggtgaatcttgcagaatgggctatgaaatggcagaagaaagggcaactggatcagatcatcgaccagtcgcttcgcggaaatatcagacccgattcgttaaggaaatttgcggaaacaggtgagaaatgtttagcggattatggagttgataggccatctatgggagatgtgttgtggaatcttgaatacgctctgcagcttcaagaagcagtcattgatggtgaaccagaagataatagcacgaatatgattggtgaattacctccgcagatcaataatttcagtcagggagacactagtgttaacgttccgggcacagcggggcgattcgaggaatctagtattgatgatctctctggcgtttccatgagtaaagtattctcacaactggtgaaatctgaaggaagatagtgaaagatttgagcaatgcagtgccaagaaaagccaaagatctgatctttttgatagaaacagagcaagcaaagtatgtaaccaggaaaaaagcatcaggttattttcagataggatctttgtctttgcttgatctgtttctactgcagatttttcatcagtgattaaacggttactttgaaaatttaccttattttgttcctctctcccttatcctgagtttgtattttattgatgttcattttgaaattgtctgaaatttgtttgttctttttactatatggatgtttaacactcttgttgtttcaattgtattgtaagtttagaagttaaaacagagtttttcatggttcttgtttggtttaagaaactgtttgatcttaatctatttcagttttctttttttgtcttggaacagtatttgtccggttccattggtttgtttctttctttcaccacgaccaagtcttgaactttaaaacaatttcagaaaactgttttattatcctcatagtgatcaatcaatattagtaaccttagtagtggacgcacaagacaaacatttccgtactagtctgaaaacaaacgtcctacacgaccatgttttgttattccgcatagcgttcttggccgccttctttctccctcctcctcctcgaaaacaactctgattgtgtctccgggtaactgcttcgccatcacctccatcaccgtcttcttcgttctcttctgttgaaaatgtgtagcttctaaggtacatctgcctacaagatatgctgtcaaccaccgtggtgcgatgctggcttccgtcgtggttgattgaccgtacgaactcggcctccgccatcggccacttgtaaagattggcgtaagtcataaccggccggacgcaaatggagtctcttttgatgtttacacaatcatctatgcactttgaggccatggtcgcttttttggagggtacttctaacttctagtgtgaactgttttccttattttttcgtgatgaagttgggtttagcttaaatatatattcatagaaaatccttatccatatcatttcttacttttattttgtgatacaaaaataccaagtcagagaaaaaagttgagaagttttctcaacttttagctatgaaagttttctcagtaatgtttctaagtttttcataagaaaagaaaataggattaatcacaaaggagaatttctccaatatccctataatatttcctcatatccctcatgcattctcaaatcttctctattcctacttatatatatctcgctctcattttctgattttctgattcatttatgttgaaagaagaatggtaaaaaattcacgtaacatgtgtcacatttcttcatctttattaaatcgttttgtacctaatctttcactttatagagtcagcttttagagtctttgagatgtatatattttcaaagttaattaggtggtgaaccttatctctcactcttagcagaaaaaaggcagtgtttcacaaggaaacttactaacacatacaactcttaatattactttagacactgctattcattctaaatgtcacaagatcttttgatagtcactaattctaaaatttacaaactgttcacggtaccatgatctcgcatgtggcatgttgctatctagcttgtctatattcgggtttgtagtaggtagctctatcctcttttcttttttttctttttttttggatttaaggaatgaaaacaagtatgtttgcacaaaataaaaataaataaataaataattgaaatccaaagcacatatatgtatattagaaacggtccatgtgtatacgagggtaattatgtagttaatacctgataaagatgtacaagtattcattgatattgaaattcaaaatgataatataaaaaaaaaactcttattattcttctctttattgataaaattacttcactgtttaagatcaaacttattagggcaagtacaagacaaacatttccatgtgaatcggaccacaaatcccttaagtgacgcccttttactcgtcctcatatctttcttcgccaacttcttcctccctgctcctccgccaccgtcttcgttctcctcttttcttgagaacgtatagctcctaagatacatttgcctacaagataaactttccaccgccgtagtacgacgcggactaccgtcttggctgatagactgtacgaactctacctcagccatcggccacttgtgaattttggcgtgagttctaccaggccggacacaaatggcattgtttttgatgtttacacaatcacctatgcatttcgatgccatggccgaatctctccaatgtttttttttttttttttgtgaatgttggtttttgctagataaaattaacaagttgtagtgtgagtaattatggagagagatttgtggtaataatatatctttttttatttttggcaacgattattattgactgaaaaagtatgactcaattaattaacgtgacttccatactttctccttaacatgtcattaagtaaacaattgtcttgtgtatgataaaggaaatatttacatgtgtttcatcaatatagtcaagaatatttttttcatagtcattaataataatcataatttttggcataataaaggaaagatttgactgaccaaaaaaagaaagaaaattttgacaacaaatttgactgatttataacaaaattatgtgtagctaatttgaaacatttcgattaatgtacctaatcagattactgaacttgttcggtcaacccaaaatcctgcttactatataacctaatcagtcgatcctgaagataataacacatcaactgattgtgataagaattaaaactcatacacattttggctaatgtagaaaatatattcaagaagagcaaaatgggcttcgaacctgattttatgatggtttggttaattagtttgtttgatttggactaatatagtaatttcatacaaattattttgtgactaatatccattttgcatgattaggccattgcttccgtatttgtcaatggacaaagatgggcctaaacgaaccaagccatatatcatttgtgggcttaggcccatttataggagaaaaagtgggtaatcgtttttctcaagtctcgttcttttgtagctagagaactttttatattcgtatgaataaccatcaaatgcgagcaattacggattagaaaacctaaaaaaaccgtcatttatttttaatttttccgtttaatacctctagtatttaatttggaaaaaaaatactttagttaattttgattacttattaaaactttcgtttttttaaaagttagtataatcttatcttcgagtttactaacggaattgttaattatggttaaaacttaactcatgttaattatgtaaataaatacgatcgcttttcttgtttatacgaatatgttgctgtagtcagatggttaaacactttattaattttttcttgagcctgtgttcgaaaccacctacctctttttaaacgtttttttttttgctgtttttttttcatcttcttcctcgactcttcttctcagttactcttttcactcaatcaccatatctatggtttcgctactcagcctttttgtcttttttattcaagtttctgacagatttacttaacaatggaagcaattgaagaattaaatagatttgggttttgatctaatctcctcaaattcatctgggtttttctaatttcaattgagccaatacttatttttctctcttctttcaattgaggttaaatcctagattttcttatttttcaattgtgaaaactaaaagagcgtaatcagaaatttcctcaattgcaatgctaaatatctagggtttacaataaaaagataatgaattttgaagaagaaacagtttttagaaaaaaataaaaataaaaaaacgtctttggaggaggcgccactcgaacccagacccaaaagaaaactaaatcaatgtttaaccatttgactacgacaacatattagtattgtcaagaaaagcgattgtatatatatttaattaccatgatttaagttttgaccatagttaacgattccgttagggtagttgacggaagttaactcggaagtacaattataccaatttttttaaaaccgaaagttttaataggcaaccaaaattaacgaaggtatttttttctaaattaaatactaaaagtattaaacgtccaaattaaaaataaatggcagtatttttgagtttttttcccgtccacataatcaacaaatctctccgctattatgaacaaacctcatgtcgtttctctcttaacaatatggattgcaaagcgtttttccggtttaaaatattatgttcgttcacgcaaacgcaagccagtatatcaaaacgcaaccgtgaatatttatccggaacaacattacaacgcaaacgcgaatacaaatcgatctgaaattccaaaatgaaatcactaaagcaaatcctagacaacactctaaaacactaaaatcctcaaccaccgaatccatagagagttcttccttgtctcttaagagcataaacaacatccatagcagtcaccgtcttcctccgagcgtgctcagtgtaagtaacggcgtcacggataacattttccaaaaagatcttgagaacgccacgtgtctcctcgtagatcaaaccactaatacgtttaacaccacctctacgagccaatctccgaatcgccggtttagtgattccttggatgttgtctctcagaaccttcctatgacgtttggctccacctttgcccaaacctttgcctccctttccacgacctgacattttctaaaggaacctgaatttttcttcggaaacttttcgatttgaagatttaattgagattgagatgatttgagaatcttgttaagaggagatgtcatttatatacaagatggatctaattgatttgaaccgtcagatgtgtttttagatctaacggttgcagataacgatccgggtgaacaatgagattacttattagccgttgatttaattttatcgacgcttaatattgtcgatccccgtgatgcctgtaagtgaaagtttatgaaaatttcaaataagcgccacggattgaggaatatagcgccaaattcttttcaccgttactaacgaaattaaatcatcatagaacaaaaaaaatcgttataacatttcacatatatatatatatatatatatattacgaacgggtaatattcatatttaacacaagtaaataaaacaaaattatttcacaatggttaactaataacataaagttatacatcgaaaggtttggtttatgtcacattagagaagatccacgtatatactatcttgccttaggcttcacatcagtatcaaaggtcacagtcacattaagctgatccgagctatgaccagagtccatgttttgattattcctacttatcctcgtgttttcagatgcaagacactctttaagattgatgattacttgagacatgtttggtcgtttgactgaagaaggatttgcgcatgacattgctacttcaagagctctccagacagagtgggtgtcatagtttccgtgaagtttaggatccacaatttgactagtatctcctttcttgatcacaaatgtaacccattctgctatgttagggttttcacgggtttgatcaatcactcgttggtttgtgataatctctagtaacaagatcccgaaactgtagacatcactcttctcggataactcacttgttaagtaatatctgtaaaggcaagaaaatggagtgtgattcatataatttacatttctttaaccactgaataaatgtaacatacttgaacatggtgcaaaatgtttaatatacttactcgggatcaagatatcctagagtaccggcaacaactgttgaaacttgagattgatcgcctcctacttgaaacgatctagacagtccaaaatccgcaattttggccttgaattcttcatccaacaatatatttgtacttttgacatctctatgcaccattgctggtttgcatccagtatgcaagtattctaatcctaatgcagcttcgatagctatttgcaatctagtaccccaatttaaaacagagccaccgtgttttcctacatcaaaagtttgtaatatcatcataaagctacactaagcattatgtgaaatcgtagattttttacagaatacaaccattaaatcaaccattttttaattaattatcttcatttggtaatccataaaagattcaaatgagttatatatgtgttcacctgataaatgttgatgtaagtctccattagacatgtattcatagatgagagcaaagtgatcttgttcatcacaatatccaacaaggttgaccaaatttatgtggtgaaccctaagaagaagttcaacctggcggcaatgtaaagcaaacacacacagacatacaaacattggcttaacaaaacataaaataattacattttgttttgcttaacacttaattatatgtggaacagttaaaacatattgtacctctgccttaaattctttatagccttgtgctgatgtttgggatagtagtttgacagctacttgctctgagccatttagatcgccatgataaacaacaccaaaccccccttccccaagaggtctttgcaagttcttagtcatttccataacttctgaataagtaaaccttttctttttggtcttgatccacggttcaggtttatttcctacatgtaaagcaaatgtaagtatatatagttaaaatatagtaatatatgactgtttcttgatttaagaagttgttgtaaatactccatacttgatgacattttctttttgaatacaaaaaggaggatcacaacaacgatagcggcaatggaagcgactggtgcaacaacctttaccgcaacttttttctttggcttatctatgcatgtactagatagacaaagctctttgtttccaagaacactacatacgagaagtttaaaatatttgaattcatatttcaagttgggaattgggataatgcatggttagttatagagtaaaatcatgtgagaatctttcttactttaactttagcccctccctttctctatcgcgaagagcttgaggaattgcaccactaagtttattcccgctcaagtttctgtcgaagtagaggaaaattcatgtgtacacaaaaatgattgtgtgaacgtaattagtagataaatcgagaaaatttattacatgaccaacaatgatttcatagtggctagaaactcgggcactattccactcaaactgttatttgacaaatccctgggatgtgaaaaacaatgaacccatatatgctttgtaattatatatcaaatatctgtagaaaagaaaaaaataaacatgctgctttaattaatcacgtactaacaatacttacaaactttctagatgcgccagattctgaaagttagacactatagtcccactcaagccactcgatgataaatttctggttataataaacaaattataagtttagattatatataagcatgataatttagtaattttaaaagtgtgtgtgacatagttaaatcttacaaagaaattattcttggtggtgcagatatatctgtgatgttacaattcaatccatcccacaagaattgtttcggtacgcatggatctccttgccaactgattctactcagtccataagtagttctaatgtttttgatagcaaccactagcataaaatttgatcgatgcgaaaaaaatatttaatgaattagttttcatcgatatggaagaacttataacaaaacaaaatgataaaataactgtctcttttagtttgataccttcaatttcatttgtctgagattgtggaagctggagaactgagtaaacttcaaaagcattaagtagaggtggaagtgtcgatttttgggtttttgttaactgcattcggcagatacctccgttgcattgcctaggatttgttgtaagccaggtcattatttcaagatatttaggagtaacacctctagtgttaattgtttctccattcaatataatgtcgaattctctagtgtcattggcttttaggacttggatctccgagaagtgcatgtacaagtagatttgatcatcaggattctccaaacgccaaaccattgtcagtgctgcatcaagatttgtaggcgttgcggccatcttaagagcaacttgtggtggatcatagtgatttttattggacacatttgaagttgttgaaatttgattccattcgggttgaatatatggaacccacgaacgatcataaacatctttcgggtacctatcacaactcacaaattttctcttagtattggtaacaataaattctttatcatttaaatgcatagatcatgtacatataatattttaagatatatagactagttatgatttgaagttgaatacgtaccgaagaagaacggtggcattgctaagatacatgcgaaaataatatttcaaggaaccagatttagcgatgtaagtatcattcgccaaaggtcgtaattccaaagctgatatcattggtatagttgcccctgtcttaacaagacaaatttgcaaagagtttgatcttggaatgtgaatgatctccttcactgtaccatctggcactatttgcaaatctattgttgtccacttattaggaccgatatgcatatcgaattcagggctaacattaagcccgtcaaaatttccatagaaaaatgtagctctaataaggtagttcctcccttcttccacccttagatcatagcagtttcgtattccatctggaaagtatcgtagggttgcatactgttttaaattttccgattcaagatttttcgggattctaccggtctttccactttggatgaaattctcgtctgatgagaactgtattccggtttccgattctatgtaaggtggctcatttagaggtaagccacaatctaaactgataaaacctgttcagaatgaaacatatgagtggtggtcatgcgtgggtgtatagccgggggaaagagtaacgtacggtaaaataaaagtggtaagacttactatggccggctctatagagatgcctaacgaaaactttctaaaaagtgatgttactaagtttgttcgggcgaactaaaaatcatgttgtattctcctgagttatcttatagtttactaataatctttctatagaaacttagacgtacataccttcttgattttgtccttcagcaaaacgaatgatgaggaaaactccaaaccaaaacagcgacagaaaaacccaacaaagattcttcatgattcctccgatcacaatacacgcagaaaaggatcgacacaattatatacttacgtttcacttatatactaaatgtaaggacacacaaattaagcttctctaatatggacaccaattaaaccaagctaaagtcaacgatatgagaaaatgagtgaatatggagttaatagttgtttcaagaaaaccaaatgaaggagtgagcaatgatgtcttctagtgaaacatccaacgtcacaagattaatatattttaaaagtacgcgaaaagtcttcatgcatgccgtacatgcgtatacgaccaggtcttatcacaaccttgagtagagattttgattggcacaatcaaatggatttgctaattccttaatttacaaaacacaacttgcttaactagactcttttccattgaacttgtcaatctgcaaaatattttgaggtttaatattcataaccatgacgcatgaagaaacgttaagagggagttgactttcgggtggtcatagacttgaatatataccattttcaaacatgtaaaagtttttttgtgatttttatgcaaaggtgtgcgtcaagttgttatccgaaatcgatcaaatagtctacacattcaattagaaaacagtttttgaatgggattccaatcctagatcccataatcattctcttttgattcgatcatcctccaaggatttggttaccctttctaagctctttgatatggcgagaggaatattttttagagaagcgttacctggcctaggttgatgccattacatcttgtcgacttgtcgtaggacctaggtcaacgattacaaagtgcttttagttagcagtatagtgaagtgatctgactgtattggggcctgggcaatatgtttggtctctgactggatatcaccttggtcgagagggcgtgctccgcatgtttatgatgcggacatccccccgttactccgtacaagtagattaaattactttgtctgcttctggtgatttggaagtggtctctctattggaaggttatgagaagtggttctaggacttgtctcccgaaaacactattatacgggccgagccgccgaaacagacggcatatttgtattttcgggaggccgaggattttgccatctttctatagaaaaatctcggccaattttcttgattgatgtgttgtagtggtctcgtttggtaggcagaaaatcactctcaaaacaattaatttcgaatccaagtgcaacattcaaatgcatatatatgttaaaccagttaaaatgaatatcatctggatgtcgcatgctaacatcctaattcataaacaagttaacttcaatcttgaaccaaagtgaaatcggagtggacaccctctagagtctagacagatttaaacatcgatcggaacaattcaagtcaacggaaggcatatctcactttaaatatttcggcactagccgtgttggttggtaaaatcgactatcctctccattgatagggtctttaaatttaatgaacaagttgaacattttctgactaataaactaataaataaaaaatatatttcccattagaaactttccaagaaacttaaatctacagttaaacttctatttgtagaaactgacatgtcctcacgtttttttgaggattattgtcttggtacggcttttacttgaaatgtctaaaggaattgtgtggcgccattgcttatataaacttcatttatggttcagaacttgggaccgtgtctttcttgattttgcttggaaagtaagaggatatggagtttccccattcggttttgttggtcgtactaattattgcaactttcgctatttctaaccttgttcaagctgaagaagatcaagaaggtatgtatccacattattgagatatgtttatagcgtttctatagctagcggaaattataagattgtcttacaacaaaataaacgaatcttgaatttgcatcttctacctaaagttgtgagatttcagccatattgtaaattttatgttttggcctgaaaattgtagaataatattttctcaaaaaagttgtgtaattctgtgttttatgctgtaatttttcactaaaactacagaatcttgttttttttttgcaaaaatgtggaattgagattttccgcaaaatatgcgtcttaagaccaaaaatgtggtaatataacgatgattctagggttttgtacaaaagaaccatctaactcatcaagttttaaaattttactttttaactctggagaataaagattaatcatataaattcagaaaaattacattaaaattcttatagtatattataaacgttttcacggccacatacattactttaaattgatacaattgaactccttgttgcgtgaggctcaattttacaaatttgacggtagtgaaatgattatttatgataataattgatggataacttataatattttattctcatgtatgattattttgatcaactatctctagaaagtattctgtatagttttttaaatcacttagtgaccaattggacagcagatcattagcattggtggaacaagaaatatttgttacggggttcataaatttaatcgtaccaaaaaaaaaaaattctttagaaatatattctgattctgtttttttaaatatgtattgctattagatttcttttcaaaattaagaaattaagaataatgtcatttatttctacaaactccataattgagccctttttgaatataaatttatatgggtgagaatcaaagtagtatgaaatatgcatgttatcatatttttttacaacgtatttatatatctaaacttagaagtatagtcaatgtctaaagataaatcaaaagaaattatatatagagagatacagaagaaagaaaaaaacaaaaaaaaacatgaaaatatatggaaaaatgaccctataaagaaattgggtgttaactttacttgtacttaaagacaccattgttccactaaccaacgctttatttttctgtttgtttagtgaccattatttgatctcttgcatatcttcttaatagggttcatcagtttggattgcggtttacccccaaatgaagtgtcaccatatatcgagccgtttactggactacggttttcatcagactcaagctttattcaaagtggaaaaatcggtaaagttgataaaagttttgaggccacgactctaaagtcatacatgacgttgagatactttccagatggaaaacgcaattgttacaatcttattgtgaagcaagggaaaacttatatgattagagctacagctctatatggaaattatgacggtcttaatattagtcctaagtttgatttatacattggcgctaacttctggacaacactagacgcgggagaatatttatctggcgtggttgaggaggtcaattacatcccaagatcaaattctttagacgtgtgtcttgttaaaacagacacgtcgacgccattcttatcactcttggaactaaggcctctagataatgattcttacctcactggttcgggttccttgaaaactttcaggcggtactatcttagtaattcagaatccgttatcgcgtaagtctgctttaagatgatattgagttatttttggttgttcctcgttgatgagatttgttttgttatatgaagcacaggtatccagaagacgtcaaggacagaatatgggaaccaacctttgattcagaatggaagcagatttggaccactctcaaaccgaacaactccaatggttatcttgtgccgaagaatgtgcttatgaccgcagcaatacctgcaaatgatagtgcaccgtttagatttaccgaggagctcgattctcctactgacgaactttacgtgtacctccacttctctgaggttcagtcactacaggccaatgaatctagagagtttgacattttatggagtggagaagttgcgtacgaagcttttatccctgaatatctgaatatcacgacaattcaaaccaatactccagttacttgcccaggaggaaaatgcaacttagagctaaaaagaactaaaaactctactcacccacctcttatcaatgccatcgagttttacacggtggtaaattttccacagttggaaacaaatgaaactgatggtacgttagtaaccaatgcaaggttcatatacataaaaatatctcttatgctgaatctaacatatttattgttgtgttttatgacagttgttgctatcaaagatatcaaagcaacctatgaattgaatagaatcacatggcaaggagatccatgcgtcccacaaaagtttatctgggagggtctggattgcaacagcaaagatgcattaacactaccaagaatcacttcattgtgagatatttaaatagcacaaactttttatcttttttgttataacaaacattttctacctacatcacacttatttttctgtaactaggaacttgtcttcaaccggcttaaccggaaatattgcagctggaattcaaaatcttacccaccttgacaaattgtaagtatgcatgataataattacctcgagtatgtaagcgagtaagcgacttttgattcttacaaacttcagggatttgtcaaataacaatttgaccggaggagttcctgaatttctagctagtatgaagtctctgtcattcatgtaagtttctcatgacatatttagttatagcattcctttgggatcatgttcacctatatgtatgatatttttgtggtttcatagaaacttgagcaagaacaatctgaatggttcaatcccacaagctcttcttaaaagagaaaaggatggactgaagttatcgtaagaagaaactccacccatgcattttcatttaaaatccttcaccacatgcagtcaaaatcctaaacgatcagtcccttttttatgtagtgttgatgaacagattcggtgttttcctggttcatgtgtcatcactaagaagaaattcccagtaatgattgttgcattagtatcttcggctgtggtggtcattctagtggtactagttctcatttttgtatttaagaagaaaaagccatcaaatttggaaggtattcgccgaaactcatacaccatgatcaaatcaatatatatgtgaatatcattcttgtactaaatatttctctacagatctaccaccgtcatcaaatacgccgcgtgaaaacattacatctaccagtatatctgatacatcgattgagacaaaaagaaaaagattcagttactcagaggttatggaaatgacaaagaacttgcaaagaccacttggcgaaggaggttttggagtcgtttatcatggtgatataaatggttcatcacaacaagtagccgttaaactactttcccaatcatcaacacaaggctataaagagtttaaagctgaggtaaactcttcgtaagtttatatatgttaaacttaaaccaatgtgtttcatgtgaatttttgttgttgttaatttggtgtacaggtcgaacttttgttgagagttcaccacataaacttggtaagccttgtagggtattgtgatgaacgagatcacttggctctcatctatgaatacatgtcgaataaagacttaaaacatcatttgtcaggtgaaagattgtataacagttacatacatatatttcttctaacagaaaaaagcgaatatgtgattttacaatctactgtaggaaaacacggtggctctgttttaaagtggaatacccgactacaaatagccgtcgatgccgcactaggtttgaactatcccaaaataattacattcatgtgtttttactatcacaaaatattttatgtgggattagtgggcacaaatgattgaaatattaaatggtactatattcttagtattactatttttgtttgtttaattttggtcaactaattgttcttattgttaattaaagtaaaactaatgaacgtctatatgctcttatcgttgcaataaagtattccacattttcataaactttctataaggatgaaagtatagtttttaaaatttagaaggtttagatatttttcgtttaaaacgtttttcttctgattcttactaagattagttaaaataatcacacaatcagaattaataccgaaaggctttttcctgatctgataaattaaaggactggaatacttacatattggatgtcgaccatcgatggtgcatagagatgtcaaaagtacaaatatattgttggacgatcaatttactgctaaaatggcggatttcgggctgtcaagatctttccaactcggagatgaatctcaggtttcaaccgttgttgctggtactcctggatatcttgaccccgagtaagtatttttcttttttcgaattattaagaggttctgagcttaggtccttacagcctctcaaaccggataccagagatatggaatgacctataatgaaaatggacacaaaagttttagaacgttgtccttactattagtggtacaaccaacacatattaattgtacctcatattcttgcctctccagatattacagaacaggtcggttagctgaaatgagcgatgtctacagttttggaattgtgttattggagataataacaaaccaacgtgtgattgacccagcccgagaaaaatctcacataacagaatggacagcatttatgcttaatagaggagatattacaagaatcatggatcctaaccttcaaggagattataactctcgttctgtctggagagctcttgaattagcaatgatgtgcgctaacccttcatcagaaaaacgaccgagcatgtcccaagttgttatcgagctaaaagagtgtatacgttctgaaaataaaactcaaggcatggattctcatagttcctttgaacaaagcatgagttttgataccaaagctgtccctagtgcaaggtagtattggcaaagaagtcttactgcgtcgatcaatttctgagtgtggtattcttctttggtaagataagtgctttaatttttgtttgagacaactaaacatgagaggaaaattgtaacactcttttaatcttgtgttctaccttgtatgatattttgtggtttgaaactgtgcgtagtaacttgccatattggtaggataattcttcttgagaatgaaaagcagatccactaatgaatatatggccatagaagcaattataagacaattgccacttgaaacttgtccattgatgcttttgtgcatgatgaacaagagtgaccacacaagatggtaggataatctaataacctgttaatcaaagaaaagattaatatggataaagatgactgaaggagatcaattgtagacctaatttattctttcatcaacaacttagaacccacatagctttgggtctttttcttttctaaatctccaaggtgcaatcatctaaagcctggagtaagtattattagtctaatctcggatcatgaaatttgtcttcacattcatattcatctgttaacttaatacgcatatttcttattccttttcttttgccatgctagatattacagaacatggcatccgtgatcagccctagctcatggcatccttgatcataggtttactacaagctggaggtccataattcctctaatctcggcaaagtccactacccatctagacactttcacattgaggtatgtttttcagatcaccatttacagtctctggcgggagcgaaatggtcgccgtcatggagagacatcaacaccgggccatacgcttacgagaatagttgataaaagtgtccgcaatcggttgagtaccttggcattgacgagctcttatgaagagggaatgtatttctggttccaaactcacagtctctagttccctttccaatgctgtaattctctttctaaaaggttatagaaattttggtttttaagatgcattttattgtaaaacagtctttttttggtgaatataattttgcattcataaaaaagaagatattacagaacatgtcggatggcgtaaacaagtgattgctatagttttgggattattatcacaagccaatcaaacccgcgaaaagcccctcatagcagaatggacaacagtcatgcttaatagcggaaatattaccaggatcatggatcctaacctccacggtgcttacaactctcgttctgtccaaacctttcttcagaaaaagatcaagtatgtcccaagttgttatcgaactaaaagagtgtcttactactaaaactctcgatgaaaggtaagaattaagtcacatactctcatagttcctttgaaataagcatgagctttgatacaaaagctgtgcctagtgcaaggtatcttattatataaagtatggttttcaaagttactaactcttaagatcgtggcacgtgtcaagtcaaacgatcagatgtttacaagttactaactcttaagatcgtgccacgtgtcaagtcaaacgatcagatgtttacatgtgtcattcaaaatttaattttttattctcttaagaaaatagaaaatcttaaaaaagtaaacaaatttacatatactaatttatatatctatatatttataaacaattaacatttattcaacaaaaggaaaattaacaaatttgtctttaactaatgtaatcataagtgaaaatagaacattttgagagaaatagcttagcttataagatttaacttttcaattatttttaatgagaatattttcatttattaattttaactcatttaatattaatttgcttgatgtaaaattaacttacgagattacggcatatataaaacatatattttcaacaatgtttggtttctaaatatttttgtagatttctatttttttattaattattagccctaggcgtttgggtattcgggtcgggtatttcgggttcgggttttcgggcttagaagtttagaacccgttcgggtaatttaagatttcgggtcgggttcggttcgggttcgagtttatttatatattgaaatatcaaattttgtctgcaaatctattaaattacttgaaaattttaaaaattcccaaaacaacacgagtagttttgcttgaatatatcttaaaatacacaaaaatatctaaaatatccaaaaaatcctaatattttctatatataagtataaatataactaatatatatttatatttgagatatgtttggatacttattcgggtttgggttcgggtttttcgggttttgaagtttagacctgttcgggtatttgaaaattttgggttcgggttcggatcgggttttttggatcggttcttcggttttgggtattatgcctaggcctattaattatgttttgttaattgttaattatttttaatactaactaggatatagatttgatgtcataaatattatattgatatgaaaatgttatcactcaatatgaagtgtgtagaatttaaatcgagtttattatgatgacatagatagttaaattgtattacaaaattgaatggtgtaagatagaaatttattttttctttttcttttctagatactaaattaaatatagaataatggtcgcttactttttagaattcaaatatcattgataagattgagtgtatataattaaaatagaatgcataagactgaaattttgtttaaaccaataattattaaattaaatatcaaaaaaatatatagattgctatacaatattcaaatactatcgataaaaatttatttttgtatcttatacccgcctaaacaggcgggccttatctagttgtatatatttgcaaagaagtcttgtttatgtggatgctgtacttgtgctttttgttttgttcttttgtgagacaagtgctccaatttttattactattgtgatctcgtaaatttgaatttattgtttcaaatttggtgttaccttccacatttttgggctacttcttctttagcctcaaaaaaagaaaaactaataatgttattcattagttaatcaactgccgcacaattgtaaatttggacctccgataagtattacacttgggaatcaaatcacatacctaatgtagaagttttaatgaaatcatggtcaaccactagaccaaggagacttccacaaatatttctgttatgtgacaaatagttgactatttttgtaaggaaatgaaagaaaggttaaattgtcatgttatatgccatattgacttttcctagatgctaataacctaaaaatggaaattaaaaaaaaaatctttacagtgtttcctttttcttgacttcttgacccaaacaaacagtcaaatcattcaaaactattagagattatattattgtacattttttaatgaattggtatgtctaaccaggctatgctcagcctgccagagtaggtcttgagtcgtcatactgcacaagacccaaacccttcatataagtttccggccatttagtattagagtgtgggattccaacctaaaaccaattggcaataggtggagaagtccatatcttatatataccacttaagatcctactcaacttccgatgtgggacattgtccctaatacgccccctcgagatgatggctcttctagccattgatttcgatatgtttgggcatggatcggcgggccaagtattgggccggaccgatgtggatcgggttgagtatgtgcggatcgggctttgataccatattagagtgtgggcttccaacctaaaaccaattggcaataggtggagaggcccatatcttatatataccacttaagatcctacgcaacttccgatgtgggacattgtccctaatatttagtggcatgacatgcgggttgtgtcatctttaattttttcttaaagaactcgatcgagttctctcaggtaactcaagtgtcgtaaaagttaatagtgtgggactagatcttatgctgaatattgttaatttgttctcatgatgacttagcacgtctttcaacttccgctgggaggccgttctcatgaaagattggagagtggagaccctgtctcaattgtttgctgagactgttaaactgtcacccacatgtcagttagtgataggtggatacaacattgcttccaatgaacattattttcttttgctaaaatgaaatttctgactagtggaaagcacataaaagcaaatttttgatatttgcaatatcgtcctgacctaaaacattttctagtgaccatgtgtttaaaaataatcaaagacaagttggatgataaaagaaaatttttaaagacaagttgaatatttttggccaagaaactagcaaatatttaaagacaagtcgaaaacatctttactcattcgtcaaattgaatttctttttgtagaaattaggacatctcctcacgatttcagaggattgacatgttaaggtgttttacttgagaagtccaaaggagttttgtggcctaattgcttataaacttcgtttatggttcaggaaattgggtcagtttttatttcgtttgggaaataagaaaatatgaacagttcccacgagcttttgttaactgcacttatagcaacttttgctatttttcaccttgttcaagctcaagaacaagaaggtaatcctcattttgatgttaggtttggcaccttagcatttctagtttttgttattgtcttacggcaaaagaaattaataaaattaacttccatgaagtggtgtagttaaactggaaatgtttctactttctactttctagggtgataagatcttagtagatgttggaatggttgtatgaattagagaaaaggaaaaaaattaatttcctcgaaacgaacactaatttttttgcgctaatagctttttaagttttaattaaatacctttttaacctgtataggacaattttatccgttattcataaatgaatattattagtatgcgaacatattatataatcagttgtgaatattcaatattgtataggacgattggtgaagtctgttgttgcattcctcccagatcaagtagccgatgtctaattttagggttgagagtcaaataatatgctatactgctcagccaaaacataatttgtcttgtttgttatcttaaagttactttcattttttttttttacactaaaatgttgtaaaaaaatataatattaatatgactattttcgatcgcctaatcgcataggcctagttttaatacattttctaatgttcacataagttttatctctatatacataattataaacgttcatatatcgtttgatataaattaagaaaaacagtttctttaaagttttgtttttgatataatattttttttttctaatagatattttctataaattttttatgtataatattatatttctaatgtttatgttatatgcctaatggctaaaattgccattaaccttttgccatatcttaacaggattcataagtttggattgtgggttagctccgactgagccgtccccttataccgagccggtaactacgttacagtactcatcggattcaaacttcatccaaagtgggaaacttggtagaattgatacaagtctacagacatttttcctaaagcaacaaacaacgttaagatactttccagacggaatacgcaattgttacaatcttacggtcaagcagggaaccaactatttgatcagagctaggttcacatatgggaattatgatggtcgtaatatgtctcctacctttgatctatacttgggccccaatttgtggaaaagaatagacatgacaaagttacaaaacaaagttagtacattggaggagattacatacattccattatcaaactctttggatgtgtgtcttgttaagacaaacacgaccattccatttatatcggccttagaattaaggcctttaccaagtaacagttatatcactacggccggttcattgaggacgttcgtgcggttttgtttcagcaattcagtggaagatatacggtaagcaagctttaagatactttcaatttgttcatttagttatacgggccacagctaatacaagattgtggcaacggcaggttcccgatggatgtccatgatagaatgtgggaatcatactttgatgacgactggacgcagatttccactagtcttacagtgaacacatccgatagttttcgtctgccacaggctgccctcataacggctgcaacacctgcgaaggatggtccatcatatataggtatcacgttttctacctcctctgaagaaaggtttttcatatacctccatttctccgaagttcaagctttacgtgccaacgagactagagaattcaacatttcgattaacggagaatctgttgccgacttgtatagacctgtatatctagttatctacagtccaagacggtaaacaacaaacttccaattatttgcgaaaatatggaatgcctcatagagttgtcaagaactcaaagctctacgcatccacctatgattaacgccattgaaattttccttgtttccgaacttctacagtctgaaacatacgagaatgatggtatgttagtgattagtgataatgaattgtatataatatatcatctgctaaatctaatatgtcgtctaactttatgacagtgattgctataaaaaaaatcaaagacacatatggattgcagctaatctcatggcaaggtgacccatgtgttcctcgactttataagtgggacggtcttgattgtacagacacagacacatatatagcaccaaggatcacttccttgtgagttgtttgcgtaaattgcgtaaatattttttctaacgatttatattatcctttgttttaatgttgtgtcttgacatacaaacagaaaattatcttcaaaggggttaacgggaaccatagcagctgatattcaatatctcacctctctagaaaagttgtaagtgtgataagtgttgcctcgaaggcttttgtgctcgggaatttcttttgacttttgatttcttccaaactacagggacttgtcagataacaagttggtgggagtagtgcctgaatttctagctaacatgaaatcactaatgttcatgtaagtttctcagatatttttggtcgtagtattccttaatataatgttcaccgtaccaatctatgaacatttcttctatatattttaatagaaacttgaccaagaatgatctgcatggttcaattccacaagcacttcgcgatagagaaaagaaaggactgaaaatcttgtaagaaggaactcaacttatgtttacaaattttaattcaaaacccttcaccttgtgcattcataatcaatgcttttgttatgtaggtttgatggtgataagaatgatccatgtttatctacctcttgtaacccaaagaagaaattttcggtcatgattgttgcaattgttgcttcgacagtcgtgtttgttctagtagtatcactagccctcttttttgggctcagaaagaaaaaaacgtcaagtcatgtgaaaggtatttgcggaaacttatcacacagaaaacaaaacaccacatattattaggtgtcattatcttactaattttgcattctacagctataccaccatcaccaactacgccattagagaatgttatgtccactagtatctctgagacatcgattgagatgaaaaggaaaaagtttagttattcagaagttatgaaaatgacaaacaacttccaaagagctctcggtgaaggagggtttggtaccgtatatcatggtgatctagatagttcacaacaagtagctgtcaaactactctcccaatcatcaacacaaggctataaagagttcaaggcagaggtatgcaatgctataaatcttcttaaaaatatgggaaacaagtatatatcttaataattatgtttcaccaatgtgttttgcttgtgtctattatatacattgttggccaggtcgatctccttctaagggttcaccacataaatttgttaaacctggtcggttattgcgatgaacgagatcacttggctcttatctacgaatacatgtcgaatggagacctaaaacaccatttgtcaggtgaatattgatgatagcatttgcattttaaactttaagttattacgacaaataactcaaatgaagactcactttggtggtcaaattcaggagaacatggtggctctgtcttgagttggaatatacgactacgaatagctgtcgatgccgcactaggtttgtcctaattcagaaccatttaattacattctctttttcatggcaaacatttccaatcatcattgtacattaatgattcaatataaatttcttaactcacaagttagctcatgacacattaaaactcgttcgtataactctcaacctcaatttagctccatcacataactcatttgttaaatgatccttaaaaaaaacatagctcaacccatgaaaactcgagctgagatgagccggctcatgaactaatgactcattttgaaacctatatacttgtaatattacttaaaccaagttatacaaccgtctaagatcttttggacgttttttagtattttgaaaattgcaaaatatatttgttaccaaacaaatagccgatcataagaccagtcaattgttcgtttgattcaaagaataacattatttcggaagatgaagaagcttgaaagcttttagttcttattcaataaaagtatgccttctcgaaaacacgaaggaggctataaataacgacctaataaagaaaaccctaaagtgtttggaaaaaaataaaaacccaacacgaaacttaaatcccaagaaaaaaataaaaacccaacatcaaaaatcatggtacattagcgataatgaccatacaaatagttcaaactttaagataactggaatatcttaattctacaaggttttcatattcttatgataatcttagagatcatatacataaaaggcacaattacgatatttatgtagggttggaatacttacatattggatgtcgaccatcaatggtgcatagagatgtaaaaagtacaaatatactgttggacgagaatttcatggcaaaaattgctgattttggactttcaagatctttcatactcggaggtgaatctcatgtgtcgactgttgttgctggttcacttggatatcttgatcccgagtaagtatttgtgttcacttttggatgtgaatgtttcattaatataaccggtgttctcacgccaacgtctagactactgtggcagtgaacttcacctcaccacaacttgcgtgctgaaatttgtttccacattatcttagttgatatatacaatatgaaaattaatccattttcttgccttcccagatattacagaacaagtcgattggctgagatgagcgatgtgtacagttttgggattgtgttattggagataatcacaaaccaacgtgtgattgacaaaacccgtgaaaagccccacataacagaatggacggcatttatgcttaatagaggagatattaccagaatcatggatcctaaccttaacggtgattacaactcccattcagtctggagagctcttgaattggcaatgtcatgtgcaaatccttcgtcagaaaatagaccaagcatgtcccaggttgttgctgaactgaaagagtgtcttatttctgaaaactcgctgagaagtaagaatcaagatatgagctcacaaagatccttggacatgagcatgaactttgataccaaggatgtcccaagtgcaaggtagctaggctatgcatctttacttgtgatatagttacttggtgagaggggtgcttcaatttttgttttgagatatcttaactaaataaaagacatatgtagtaatctttttatcttgcaatttgtcttttatttgaacttgttgttttggaatttgctcagttacaagccagattcttaggctaattcttcttgggaacaaaatcagagccaataaatgactattgctatagtagcaacaaagtaagtaatttgtccctggttgattttgtgcatgatgaacaagtgggaccgcaagctggtgcgataatcacacaaacttgataaattaaagaaattatcagaaagatagacagaaggagatttgtagacctaatttcttgtttcataaacaatttcttgtgaaattttataccatttttgtttttgacaaaattacaaagaagaatagaagcagagcaaaggaatctacagaaaattaaagaacaacattacaactctacttgtaaaggatcgcggctgagtgatcaaggccaagttaggaggagaaacaccgattctgagtccacgaagctcggaaatttgcgttgttgccgcagtaccgaagcattggaatcttcatcctagttgccacgagcatgactatccaaggtccgtccacaagacctcaaacatagaagcctatagcttctccaagaattaacgcaaaaacgaacaagcaaacatgggctaatacactagctcaacgagaagtgatgccactaagacctattaaccgcctctattcacctcaactaaccttgccaatgcaccaagaagctaactattcacaacaagaacagaaactaacaacaccttaacaacaaaactcgaccttagaacaaccggagatgatgcgtcagggacaaagacaaaaggacatggagaagccatgaccattgctgaagaagctaccacccttaacagcccaccaaaggaggagacacattgaccaccataaaacagaaaccccaatgcctctgatcacaacgaacaaacctaatgagaaaaattgaccccaaggtttgcctccaaaggggaagcccgccggatccagacacaacaccaccggagtttgggaaaaataaggaagagagacccgagaagagaagaccgtctcaccatatgcttaccggagaacccaacacacaagagggacacaacgatatctgaagaatcacggtgatgcaccaccacaatctcagatcgagtgaaagatcccgccgctaggagaaaaccgctgcaatagacgcctcaccgaagccacaaccataaccgaagagagacacgccgcacgaggacagatctgtagccaagctcaccggagaaggatcctgaaacagcaccgtcaacaagcaccaaattcaagagctcaccggaaaaatcaggcgaactgtcccttgcgtcgagcgtagcgagacctctcgacgcttcaccaccatgctagccaagggttggaaaccaccgaattgctagtcatgtggtatacttactacgaaaggatgcgagtaagacacctaacttgtcggagaagttacaactcttatcaacggtaatgtagagtagttacgtgaacatgtatataagtgtgtgacttgtcttaataaaataacaagtttcagtttaatatcgctctctcgtgtctctctcattctcgcccatgtcttttttattagttagttaagaaacagaacactagttatatgttctccttctcttgcaacaagtgaaacacctgttgtcagattcatctaagctgacttcaaattccatatgagaactcattgaacttggtactatcagagtgattgtaaattttatagaaaattctggaaatctgaggaattggttccataaacatgatatagatagagtacctaattaatacgaacaaggatactcacaagtatccaccgtggaactcgaatggtttaaattttgcaacaaggtttattagtgttatgagttttttttttttttttttacgacaattatggggttagtgctttaaatgggggtttgcataattttaagaatgtttagtgactaaaagttttacattatgaattttattgacgcactcgaaaattctgaaattattaagagtagcctcatatagatttacgtaattaattggatgcatttagaatttgttttgaaaactttttgaatttacgatcttagaacgaactttatatatacctcgcttcaaacgctggttcaattgccagctaaggcaccgtctcaaatcactgctgcagtcaccgtctgaccgtatcggtctcactctggcgaatcaaaagcttcagcgtcgtcaaagctgttaacatttccttttcttaggcctaaatggttaattcaaatcaattttaatgaattcaaagttttatttggaaagttagcaaaatattggattttgtttgactttctatcattgtttataaagtgtattttatatattttaggccgttgctcgcttgcagaggcgactataaggccaatcatgcaaaaaatacgtttatggccgctaataattatataattttggcaaattctaatgtaaacatcttgtgccctagtatataaaactttagttattgtgtcattgttttctattgttttaggttagtgagtaaaaagaagaacgaagattgtaacacgtatcgtgaaattcagaacagtagaaagtgatcgacatcacgtaactcgtacgttgaacatgaagtcatgcatcattataaagtcgtatacattttttttttccttgtgtttatatttttttgggatttgcaaaattattctttttatattattttttgtaataatattcttatttattgtctatttttaaaaatactatttttcttgaataaaatgaccaaattaccttgattcaatgataacatgtaattaaaaactaaaactttttcactaaatgcatttaaaatcattttaaaacttttaacaatgaccaaccaaaaaatgcatttaaatattcttgtaaattttttaaaaagctttgtaaagttgtaaaacaccttttaaaatcattttaaaactttttaaaatctttataaattttttaaatacatataaacactttaaaaacctttgtaaatcattttaaaaccttttacaatggttttaaaagatttacaagaggttttaaaagattttaaaaatctttttaaaactcttataaagtttttatatcattttctaactctaaaaaattattaatattttaaaactcttatgaacccttacaaaaggtttttcaaaaatttacaagagtttttaaagattttaaaatcctcgtaaatcatttaaaaagtcttgtaaatcctttaaacccattgtaaaccatttaaaaatcttttagaaaatcttgaaaaccgtttaataatttttgaaccattttaaaactcttgtcaaccccttacaaaagggtttaaaaatacttatcagagttttaaaactcttgtaaatctttgaaatacccttgtaaatcctttaatacccttgtaaaccatttaaagttttttaaaaaacccatgtaaaccctgtaataattttgaactattttaaaactcttatgaacctttacataaggttttaaaaacatttacaagagattttaaagggtttgaaaactcttgtaaacctttaaaaaaacttttaaaaacccttgtaaatcctttaaaacccttgtgaaccatttaaaaatcttataaaaactattgcaaaccctttaataatttttgaaccattttcaaactcttgtgaacctttacaaaaagttttaaaacgatttacaagagtttataaagggttttaaaacccttgcaaattctttaaaaatctttttaaaatcccttttaaatcatttaaaactcttgtaaataaatttcctaccaaaacttatctgccaaattgctttttttcaaaaacatttttccacaaaaaaaaagaaaattgttaggaaaatgttttttgccggaaaattttgtgtaggaaactttttgtgggaaatttattttcgaaatattgtagacccgaaaaatcaatatttcattttgttaacctataacattttctaaatatgggtaaaatgatcattaaaaattaaaagagggtataaatgaaaatgacaaactggaaacggcatgattgaaaaaagaaagtgttgaaatgatattcttagcaattattctattttttctgagggtcggataatttgtagaaaattctaagaattatgccaaatattgttcattttttatggtagcaaatgccacttgtttttgctttctaaggtaccacaacctacaacccatcataaaatgaccgatttacccttcaccaatatcatatatgtatataacaaatacaaaaattaattatatatagaaaaatatcactcgatatgctcagaagacttgataattaactctcttcaattttcattgttccatcactactgttaacttttttttacgtatgtacccctataatatcaatttattcaattatagattgtaaagtgatattattgcatacggtaggagaagattttatgtagatattgttttgggagttgtattttttttatttatgttttttttttctttcccacctagcgatcagtcatcttttttgatcctatgaagaagaaaggttatcgcgatactaaatgttatcagaacgtgttcgtagttttgattcttattgtaaaacacaaatgaacaacatgtggcatcgtcgttatcgcgatactaatgttatcagaatgtgttcctaattttgattcttgttctaaaacacaaatgaacaacatgtggcatcgtcgttattattttaattatctgctagtagttgtatcgactaacattgttaccatttaaactcgtagtctattgtttgtgaacttttttaaaaacgttaactaaaatgatatagtatttagccgaaacgagattatcctgatactaatggtagcggatagaagcttatcgcgatacgggttgttaccaaaaagtgtttattagttttgattctttgtgtaaaacagaagaagacaacttgtggtatcgtcgttattatttttcttatctaatagaagttatatcgactaacattgttaccatttaaattcataggctattgtttgcggattagttataaaaagctacaaacaaatatgctcgcgtttaggggataagagattttcgtgatttattattataacgtgttactagctttgattcttgttgtaaaacacaaagggacaacatgtggcatcgtagttattatcttaattatctactagtagttatatcgactaatattgttactatttaaactcgtagtctattgattgtggactttctttataaagttaacggaaatatcatcgtgtttagtagatacgagattatcgcgagaccacatagtttctatttaaactcatggtttattgtttgaggattatttttaaaggccatacatatcaataatgattacaatatctttatatttttaatgtcggcgggagatatcttccaggatatctttaccatgcaacatctatgctataactatattttggttttataggggaattttcgtcagaaattatgttggagaaaagagatgattaattactcagttttaataataaaaataattttaaagttttttttgaattttttgttggtcaacgccggagtcaattaatcgatttaccggaattgtatgtcaatcgtgttaaccacatgacgttgtatagtttatatatgtggccatacaatatatttatttcatgtagctgagtatacaatagtgtagttgaaatgtgtgaatatgcattctcctatacttcatgtagttagcaaactttttttctagatattaatatagctcaaaatatatatatgtatatataatatgtctcacacatggcccatatcgtgacaagttctatagtaactatttacacttattttcctttttatttttgagcaatattatttttcttttgggcctattcaagtggttgactagtaatcaacgagaaatagttacatatatgttgcccacaaatagtagttacaaaaaagtgtctgcgaagatcattttgtgtgagtgactatgaacaaattgtccatgagcaataattgtagacaaattgtctacaatgttcatttgtaggctagatgtctaagattaatagttagggtaatattaatagatagccaaataaaacatacaaattaagaaagtagcagagagaaagttttatgttgcaaaataaccatagacccacgttgtcggaagaaatgaaataacaaagctacccttcatttgttgtaagatgaacagtaaacgaaacacatctgtgtaatttttcaaaatagcatgtaacattaaaattttacatgttatatttagtttaaaaacatgctatttcaaaaaacgtcatgaatgtttaagaaaaaacattgttatgaaatttttttacatgaacagaatcttaaaaaaaaaaattatatgtgattttaataaaaaccatgtattactaaaaaataagaatatatttttaaagaaatcacgtgtgatcttaataaaaaacgtgtattactagaaaatatcatgataagaaaatatattaaactgaatagaatgttttttccaaaaaataccatgtgtttttatgagtactatataataagagaaaataacaagataaaaagaggatattatgttatcgcatgtatttcagaaaaaaccatgttacaaagaatatttatgtaataacatgtgttctccaacatatttccgataaggtattgtgactcaaggttattttgtacattctttttgaatccatagtcatttattataaattctctagtagttattgataagtttaccacaagtggataagttgtagacttgtagcctcgtaggcaacaccgaggactagtggacaagttattcaccacatatcttctcagtatgttgtttcgacaatggacaacacttcaagtccgccaaatttattttcaatatgttgtttcgaatatagacaataatgacatattgtatacgagtagcaattgtagactaattatctacgaatattagttgtccaccgtaaatgcaacccaacatgtcctcaaatattttcttaaaaactaatactacaattatataaagcaaaaaggcatcaacgaggagaatgacataatgtcgagggtatttttgtcttcttatacaattcttaaaattatgtttggcatattaaaaaggagaatcaatttggcatgtgatattttccgcaaatgttacgttgtagttaaagttgcattttaaaccaaatttcctaatttgtatctaaatccgaaaccttttggagactatttcatcatttgactttgcttacatgaaatgatgcaaactattggagtacctactgacccaagggcttctgacacctttttgaacgacttaaatatcggaaccataagtcaatgaccaatagaacggccacttccgtctctctttcttataatttcttcacccgtcaagttgataagttctttaaataaacaagacaagttgaatatttctgaccaaaagaataacaaatagaaagtgttgccaactaaaaaccgtatttttctcatttgtgaactgactttcctttgtagtacaaaaacatgttctcacgttttcacatttccgagacgtgacttggtaagctctttttcttgaaatgtccaaatgagttttgtgcggacaatgcttataaactccggttagggttcatatttttcttgtgaatttaagaaaatatggagagtcatcataggtttttgttggtggtactgatattagtttcctctaatattcaccgtgttcaagctcaagcaggtacccacactagcttttatgttcagcatataggattttgatatgccgtttgaaatgaaggaaatatgaatgacccattttttttttcttgatgagctggttttatttattttaaccgtgtttgtatttgaatgttttgaagttgtttaaaaagaattattattgcacctatcttcattttcattttgaaacacttcaaattaagttacgtctgtctgggtttaagttttttttaaaaaggatatgaacaatacgaaatcaaataaaacataaacggttaattcgatggactgaaataaccaccgcgagtatcaaaaccgaacaaaacaaactagttatacttgtaatatggcaaatatagtttatattaataagagtgttttcacgcccgatccagaaatcgtgcggtccgatcggttaacccgcgatccggacacctctccatggtttagtgttaacatcttgtaattttaataccaaaaaacaaccacaaaaatctgccattaactcgtgatctggtgaaccggttcaaccgaccgggtttgaatttaacaaaattcatttaattttttgttttttggaataaaatataggagtttagtgtattcaatgttcagttattttaagaactttttctagttcttccttttctcaatcatcatgaagacactaatccttaaaagttaaatggtatcaacaacttaagagctagattgttttacaattaaactactttcgtttttaatttgaaatattagatatttcgataataatatctacaaatttactccatataatttaaggaaatttatcatagtgacctatattttgtgttttattactagaatgacatgccaaaaatatgggttatatgtgtaatatttatgtctaaaatgcccttgttttgctttgtagaataaaataatattataagaatgccattaataaaaacatttatttttaaaaaaactaaaatttatttacgatattgctactctgtctttttactagattttgataaatttgttgctctggttgcgacaattttgttttggaccacatattttttggtccaccatagattttgtttgacaggcttttttgtaccacaaacttctttgaatatttgaagcatcttgatgattttttttcgggacagatttgttttatgtagtctccctagattttttttctaaaactttaatatcttgaatggttgtgtaagatacctgccacatatttgtttttgagcagcaatttttttattgtgttggcaacatcttgttttatttaaacaaaaaaataccgtttaataaaaaaaaataaaccaaagaaatgatttataatgaggatagatttgttttatgtaatcacatactttataaactagtctataaatctggcattttcgattcacataatgaataacagatttgtttttaatcatgctatttatatttttcggatccaaagcataacatattttctcatatcatattatgcccgatttaattatgactagaataatttttttagtgatgacggacttttcgttagcagatttgtttttaaaattttgatacatctagtttcatgagacttattatatagcctctagtaaaactaaagtacaacacaactccaaatcttaccgttttgattgtatgtttacactagtttgattgcatttggttacgacacatttttactagatccaacagatttgttaagtttaaatatcaaaattctttatttatttatttaaaaggaatttaattaaaaacgtgattaaaagttagttagtctttctacataaaattcgggtttgtattatagttatttacttggattaggagtcatttgtcatttatgctaagattttagtcaatctggataaatctcaatactcctatctagaagtttatctagtaatactagaagtttgaccttgaatttatgagttcaatgggttgaacctggtcgctggtttaatggtatctctctttttccttttgagatagaagaaaagagacgagaaaaaatttgataccatcagttctgattttttcattttatttttggtttaattactattaacctttttatttatctctttaaacagggttcatcagttttgattgtgggttatcgccggatgaacagtctccttataatgaggaaactggattacagttcttatcagattcaagtgtcatccaaagtggacaaattggtaaaattgatgcaagtgtggagtggaagtacccaaagtcacagacaacgttgagatactttccagacggaatgcgaaactgttacaatcttagtgtgcataaagaaacaaagtatttgattagggttacaagtaactatggaaattacgatggtcgtaacgaacctcctagatttgatttgtacttaggccctaacttctgggtaacaatagatttggggaagcatgtaaatggtgatacatggaaggagattattcatatcccaaagtcaaactctctagatgtgtgtcttatcaaaacaggtacaacaacgccaattatatcgaccttggaactaaggtctctaccaaagtatagttacaacgcaatatcaggttctttgaagtcgacactgagggcattcctaagcgaatcaacagaagttataaggtacgtcaccattaaattgatattaaggttttttgactcgttccatcgtccattgttaataatacaagattgtgttgaagctcaggtacccaaatgatttctacgatcggatgtgggttccacattttgagacggaatggaagcaaatttctaccaatctcaaagtgaacagctccaatggttatcttctgccacaggatgtgctcatgaccgccgcaatacctgtgaatactagtgcacgattgagttttaccgagaatcttgagttccctcatgatgaactttacctgtacttccacttctctgaggtccaagtcttacaggccaaccagagtagagagttcagcattttgtggaacggaatggttatttacccagattttatccctgactatcttggtgccgccactgtgtacaacccgtcaccatctctttgtgaagtagggaaatgcttattagagcttgaaagaactcagaaatcaactctcccgcctctccttaacgccattgaagttttcacagtgatgaattttccacagtctgagacaaacgatgatgatggtactttttttcttcttcttaatggtagttaagtattgtatggggaatgtggtctaaatccaattaacctgtttgtcgggaaattttatgacagtaattgctataacaaagatcaaagacacacacagattgaatagaacctcctggcaaggagatccatgcgtccctcaactgttttcgtgggccggtctaagttgcattgacacgaatgtatctaccccaccaagaatcatttccctgtaagacctctataacacaatcactctttagacttgtgagaaaaacttgtctaactaaacttatacttgtttatttttcttcttgtttggacttatacacagaaacttgtcttcaagtgggttaacaggaaacatagcaactggaattcaaaatctgaccaaactgcaaaagctgtaagtatgaccatttaaagaaaaatgttatatacgtccgttacctttcttattgatttcttacaaacttcagggacttgtcaaataacaatttgacaggagtagtgcccgaatttctagctaacatgaaatcgttgctgttcatgtaagtttcccaaaaggttttggtggtttttttcccatggatcatcttcacctaagtatgtagatttctctggttttaacagagacttgaggaagaacaaactgaatggttcaataccaaagactctacttgatagaaaaaagaaaggactacaattattgtaagaaggaaattcatccacgcacattttaattcaagatccattgccttgttaaattcatcaaaacactaaaagatcgatatattatttttgtagtgttgatggcgatgatgataagggcgatgataataagtgtttatccggttcatgtgtcccaaaaatgaaattcccattgatgattgttgcattagcggtttctgcggttgtggtcattgcagtggtaatgattctcatttttctgttcagaaagaaaaagaaatcaagtttaggtatttgcatagactcaccaaatattaactaacaaactatacaatataaattaaaatgtcactgatattgttgtttctctacatatatctatccccttttcttgttatgccacaaataggtattacgtcagctgctatatctgaagaatcgattgagacgaaaaggagaaggtttacctattctgaagttgtggaaatgacaaaaaacttccaaaaaactctaggtgaaggagggttcggaaccgtgtattatggtaatttgaatggttcagagcaagtagcggttaaagtactctcgcaatcatcatcacagggctataaacacttcaaggcagaggtatgatatgccataaatcgtctatagaatcgcacaaaatttaaaagaaatcatgatctatatagatatatatttagcatcacgttaagcaaacatattttgtcattgttggtctataggtcgaacttcttttaagagttcaccacataaatttggtgagtcttgttggatattgcgatgaaagaaatcacttggccctcatctacgaatgcatgtccaatggagacttaaaagatcatttgtcaggtgaaagatgtatatatgcaaatataaatatatatatatatatatatatatatatatatatatatatatattatataaaattcataggacggttaattttgacaatctaatacaggaaaaaagggtaacgctgttttgaaatggagtactagactacgaatagctgtcgatgctgcgctaggttcgtactaactcaaaacagttccagtgacttgtcattttatatcaattagttactaattgtatgcatttgatacatctgttacaaacttctcatgatgaattatttccatcaatttttactcactggaatttctgacatgatcaactaacaacatgaatgagtctcctgcacaggattggaatacttgcattatggatgtcgaccatcgatagtgcatagagatgtcaaaagtaccaatatactgctggatgatcagctcatggccaaaattgctgattttgggctttcaagatcattcaaactcggagaagaatcacaggcttccacggttgttgctggtactcttggataccttgatcccgagtaagtactattagttcactcccatgataaatatgtgtgtaatttatgtctacattcatcttcatcgtttatatagaggtatacatataaatcctacttcatctctttgttttccagatattatagaacatgtcggttggctgagatgagtgatgtatacagtttcggtattttactactagagataatcacaaaccaaaatgtgattgaccatgcccgcgaaaaggctcacattacagaatgggtaggacttgtgcttaagggaggagatgttactaggattgttgatcctaaccttgacggtgaatataactctcgttcagtttggagagctcttgaattggctatgtcatgcgccaacccttcttcagaacatcgaccaatcatgtcccaggttgttatcgatctaaaagagtgtttaaatactgaaaactcaatgaaaataaagaaaaatgacacggacaatgatggttctctggaactgagctcgagtgatactgaggcggtcccttgtgcaaggtagtatttacatagacgctttgcctacgttgatgtgtttctgttggaagtgatcaagtcatgcatcatcttactttattgttttagaagagtcatatattatatagttaagtaactgattaatgtatattcgtatcacacatcgaagagatacgaatataattgttaactacaaaacaattacatgtgtgtatgtgtctctacattacgttgtcttctagagacgtgttccttagtgaaagtgtgtcatataaacctataaatacagtttgtatatctaataaaagtgtgtggttttcgttttataaaaacaaagtgaaatatagagtaagacaaaacagagtaaaatctgtgttgaccgatccttaacaactttgagagttcaaagttctacatggtatcagagctatggagacaacaatgcagcaagttattccaatcttcaatggtgaatcgtatggcttttgaaaaatcaagatgataaccatcttgaaaacaaggaagttgtgggatgttatcgaaaatggaattacgttgagttcgtcgtctgaaaactcaccaacgttaactagagagcgtgatgatcaagtgatgaaggatatgatgactcttcagattcttcaaagtgcagtttctaattcaatatttccgagaatcgctccggcgtcaagcgcaagagaagcttggaacgctttggaaatggagttcaaaggaagttcacaagtaaagatgattaatcttcagaccttgagaagagaatatgagaatctgaagatggaggagagtgaaaacataaatgatttcacaaccaaattgattaatatgagtaatcaactaaaagttcatggtgaagagaagaccgattaccaattggtttaaaaggtttttatctccttgccgcaacagtttgatagcatcgttgcggtccttgaacaaacaaaggatctatcaactctctctatgaccgagatgataggtactttgaaagcgcggagaagcgcttgagtctccgagaagaatgtatcaatgagggtgcgttttatggagaaaagcttggctcaagaggagaaaacaagcaaaacaaaaatcgccatgggaagaccaacatgtggtgtggcgtgtgtaagaagaacaatcacaatgaggtagattgtttcagaaagcatttcacaaagaggtggaagctatgaaagaagatgctatgtgtgcgacaagcctggacacatagccagagattgcaaacttagaaaaggtgaaagagaacatctaagtattgaagaatcaaaagatgaagaagaagatgagtgtcatatgctctttagtgttgttgaagaaaaagagatctcaacaattggagaagaaacgtggttggtagatagcggatgcaccaatcacatgtctaaagatgttagacacttcatcactttggatcgcaacaataaaattaccataaggattggtaatggtggaaaggtcatgtctgaaggcagaggaggtataagagtatccacaaacaaagaagatcatgtcatcaaagatgtattttatgtacccgaactagcaagaaatttgcttagtgtctctcaaatgatatccgtttgagtcatctttgaagataacaagtgtgtgattcaagatttaaaaggaaggaagatcttggacatcaagatgaaggatagaagtttttccaattcgttggaaaaaatcaaaagaagaagcgtatgtggctttcgaaggaaaagaagaacaaggaggagggaatgatctaaacgctcaaatagatcaaaatttggagggagcaatggatgacgtgaagtggatagaagacatgagagaagagctgatgatgatagaaaagaacaagtcgtggcaagctgtggagagaccaagcaattggagcagatcagttgaggacaagaaaagtacaagtggctatgtctttactcctggatttgttggaattctaacaagcagaagaacgttgctcaatcaacgaaagaggcggagctcttaaacacatcacggttcgaagttctacgagaagagctagatgtaatgatgaagccatgatcaaggaggagtgttggaagtgatcaagtcatcatcttactttattgttttagaagagtcatatattatatagttaagtaactgattaatgtatattcgtatcacacatcgaagagatacgaatataattgttaactacaaaacagttacatgtgtgtatgtgtctctacattatgttgtcttctagagacgtgtctcttagtgaaagtgtgtcatgtaaactataaatatagtttgtatatctaatagaagtgtgtggttttcgttttacaaaaacagagtgaaatatagagtaagacaaaacagagtaaaatttgtgttgtccgatccttaacaactttgagagttcaaagttctatataagatatgagcctctccacctattgtcaattagttttaggttggaagctcacagtctaatatggtattagatcccaatctgcacatactcaacccaatccacatcggtccgacccaatatttggcccgtcgatccatgcccaaacatatagagatcaatagctggaagagccatcatctcgagtgagtgtattagggatattatctcacattaaaaattgagtaggatcttaagtgatatatataagatatgaacctctccactcattgtcaattggttttaggttagaagcccagacaaagtgttacacaatctggtagaataactagagaacatgagggaaatttaaaatttcgttgctctcagaaaccatcaaaatttgatgttttaatttaaaattttcagaaatttagggaactggctcaagaatatcttgcacatattagattaaagtacatgataaacaattataaaaaaagtatttcttaatgatgtggacgtcttcgcgggggacaacaccctgtttgcaaacgtaagatacaaattaatatttatttacgaactcataaataataagattgttgctgttttgagcgaatgaagaaacaaaacaagagataaaaattatctcttctcttttgaataagacaagaacgaaaataactttttattgaatctgaaacttgttagtaattacatgactatacaatgagtttaataagaaacaaacagatacaacaacacagtgagttgtgtctctgcatacttgtgtttcttgacaaatacataaaaccttaatataattagaaattcaattatgagaaatttgcataaataactaacaaaaacttattatttaagaaagtaacatcaaacaaaaaaaaagttgatatgttatgtattttctgtattaatgacaattttgccctctaaactacatacaccttttattttcctcttctctatctattgcatatcacgttgtctctttcattagattctccattcttcatgtgacacaaaatgctagattctctaacctcacgaaaggtctctcttcctgttaaactcttttctttgcaacccgttgaaaacactaaatctatttataacacaatatttgagtttgtaaattattagtattttgctctcgttatttatttgttgatatgtgggttcttttttctctctctctctacctagtaatctcattatatatatataaataaaataaaaaactaactataattacattactaacaagtaacaattattattacactactatctccaccgccatcgtcaccgtcttccccaccagtaccttcaccactaccgtcattgccgataccatcgtcatctcactactaacaattagtattaccacatcaacgtcaccattagtgccacagccaccactaccatcgtcatcgttaccaccactattactactgtcaacgtcaccgctacggtttacttcagttatttggattgccaatgttgtatctattagggtatagtatttttttgtcacaatgatttaactcgatcttttggattgtctacgtatagttaatactatgagaatatgtactagataactatgaaatcgataatattatacaaactaattatgagctacagtaacatgtcggagagatagagaaaataacatatgtaacctccattcaatttttctctcttttgtttatctttctctcaccatcattattaaacctcaaacttgatctttccaccatggcaccatcatcatcaacaccaccctcaactccaccgtcagtacgatctttgtttcctctgacattgcaatagaactctatagaaaaaatttactaatccttttagtcatttagaattctcaattttcttccacctccattgatttcaagagccacatgtctttttctactcttgcatatctctttcacttccatatcctcttatttctctctgatttcgatattctttgtaacccatcgtcatgttctacaattaccacacgaacctgtgactcataaattcgtttcttagatccaaaatctgtatgaaaaatacaagtagtatttttggaaatcatgctaataaaacaaatatctatatatttatcaatatttcgtgagatctaacaaaatctcatgtattttaagtaattttcatgttatttaacaaaatacatatacttttcttttagatacatgttattttcacttaaaaccgtgtttctttagaattgtcatattctatatcaattctattaaccaaaaatagattgaaaaatacaagtagtatttttgaaaaacatgttattaaaacaaatatctatatatttatcaacatttcacaagattcaacagagttacatgtatttttacgtaatcacatgtaatttttaaaattctcatgttttttttgttttttcttgatctccaccactagagatcttttatctttggtttgatcttctccatcaccacttcctctgcaaccatcatcatcatatagagttatcaacatcaatcaccaccgcctttaccaaatttgttataacattcggttcttcattacggccacctccgtaacctcatcgtcactttcattcgaatcacttccaccatggtatctatttttgctcccctaatctttcaccaccattgcttcctctgaaaccaccatcatttctataccacattcatcatggttctaagaccattgtaccgctttcaccatcggagctaatttttcttcaccgaatctttacaccaacttacaaagcaaatatatcattttataaaaactataatttcagaaggttaattggtcttttactcacccctaccccaccataaaaagagtcatttacccaacatttctgacatatagttattttcttaattatgatgtcaaatttggctatctactaataacaccctaatattatttagttttattctatactattttatttgtatgttttagataaatattattcacttttttagataatttgtattagattttaaaattttaaatcatgttatactcagaaaaaaatctatgtttttataaaactattgcaagatttaatcagttatttttttaagtttaattcaacaagcaaaatcatttggggtaatattagtttggccatatcatcactattttctctcttcttctacacatgtcactacgtactctttctttttccactgcacgtgtctttcactgctgtacaattttttgtcttttcactaatccaatatattactttcttaatatttttgaataaaatactatattcttaattatatattggattttgattagttttgcaattcacccttcaattatctaccaacaaaaattgcctcctaactctaaatgtaaaaaaaaaaaattggcttcaaaaacgaataatacatgatcactagattttaacccgcggtataccgcgggacgatttattttttaaaaataatatatattaaaatttgcaaattttatttttataaaatatttatattttacagtttataattgttattaagtaaggctataccacgaatctatgagacaattgttaaaaaactgaagttgtaacccctattaaaacaacatattaataatattttaaaattttataaatattgattcaaatacatccaccatataacccaattccaaaataaaacccgttctataatttctttacccgtcccgtgattttttttttaaagtactaatttttaaaatttaagaattattttttatagataaaagttttgcaaattatatcattctctaatacatttatattttatatatggtaacattatacataccacataacatttttggttttatataatcttttctaaattaagatgatttgatatgtttaatattagtggtcttaaaaaataataaattaaagatttaacccgtattgaaacggtgtattaattatattttacttttttattaatgttgattcaaaaacccgtcactccaaatctatcttgccaaaaagccatttattttattaatattaattttattaatgatatgattctgaattataatctaaatattttagctaataacataggagtataccatttttatttaataggggaatgtaccatatgaaccgaatgcacttttacccaaatccaccaaaaaagtcttgtaaaaatactatagagataagaaacgatagtcggttttgataggtataagattagcaaatatattagttagcttaaattagttaaagaatacaaattaaaaatatatattatactttattcgaatatagtatcaaaacttatataacacagagatttgataaaattttaattgttgaatacttttttttgtgctaatttttatgtgattaagatttaatttaagatttaattgattttgtatataaaatattaaaagtaaactgtgagttgtatatgttttgttgatattatctatattttttagtgtttaagattatacacttgtagtttgattgttaatttaagagtttcacatgtagtataccatcttgtattaatatcgatctaaacccgtcaattctaggatttttcagcttgcattaaaaattgaatcacatcatacacataaaaaaatctaatatattattaattattgtattatataagattataaattttcaatataatatgtatgaaattgaatataaatatttcaaattatgacccgttactcagtagaaagttttcttaaatctatttttcacccgttataatattttttcatgtattgaacagtttatattcgttttcaaaaattcaaattatggcatatgcgaaaaaactctaattatttttttataatgatgatattatttttcgcaaaaatagaatcatatatagatgagaagtgaactataataattaataaaaaattaatatgataatttagatatcaaatctaatttgttgattttaataggttacttttttggaaattaataatgtatttcgtttttctaattaaattaaattaattaaaatttagatatcaaatcttatatgttgattttgattggttattatttttgaaaattaataatgtatttcgttttttaattaaattagtaattgactttttaatctttaaagagataaattaatttactctttaaaattttatttctaatgacatacttatgtaattacttacaaaaattaaggttatatttaaaatgtacttcccaaataatatagtaggatgaataatccatttttttccatgtcaacatttcttcacctctcgtgttagttagtagttccgtactattgtagaccacttggatatcatacttcacgtataactaacaataaaaaaaaggcttattgtccactaaaaacgtacttaatccttaaattctttttgcgtcttagttacagcgatgctagtaacggtgactagtctactttatttgctattgcggtttggtgtggatggaagtggcggtgcagcaatgttttcggggataacaggaaatgcagtgatagggtgctttttatcaaggatgtagctgcggaggtttcgttagctaccacgagagaaggaactaaggccgtcgactactcgagttaatatgcagatccgttggatggctcctatagagggttggtacaaaatgaacacagatggcgcctctcgcgggaacccaggtgtagcgtctgcgggtggggtgctacggaatagcgcgggagaatggtgtgggggatttgcggttcatattgggaggtgttcggcgccattagcggagttgtggggtgtgtactatgggttgtatatggcctgggccaaacaacttacgcacttggagttggaagtggattcggaggtggtcgtaagcttcctcaaggcagggataggtgagactcatcccttgtctttcctggtacgtttgtgccaaggctttttattaaaggactggcaagtccgtatttctcacgtatatcgggaagctaacagtctagctgacgggttagctaaccatgcgttctctttgtcgttgggtcttcatgtttttgatgaggttccgatttctgtagtcacgctgtttagcaaggataataacgggcctgcgcgcctaagacaacttcgtttgtaattttttctatttagttcttaataaaatccggggattttccccggtgattcaccaaaaaaaaaaaaagtaacggtgatgacaattttgatttcaaaatatttgggtttttttttctctcccattttaccactttttcatattcatattacattgtgtagaaattattcatatgagcgtttgctaatattttcaggactggtcgagcgattcactgccaaaattgtgaattttgtgcttacaagatcttcccaactcggaaatgaatctcatatttcaacgattgttgctggtactcctagataccttttgataccgagtaagaattttaaattaacaagtggaatcttttagtcgatgctatactatcctagatgtgaacttcaccatgccatgccatgttgaaatttgtgtccatattcatattagttggtaaaataatgggcacatgaatcatactacatattattgtcttgccagatattacagaacggttcggttggctgagatgagcaatgtctacagcttcgggattgtgttattggagatgatgacaaaccaacgtgtgattgaccaaaaccgtgaaaagcgacacataacagaatgggtagctttagtgcttaacagaggagacattaccaagatcatggatcctaatctttacggcgattacaactcaaattctgtttggaaagctcttgaattggctatgtcatgtgcaaacccatcttccgaaaaacgaccaagcatgtcccaagttatcagcgtactaacagagtgtcttagagcatctccaatggagagaacccctccatgggctctctccatttttatatgattaaattttctaaaaaatgtataagagagcttttggtttgtttttttagtttttcgtactctaatgataagctctctgactcgggttctctgaaaaatacaaattattttaaaattattttatttcatataactttgttattattgcaaatcagaaaatattaaacatacattattttgaaacgttttaaaaaattgtgcaaataaaaaaaaagtgttttgtctatgtaaaaacaagaaatgttgtttgtgtttttgtaaaaaagaaagtgtttttcttttgtaaaatcaagaataaatgttgtttgggtctttgtaaaaaaaaagaagaagtgttgtttgtgtagaagtgtaaaacaagaagaaaaggttttgtttgaaataatatgtacaatcatgcaatacggttccttttggtacaagacattcaaaatgaggtatctttcaatatagtacaagacattatatttcaagaactgcaatatctcctcaccgtgtcctttatcacctaaagcggcaccaaatttcctgaactaaaattgtcaattaaatcacccaatttgatctttacaataggtttctgaaacaaagtcactatcatccttagattttcagcaccataacttttcttcttcctactaccttctctaataaagaactaccaaaatattactaaaccaacatacaaagatccaacagctccaatatcaacaattttattaaatactactgaaggtcatgcctcaagaaaactcctccataactcttctttcaagtcaatcaaaatactatcaagcaagcaagtaaaccttgatcttatcccctttatggggcttgtactgtaaaataagaaaaaatcaaagtaactgcatcaaccaatagagtatgcagggaaagcgtaacttatttcgtaaactgaagttcccataaccataactacatcacaaaaaggaaagcatgaataagataaacagagaaatcttgagaagaaatcgattaaatttagaatagagtttcatattagaatttagaatcgtactagtaatgccgacactccaataagtccaccatggtgctccaccgttaccagcatttgaccagagcttgatcactggccattatcatattacagacaaatacaacattttcagctccattagtctgtattcgatgataacaaaatagagatggaaatgaacaagtgctcctaaattgattcaatcacataacatatgcaaacaaatcacgactgatttttatgattgaaaacagaacagattaaattcaagccaaatccgagaaagtcaaaacgattcaaactaatatatctatcaatattgccaaaacgtaatcatacaaacctataaaccttaaacgtaatcatacaaagcaaactatagccgatttgctatgccgtcaaccattactctacaaatcagatttgttattctgcgatttcacccaacttctgccgatggtcattagcgttgatgaatccggcgttggaaacctcagataacacgccaacaaacaatcaccatcgtcaattcatcggcttatcaagagttcaccggtcgcgcgagagagaaagaaaatcgatttcggacaaaacaatgaagactacgcgttttaatttttttcttttgttaaaagaagacaaccaataaatataggacacgtgtccgcctctctgcttccctcataaactctcttcagagaaacgcctctctcgttttcttttcgttttgatttatttttaatcaaaaaaatcaagagagcctttgaaaaatagctttaaagcccagcgttagagatgctcttacttctaaaaacttgatgagaaataagaatcatgacatggaatctgatagttcccttgaactaaccaagagctttgatacagaagttgtccctcgtgctaggtagcttttgcaaagaagcctcgtatgtttgaagtgtttcttggcttgtggtatgattctttggtcaaataagtccttaaactttttgttttgagatatcataactaaaaaacaagggaggagcagtcctttaatcttgtttttctctcttgtatgggaaattgttgtttgcaatttcgttccagattcattggctatttatttctttaaacaaaaacttatagccaacaatcatattggctgcaaaaagaagaaaatgatgctacaaatgtctcttgaattttcttttatttgatatgacttttcatcgttattaaaagagacaaagcctgagttaccctcaacaccatgaaaagactaagtgttgttcatgatacatctggtttattatgctgccttcaatgttttcttattggccatcaaatggccgctccatgtgatagctcgattgacctcttggcatgaatttatctttgctggtttcctttttttttttactctttttatcccatcttagttccctccatggacaagatccaacaaatttcaacacctaaaaatgactacaatatgaatatgcaatgcatgtttaatgacgataaaagacaaaatataactaaaatgcaatgaaaccaagaaaatggtgaaaatctaagagttaaactaggtaaaatacaaacacatcaatttcccatacttgcctttttatttgtaatcaaacaaacaatgcaacaaatttttttatgaaaaaggtttaaaagtggagagttataaccaaaatgcgtagcttaccatttctaagctcgagatgaaagatcttggaaagacaaaattttgtctaggattacagattgagcacctgaagaatggaatccttgtgtatcaaatgacatacacagaaaatgtgcttaagagattctctctagacaaagcacatccgttgagtagcccaatgattgtaagaacacttgatgtggataaagatccattccgtcctcgagaagaaaatgaagaaattcttggccctgaagtaccatacttaagtgcaataggagcattaatgtaccttgctagtcatacaagacctgatacattttcggtgaatttgttagcaagatttagctcatgcccaactcgaaggcacgagaatgggatcaaacatctccttagatacttgcatggtacaaaagatatgggtatattcttctgtaactcgtccaaagaagacttgattggttttgcagatgcaggatatctatctgatcctcaaaatggtcgatcacaaacaggatatgtgttcacctacggtggtactcctatttattggcgttctatgaagcaaaccattgcagccacttcctctaaccatgtagagattttggctatccatgaagctagtcacgaatgtgtatggttaaggtcaattatccatcatatacgaggagattgtggcatacttacaggaaaagaagtccctacggtcatgcacgaggataatgcagcatgtatctcacaactgaagaaaggatacatcaaaagtgacaaaatcaaacatattgtaccgaaatttttcttcacccctgatctacagaaggatggcgaggtacttgtcacacagattcgttcaagcgagaatttggcagatttatctaccaaggcgctaccaactgctacttttaagaagttattccaaaagctcggattgcgtcgtctcaaagatttgtgatgtattcatgagggggaatagatgcgctacactctttttctcttaaccatagttttttccagtggatttttttggtaaggttttttaatgaggtagcattacatgcacatttgcaattcctttatataataactagatattaacccgcggtataccgcgggcctatattttcattaaataaaaaataattgattttttttaggatgatttataaatttatgctattgtttgatttaaatgtatgatacaccgcgagaaaaaaaattctaactcaaattttaaagttttaagttgtattttttttattttgttaagtgtttaatattgtatataaaaattgtattttgattattgtttctcggatttcaccgtactacaccatcctatattaatatcgactcaaacccgtcgattctaggatttcacccgtggtagtatttaattgtataattatattttgattgtcattctaggatttcactcctagttctattgcaaattattatcaacccaaaccagtcaattctaaaatttcacccgtagtataaagtttaaatatttattatatttaaacttcttataaaagaatcgaaatgtgttttcaaaaaattaaagttttttaagtgtatttttttctaatattgttaattttgtttagtgtttaatattatataattatattatgattgttaattataaggtttttccgtaacataccatcccatgttattatccactcaaatccgtcccaccatataaccccgtctcaagaaattaaacacaaatttatcattttattataaatttcaaatatttataaaattaaaaacttcaaaaaaaattaatagtgacccaaacttcatcattgaattttgattgttatatctaagatttctttcaaagtatatctaggatttctctcgtagtatatcgtcccgtattaatatcttttatattctttataatgtttaaatttcttgtaaaattcaatttatagttttttgaaactttttaaagtttcaattctttaaactaaagaaccctaataaacaaaccattttaattttggacacctcgtaaatcaagcttcatgctcattcgtaatcgaaatcattttttttttttttttatggtatggctctgaaccattgtccaaattttttaagcaatgtgagatattgtacaatcgtaatgttatccacccaaacacgtcctaccatataacccagtcccgtgaaattaaacataattttgttattttcttataaatttcaatattataaaacttgaaacttacaaaaatacaatatctgttatatttaagatttttcatgtaatatatcgtctcgtattaatatatttaatatctatttataatgtttaaatttcttgtaaaattcaatctaatttttaaaacttcataaattttaaagttatgaatatttaaaacatttttaaagataaactttataaaaagtttttaaaattataatatttaagttttgataaagttataatatttataattttttgaaacattttaatgtttcaattctttaaaataaaaaacttgagtaaatcggataactattttaattttggacgcctgataaatcaacctttctgctcattcgtaatcagaatcattttggtccttttataatatggctctaaaccattgtccaatttttctaagcgatgtgggacattgtacacatattatttcttcatcggttgaataatatatgttcgtttaaaaaaatttgaattacattatatgcagaaaaaatataatattttattaactataaattataacatgttatatatttataaaaaaaaatatttataagtataacaaaataaataaagtagaagatcaaataaaagtgaaagaagaattatatatttatgtttaaattaggtaaaaatattttaggaaattagttaaggtaaataacaaatatgcttagtttagagatattatttattttaaatttggtaattaaatcattaatttcgtttttgaattattagttcttaggtaacttttccaaaaattaatgttatccaagatccgaacagaattaaacatgttatccaggatccgaacagagttaaacctggtaaaacccacccatttgaattaattgttgaattatggctcaaatcttcaacattatcttcaaaaaactgctacaaaaatgtatatatagatacggaaaaacggtctatttctccacgagaactatgacatcatgccagatagagcccgatctatgaccacgatccagatgaccccgaaaagataattctcgatctatatctccatgaatctatagttcaaaacctatatcaaccccataagcataattttcacctatttacccacaaccattggttttgttcggtttactatttctataaccaactaatgaaaacactaaaccagaataaacctaatttaaccgagtatcactaaataaataaacaaattaattaattaattgaattattatgaaacagtaacaacacgatgacgttcttcttcctttcaatggtgatggtgatggtgatgttggctccagtgatggtggctatagatatattttccagtttttccccttttcttcttatccctcatctccgctcagatctgctgcttaagcaaagcttcatcgactttgattaaactcgaattgagaccttcccacattattccacccattgaaatcacttgcttcattttgtagaagattaataacgttgaatcagccattgtcgacttgatggtttgtgttgattgttttctgttttttgtaattaccagattgattttaagatgagcaattgaaagaacagtaatagaattggataaaacttatttaataattgagatgttgattttgtttaattgggttgttcttttgtgaattgtaaaattcatgcggaagctcacctcgatcttctctttcttagccatattcttagcaacgattccagttttcaggtcaatgtcgatgttaacgttattagcaatgagaatgcgtttaaaatgctttgttgaatatctcttcattagttacgacaaatttgtatgtggattcaaaataaatctaacacccatcgtaacaatcaaagagagataaactattttttcaaataaacataatctggaattttatagggaagaagagagaagacaagacgacagcaattttgttatttctttttttattattaatttttttttttaagaaggtttgacatataaagtggtttggtatcggtttgagtggatttttatcgggtttggtcagcaaaccgattaaacccaaatatatggggaaatagatgaaaactatcaattttggggagataaaagatcgagaagtatctgttcggggacatctggattgtggtcatagttcgggctctatctagcatgatgtcatagttatcgtgggaaaataccgtttttccatagattatcagggggaatgttatgaataatagatattatatggatgttcattaagagcccattagaatattctagaaatctttacattatttggttaccctaatatgtatctcctatatatatcctcttgttactcatgaataatacacaacaacaattcctaaacctaattgttctataacattgagtacttttagtaagaaaaaaaagaagagattatttgtgtcagattgacttatgctagatactaattaattcaccttacaacttaattttaacgtcaaaaagtgttattcttgctaatttcacttaagatttttaagtttatcattgtttgcaacatatttttttttgttaaagggttttaattgtctgcagcatattgaaattataagttgcaaaatcggaaagtagaaagaattcaaagtgtatgttaaggaaaaaaaagaaaaaacatcgcaagtgttacactagattaaattcatctcatttggagaaaagatcctaacgaacggcgaacccagtatctccacctaagatatttatcactagaccaaaaccacgttggttgactcgacaaacaatcaaacttgtctcaaattggatattacatagaaggtcaggaggattaccaatctgaagaaatgaaggagatgattcggtcacgaatgggacaacaattattcataaatatccaggtaagagtttcatgctttggtatactagtttatactaatgaaccagtggctttgaaactctggtttgattgtaaatttgactggactataagcatttttgtgttgataactagtacgaataaacaaggcaagttgaataaaaaatactgcccactagcaattaggaaacatatttattcatcagtcaattgcatttcctttgtagaacaaatccattatttgataatcgcataggtgtgacctgttttacatgatttcaagaggcttgactttatttttttaaagagaaaagctgaggcatgacttggcaattagctctttcacttaaaatgtccaaatgagttttgtctacacaatacttataagctttttgttagtgttcagatttttcttgggaatttaagagtaaatggagagttcccataggtttttgttggtggcgctaacagtagcttcctctattattcaccttgttcaagctcaagcaggtaactacattttaattcaaacgtttaggatttttatatacattttgagaaaagtgaaatgtataatattatttggataagcagtgtatatcttattaagtggctatgtttgtaaaaacgcctaagcatagaatctacaccgttgagtttgaaccattatattaacctcttctatctctttcaatagggttcatcagtttggattgtggattatccccgaatgagcaatctccgtatgttgagctggaaactggattacagttcttatcagattcaagcttcatccaaagtgggaaaattggtagaattgatgcaagtcttgagtccaagtacccaagatcacagactacgttgagatattttccagatggaatacgaaactgctacaacgttaatgtttataagggaacaaattatttgatcagggctacaattaactatggaaattacgatggtcttaacatttctcctagatttgatttgtacattggtcctaatttttgggtgacaatagatttggagaagcatgtaggtggtgatacatgggaggagatcattcacatcccaaagtctaactctttggatgtgtgtcttattaagactggcacatcaacgccgatcatatcagtattggaactaaggtctctaccaaataatacttacatcacagaatcaggttctttgaagtctatactaagatcatacctaagtgtatcaacaaaagttataaggtaagtcaactatttgatattaaagttttttcttacccatttactttttttttagtcattgcaaattgtttgtagataatgatgtacaagattgtggttaccgcaggtacccagatgatttttatgatcgaaaatgggttccatactttgagtcagaatggaggcaaatatccaccattctcaaagtgaacaacaccattaatggttttcttgcgccgcaagaggtgctcatgactgccgcggtaccttccaatgctagtgtgccattgagtttcaccaaggatcttgaattccccaaagataaactttacttctacttccacttctctgagatccaacctttacaagccaatcagagtagagagtttagtattttgtggaacggagaaattattattcccactttgagtcctaaatatctaaaggctagtactctttatagtgtgtcaccatttgtttgtgaagtagggaaatgcttattagagctgaaaagaactcaaaactcaactctcccgcctctacttaccgccattgaagtttttacagttatcgactttccacagtctaaaacaaacgaagatgatggtaagtttttttatggatagttaaataatttatgtggagtacatatgctcttttgatgaaataatcaaaacatctttatatgctaaatctagcgtaaacttatgacagtgagtgctataaaaaacataaaagacacccatggattgagtagagtctcatggcaaggagatccatgcgtcccacgacagtttttgtgggaaggtctaagttgcaacgacaagaatgtgtctgcatcaccaagaataacttccttgtgagatatctactactcaaccctcgttagacattttagaaaacattttctaactagtaactacacgagacgttaattattatttttgtttggatctaaacagaaatttatcttcaagtgggctagtgggaaccataccttctggaattcaaaattttactcttctcgaaaagttgtaagtatggttaagtgaatgaaaatagtttgttaatgcaagtgaatttttttctaattgatttcttacaaattaactttagggacttgtcaaataacaatttgacaggactggtgcccgaatttctagctaaaatggaaacattgttgttcatgtaagttttttccgacatgtttatactttctcatggataatttcacctgaacttaaggacaattttttttttggtttaaacagagacttgaggaagaacaaactgaatggttcaattccaaatactcttcgtgatagagaaaagaaaggactacaaatattgtaagaaggaaatccattcgcacacattttttttgttcaagatctcccttgtggcacaaggcttttgcattcaaaatactaaaaggtagatgaattattttgttttgtagtgttgatggtgataatacgtgtttatcatgtgtcccaaaaaataaatttccaatgatgattgctgcgttagctgcttctgcgatagttgtcgccatattggtactgattctcattttcgttttcacaaagaaaaagtggtcaactcatatggaaggtattattaattacctaattattaacgcaacaatttatatattataaggtgtcatggatattgttgtctcactagattgttatttgcatatatctatccccatcagtaattttgccaacaatggatattatgtccaagactatatccgaacaattaatcaagacaaaaaggagaagatttgcttattcagaagttgtagaaatgacaaaaaaattcgaaaaagctctaggtgaaggagggtttggcatagtctaccatggttatctgaaaaatgtagagcaagtagcggttaaagtactatcacaatcatcatcgcaaggctataaacacttcaaggcagaggtatgatatgccatagatcttcctacaatatgaaaagaaaaaaaatcacacaaatgtatttttgttttatatatttcacatcatgtcaaacaaatgtgttttgttattgttggtttgtaggtcgaacttcttctaagagttcaccacataaatttggtaagtcttgtcggatattgcgatgaaaaagatcatttggccctcatctacgaatacatgcccaatggagatttaaaagatcacttgtcaggtgaaagatgaatatatatcattattagaaatatttaattcataggacgactaattttgacaatttgatacagggaaacaaggtgactctgttttggaatggactaccagactacaaatagctgtcgatgttgccctaggttcgtactaactcaatataatttcagtcacttgttcatatttaaagatgtcatcatgactcagaagtagatatatatgattcaactatatggacataaaagtatatgtaaatacatcttaatataagtaaagcaccaaatccatataaacactttccagtaaaataattgtatccacaatttgacacatctgttataaacatattaaaatgataagactattattttacatgaagctttcactcaccggaatttttagcatcaattaacaagagtgagtctatttcataggattggaatacttgcattatggatgccggccatcgatggtgcatagagatgtcaaaagtacaaatatattgttggatgatcagttcatggccaaaattgcggattttgggctttcaaggtcgtttaaagttggagacgaatctgagatttcgacggttgttgctggtactcctggttatcttgatcccgagtaagtactattagttcactcccttgatatatacaacatataaattatgcatgcattcatcttctttgccaaaatgtatacatataaattctccatctcctttattgtccagatattatagaacaagtcggttggctgagatgagtgatgtatacagttttgggattgtattactagagattatcacaaaccaacgtgtgtttgaccaagctcgcggaaaaattcacatcacagaatgggtggcatttatgcttaacagaggagatattactaggattgttgatcctaaccttcacggtgaatacaactctcgttcagtatggagagctgttgaattggctatgtcatgtgcaaacccttcttcagaataccggccaaacatgtcccaggttgttatcgaactaaaagagtgtttaactactgaaaactctatgaaagtaaagaaaaatgacacagacgctggtagttctctcgaactgagcttgagcttcgatactgaggtggtccctactgcaagatagttatgtgcatagacgcgtaccttgtgtcgacgtatcctacttgtgcgtattgttcttggcaaaagaatgtttaaattctatttctagacgtcacaagcttataactacataagagacataaatgtacaagtcttttgatcgtgtatatgaatttgttgtctggaatttgagtacctaccttccacattcattaactatttcattatgaaattagatcacactaattattaaggttaggaaagaaaattatggatagttttgtgcatgatgaagcagggggataaagccaagtgttacaaaatctagtagagaaacaagagaacataaggtgacaactcggtgagctcagaaaccatcaaatattttcaagtattagttaaaatatatttcagaaatttaaggaattggctcaagaatatctgtacatattaaatgaacttacatgatacaacagtagtaaagaaacaaaaatcttcaatgatatggacgcatgtgccggtgatagcacccagtttacaaacgttataaaaaaaaaaatacaaactcaaaaataataaaattgccttaaaactcttaatgcaaaaaaaaaaaaaaaaaaaaaaaaaaactggcttcaaaaacgaatattacatggacaatcagaatgttgcacaagactcactagccatatacgacaaccaagttgcataaagcaaaataataaatcatgtcaactctttctatgtcaacatttcttcacctctcatgttagttagtggttccatactattgtagcctatatttgtttagttattagtagtttctttgtgataaaactagaccacttggatattatatcacatagactaacaaaaaacggcttattgttcactacaaacgtattttaaattcttctttgcatcttagtcatgttctcacgtttttttggcaacttgggaaagtcttttcttgaaatgtcgaaaaataattgtgttctccactgcttatcatcatagatatattgttcagaacttagggagttagggcagtgcaagtcttttgcctcggcactaagagaatatggagaatccccatgtacttttgttgctaccacttatatcatctttatctattaatattccccttgttcaagctcaagctcaagttaacgatggtacctatttcggttttataaatttcagtttgaaattatttgatttttccttcgtttttatgcctgaaaatagttataaaatcgtacctaccgatgtcgaagtcatataattgatttagtcactagctcaatgggttggaccaactggaccgtgcctggatcgcttgttaatcatcaatcttcctaattcagttcttgatatcgtaaaaacaaaaaatcgttgttaacacattgtttgctaatttgtatcattttccaaaactatagtctattcaaacaccattgacatcttaaaatcaacagggttaataagtctccaaattccagttctcgaaattccaataaaatttgttgttcttgctgctgccattgtgatcattctcgtggtactggttctcatttgtgtgtgcagaaagaaaaaagcaccaagtcatgtcgaaggtagttgaagagacactcatcaacaaaattatacgttacatgttttatttttatactaaatatttctttctacagatatacccccttcaccagtttcattaactactagtaaatctgaagactcgatcaagacaaaaaggaaaaagtttacttattcggaggttacagaaatgacaagtaactttcaaagagctcttggtgaaggaggctttggcattgtctatcatggttatttgaatggttcagaggaagtagccgttaaagtactctctcaaacatcatcacaaggctataaacatttcaaggcagaggcatgtaatcccttaaatcttccaacaaagttgtaactaaaaatctacgtgacacttctatatatattatttatgcatcatgctaagttaatgtttttatatgtttgttcattgtttgtatgcaggttgaacttctactgagagttcaccacacgaacttggtaagccttgtcgggtattgcgatgaacgaggtcacttggctctcatctacgaatatatgtccaacgtagacttaaaacatcacttgtcaggtgaaagattattatttcttccttttaaaaaattcacatgataactaattttgatgatttaatgcaggaaagcatgatgtctctattttgaagtggagtactcgattaagaatagccattgatgccgcactaggtttctactaactcaaaatagttcttagtcactttgtttgtttagccaaaacgtttttgagatcactgaatattgaacaaatatatcttatcctaacttaaactaacctattttgagtcacctgttagccaaattttgaagaatttgttatagtgatgctaataccggtggtgaaatttttgaattcaaaatattgtcttttttccccactttaccttttttcatattcagattacattgtatagacattatacatatatatgagtgttcgctaatatttttaggattggaatacttacatattggttgtcgaccatcaatggtacatagagatgtcaaaagtacaaatatattgttggacgatcaatttactgccaaaattgcggattttgggctttcaagatctttccaactcggagatgaatctcatatttcaacagttgttgctggtactcctggataccttgatcctgagtaagaattttaaaataactttcgagcttttttaataagtggaatcttctagtcgatgctatactatcctagatgtgaacttcaccatgccatgccatgtttacattttgtgtccatattcatattagttggtacaataatggacacatgaatcatactacgtattaattattgccttgccagatattacagaacgggtcggttggctgagatgagcgatgtctacagcttcgggattgtgttattggagatgatgacaaaccaacgtgtgattgaccaaaaccgtgaaaagcgacacataacagaatgggtagctttagtgcttaacagaggagacattaccaagatcatggatcctaatctttacggcgattacaactcaaattctgtttggaaagctcttgaattggctatgtcatgtgcaaacccatcttccgaaaaacgaccaagcatgtcccaagttatcagcgtactaaaagagtgtcttacttctgaaaacttgatgagaaataagaatcatgacatggaatccgatagttcccttgaactgaccaagagctttgatacagaagttgtccctcgtgctaggtagcttttgcaaagaagcctcatatgtttgaagtgtttcttggcttgtggtatgattctttggtcaaataagtccttaaactttttgttttgagatatcataactaaaaaacaagggaggagcagtcctttaatcttgtttttctctcttgtatgggaaattgttgtttgcaatttcgttccagattcattggctatttctttctttaaacaaaaacttatagccaacaatcatattggctgcaaaaagaagaaaatgatgcaacaaatgtctcttgaattttcttttatttgatatgatttttcatcgttattaaaagagacaaagcctgagttaccctcaacaccatgaaaagactaagtgttgttcatgatacatctggtttattatgctgccttcaatgttttcttattggccatcaaatggccgctccatgtgatagctcgattgacctcttggcatgaactcatctttgctggtttccttttttttgactctttttatcccatcttagttccctctatggacaagatccaaaaagattcaacacctaaaaatgactccagaatgataaatatatgcatatgcaatgcatgtttaatgacgataaaaatacaaaatataacttaaatgcaatgaaaccaagaaaatggtgaaaatctaagagttaaccatgtaaaatacaaacacatcaatttcccacacttgccttttaatttgtcatcaagaaaacaatgcaacaaaaaactttatgaaaagggtttaaaagtggagagttataaccaaaatgcgtagcttaccattgctaagctccatagataaaagtaaaatatttcatcaaccaagttttactctaacgaatcttttattcagaggtcatactaagacttttggtaaaccaagggtgcagatttatacgtgttttaatttgagaaattgtaatttgattgggtttttaacaaatatttctattaatttttactagataatgccctaactagcttactcgttactgatgcttcctttgtaattaacatatacttgacgaaaaaaaaaaaggaaattaacatctaaaaataaaatcaaatgtaaatagtacttaaacatgggaacgactagacgttgatgacaagacatgctcctgtcgttataagaaaaaagacaagatcacaagctcctattattcataggttcattaagacaagacaaactagaaatttaaagattatgtgtaaaacttatgctatagagaaaatattttattcattcatcagttgaattctttatgtagtcttgtagaagtaagacatgttctcacgtttcctgacgacttagtaagattttttggttgaaattgtttcaaggaatatttctcagatggcttatcaacaatgtctgtcttaattttctttgaacaaaagtgaatatggagagtctcaagaagcttttgttggttgcattaatagcaacttctgccattcaccttgttcaagctcaaaatcaagacggtaccaacatttcaatgtttcaatagaatttgtttccttttacaaatttttatcacctttagcactaggggtaatatattatggaacggatattcaattttggtttttgtaattcgttcggttatgccacaatcggtcctctgatcggtattctgctatgcaactaagcatacaactgttaaagtatttcccacccgttcgtacaaaacgttataaataatttcaaacactagaaaaagttacaaaaattcaaccaaaaattgcaatacacttatcattttttcttaaattttaaaactctttgatgaatacaactaagataactatacaattatgtttttttcaatacctttttgtgtgcatgctagattactaatataagttaaaaaaggtcttagttcacaaactaatcctttatttatataatgggatagtttgatgaggaatttttatctagttttggtaatacgattttaatatcttaacaggatttatcagtgtagactgcggattatctcctaatgaggtctctccttatattgagccgtttactggactacagttcacaacggattcaaatttcattgaaaccggaaaacttggtagaattcaggcaagcctagagccgaagtaccgaaagtcgcaaacgacgttgagatattttcctgatggaatacgcaactgttacaatcttacagtgacacaaggaaccaactatttaatcagagctagagcaatatatgggaattatgatggtcttaacatttatcctaaatttgacttgtacataggccctaatttttgggtaacaatagacttaggaaagtatgtaaatggtacatgggaggagatcatctacataccaaaatctaatatgttggacgtgtgtcttgtcaagacagggccgtccacaccattgatatcatccttggtgttaaggcctcttgcaaatgctacttacatcactcaatctggttggttgaagacttatgttcgggtttatctaagcgactcaaatgacgtcatacggtaagtcatcttaaagaaacgcggttttcggactaggacattgctcttagcatatatattttgtaaatgttttaactattgaaaagagcggttacaagctctaagaatattttatggctactaattcaaaattgtacaaaatgtagatatccggatgatgtctatgatcgtatatggggttcatactttgagccggagtggaagaagatttccactacacttggagtgaacagttctagtggatttctgcctccactaaaggcactcatgactgccgcctctcctgccaatgctagtgcaccattggctattcccggagtactagatttcccaagtgataaactatacttgttcctccacttctctgagattcaagtcttaaaggccaacgaaactagagagttcgaaattttttggaataaaaagcttgtttacaatgcttatagtcctgtatatctacagaccaagactatacgcaacccatctccagttacttgtgaaagaggagaatgcatactagagatgatcaaaactgagaggtcaactctcccgcctttgcttaacgccgttgaagttttcacagtggttgaatttcctcagccggaaacagatgctagtgatggtacgttagcaataatcttacaacgtttgaaaatatgttttaccataactaatcttaaatgctaaatctaacatattttcaaacattgtcgaattttatgatagtggtggctataaaaaacatcaaggccatctatggattgactcgagtcacatggcaaggagatccatgtgttcctcaacaatttttgtggaacggtttaaattgcaacagcatggagacgtctacacctccaagaatcacttccttgtgagaaaaccttttcatataataagaaacgtttaagaaaaccttttcatataataagaaacgttttctaactgcattattactttttttgtgctatgatgtttatatagggacttgtcttcaagcgggttaaccggaagcatatcagttgttattcaaaatcttacccatctagaaaagttgtaagtatggtgtttattagtcttaggggaaaaaaaaagtgatatatatacttcatgaaggtaactaattatttcagtgactttgttttcttccaaactatatagggatttgtcaaataacaacttgactggggaagttcccgattttctagcaaacatgaaatttcttgtgttcatgtaagttcctttacatataaatatattttgtttagtgatattcttcttgatcatggtcacctatgtatgaatattcctctggtttaacagaaacttaagcaagaacaatctgaatggttcgattcctaaagctcttcgcgatagagaaaataaaggacttaagttaatgtaagatgtaacttatgctgaaaatatttcattaaacattcatggccgtctacatatccataatatctatttgcttttgtagtgtcgacaaaaatgtggacaactgctcatctggttcatgcacccaaaaaaagaaattcccattgcttattgttgcattaactgtttcgttgatcctagtcagtacagtggtattggttctcatttgtatgttgaagaaaaaaaacacatcaaatgtgaaaggtattgtccaagtcatcatgtgaaagtacacaaaattcattcatgtactaactgcgctctctacagatttaccctcacaatcaattccgccagaagcaaatcatacattggatggtgtatcggaaacaatgatcgaaacgaaaaggaaaagatttagttattcggaggttatagacatgacaaataacttccaaagagctctaggagaaggagggtttggtgtcgtttatcatggttatttgaatggttcagagcaagtagctgtcaaattactttcgcaatcatcagtacaaggctataaagaattcaaggcagaggtatgaatattttcttagaaaatctcaagcattatgttagaccaatgtgcttcattcattgtttttttcattttgatagttaaacacttggctctaaaaaagataattaaacacttcattcattgttgttttgtaggttgaacttcttctaagggttcaccatataaatttggtaagccttgttgggtattgcgatgatcgcaatcacttggctctcgtctacgaatacatgtccaatggagacttaaaacatcatttgtcaggtaaaaacatatgtacattaacattttaatttacttttaaaagacattttaattattacaaacaattcttttgacgattgattttgaggataaattacaggaagaaacaatggttttgttttgagttggagtactcgactacaaatagctgtcgatgctgcactaggtttgtgttaactcataatgattttattaatttatttttcacattctaaacatttcctaggatcactagacatacgtacataaaaggacatttgcaaaatattaataggattggaatacttacatattggatgccgaccatcgatggtgcatagagatgtcaaaagtacgaatatactgttgggtgagcagttcacagccaagatggctgattttgggctttcaaggtctttccaaattggtgatgaaaatcatatttctacggttgttgctggtactcctggatatcttgatcccgagtaagtatcctcagtctactaatagatgtgatcaacatgtttgttccataactaaaattttcacatagaagtctagatttactaatcctgttagtgaactatataacacgaaacaaagagatgattttttttttcaaaaatgctgaggtttgtgtggacggatatttttcgcgtttaagaatgcatatgagtgaatcttttactattttcttaccttaacagatactacagaacaagtcggttggctgagaagagcgatatctacagttttgggattgtgttattggaaatgatcacaagccaacatgcgattgatcgaacccgcgtgaaacatcacataacagactgggtggtgtctttgattagcagaggagatatcacacggatcattgatcccaatcttcagggcaattataattctcgctctgtctggagagctcttgaattggctatgtcatgtgcaaaccctacatcagaaaaacgaccaaacatgtcacaagttgttatcgatctgaaagaatgtcttgctactgaaaattcaacgagaagtgagaaagacatgagttctcatagttctgatcttgatcgtagcatgaacttttacaccgacatggttcctagagctaggtagcatgtgcaaagaagactcagtcactttgatgtatctatgcttgtttttattgtttttgccaatatttcaaagccataggctttatactctgtaacagccaaaaagtttcattattttctaatgataataacagtttagcaaagaaaaaaatgtatctatgtttgtgtgcatggacttggtcttgttttagtttcgatttttttatttctaggaactttgcacgttgtggtaatctcgcgtacaactattgagtatcaaaacatattttcagagttctattctaccgatacaaaagattttgtttgagcaaaaaataacacttaacctcgggttcaagcttgttaatgttttaattcatgtcaccgagttttgctttgttcattttgcgactacgaccaatagtcaatggatccaacgactaatcgagcaaaactttcattcattaaattttttcagcgattaatcattttttttactatggggtccgattggtgatcactttttaaaaaaggaatggacaagaacaacatgtttcttattgttcctcttttttttcaccattcagcggtaattttttttccaaattgtaacatgtggaccccacattattcctattcatttcttattttttgaggaatcgtagaagaaaattgttccttcccaaatttgatgagaaacaaacaggaaaacaaattaaatatttataaattaaaaattaaatttatgaaaaactaaaagaaagaaaaaacgtttcttctatttttcctctacactcattcctcttcattcctattttatcattttttttttcttttttgttcttttttagtcatgttcctcttcattccttgtatttctttataggtcaccaatcggatcctatatttttagggatagtgaaaaagagtggtaaacgtaaaactttgagctttttgattgatcaagtttatatatatactatcgtcttaaaaagcccattatgggctaaatttaggccgggctacaagcccagaaaagaaacgagtctttcatacaaaactggttcagatttggtcactctctgacgcgagaactagtctcaccagacaacaacaacaacaaaacttaagggaaagataatcgtttgtctgtgcagagagagagagagagaaaatgaggttgttcgatccatggccagtgttcttcaagagagaatggaaacgttgctggccattcctcaccggtttcgccgtcaccggcgttctcatcaccaagctaaccgccggactcactggtaaactcttcgtcggatctcaccgattttaaacatctaacttctcccatttcagctgtatttatttgattcagatcggatgtttatttctgtaatcatttctcaattttgattttgattttggaaaaccctaatttccgtaaaatggtgattgatttgcagaggaagatgctaagaactccaagttcgtccagcaacacagaaggtatcaccaatcttgaaaattctcacgttgaaattgaaatttcttggttttggcatatgatttagattttagagcattttggaatcaatggatgattttaaattgaaattcttggtttggtatatgatttgatcatagagcattttgtagaatcgatgtagttaaatagctcttgaggttttagggttgttaccaatggatgattattcgtgtcttaaggtggtattatgtcataaatcccaaatcaaattcgaaattattcgtgagtcctcactttttgattgattcatagtgagaaattcaagtcttaccgctaaaataggttcattgccaagtagatgaatctccattagatgttcttttgttgttcttgcgctgttgtgtgatatcaaggaataatagtgttgattgctacattggtattgactatgtttaaactcttagccaaactctaaaggtttcaacttgtttgttatttcaggtgattcactgaagcaaaatgtagaagctgacaaggcatatagatttgggactatagtgaatgcttcagctttgaaacatgttcaataacaaagaagatcattctatatactcttttattttctctgagtttcgaaatcagcttttccttttctgaaacttagcaatggaatggtttttgttcacagtatcttattcccatttgtttggaaatggattttatggcctttttgaatcatgcgaacgcacatttcaataaggatttggttccccaatgaatattaacgtttgttctaataatcctttggttcttaatctcaactaaccattgtctttcgaaatgctaatctctttgtgctatagagtttgtcttttgtatttagtttctttggttgtacatagtttcttgtcaacgactttgtatccgctattcattctataaaaacaagccacaagattagagaatagacatgtttggattttgagctattagtgtttaacgtctatagttgaatgacttcgccattgtttacctcactcaagatttgaaaaaatggagtcaccgtagctgcgtaagctatggcaagaaagtaaattttatcttccttaaatataaaaagcattcgttcataatctttatttttctctaggaataatttcgactgtggaaagtagaaacatattatatgaaaccaaccgcttgcaccatggaatatgaaaagtagaacttggttatgtagtgcattcacgtttgcgtgtgatcggtgatggagttttagttcttgtggactccgagccttagcctgaagtcttcttccataagtggaaggccttcacgaagcttcacctttggttcccatcccaacacttctttagcctttgtgatgtctggcttcctctgtcttggatcatccggtgtgttctcaaccatctttatctctatgctcgggttaatcagctgcaagtaaaccaacatttcattagcggacccaagaatttctaagtacttactcatatcatatcgagaaaccagactctcacctctttcactgtctcagccaactccaccattgtaaactcacctgagaaaccaaagagtcggacacaaagcataagttcaagagattggttgggttgtgttttgtctaatggaggaatattacggactttacctgggttaccgatgttgatgggaccagtgtcatctccttccatgaggcgcataagtccatcaaccatgtcagatacataacagaaactgcgagtctgtgtccctggtttctgaacagtcaatgcctcacccctaagtattcatgacaagaacaataacaagagatgagtaatttatagctcggaaaataaaatttgttcgttggattgagcaaagaggctcaccggagtgcttgtgcaatgaagttgcttacaacacggccatcatcgatgttcatgcgtggaccataagtgttgaagattctagcaatgcggatttctacaaagaagaaacaaaaacaatttaaggaataaaggacaatgagaatatgttgatgcaaattacagggagaaagttgaagcgagagcctgagaaaatgcaacttaccaattccatgttgcctgtggtagtcaaacatcaaggtctcagcaacacgcttgccttcatcataacagctcctaacacctatcataatagaaaccaagttataagaatgtgaattgacacgcagataagttgagaattaaaagctgataagtgtttactcctaccaattgggttgacatttccccaatagctctcaggctggggatgaatgagaggatctccatatacctccgaggttgaggtaagcaaaatcctgtccggtagaagagtaagttagtcacaaaggcgaagatcaacagaagtaagtaataaaaagagggtatcattttgcaaaccttgctccaacacgcttggcgagacctagcatgttcagtgtgccaatcacattggtcttgattgtcttcacagggttgtacttgtagaagataggagaagcaggacatgcaagatggtaaatctgatcaacctcgatcaaaagtggctccgtgacatctgttaaacccaaaaccaaaatataaatggatagaacaaaagacaggaatattccattctcaatagcagcaacaagccagagaatttcaaaaccataccgtgacggataagctcaaatcttggatgaccaatccacttcttaaggttgtcctttgaaccagtgaaatagttatcagcaacaatcacctggtaaaaaaaaatataaacatcagtacttaatcaaatcgcgcataaactactattgtatcggataggaatttcaatgcaaacctcattcttttcgttttccatcagcttatcaacaaggtgagaaccaatgaatccagctcctcctgagatcaaaatcctcatatttgactgcaaaatgaaaaaaaaaaaagcactcactttaaacatcttattaagaacatagtacaactttactatacaaactaaatcatagacaaccagatgcagaacatactagatcagaacatactacaaccacattcacagtgcacaatgtagcaaacgaataagcctagactactaacagactctacagttttcgcacaataatacgacagctcaaatctaagtagaatgaatgtccatgattcaatctcaatgatcattgagaccaatgaaaagatccatatacctagaatatgttttgattctatatcaacaagatcaggtaaatgcagaattccaaatacaaagatcaaatgatcaattcaaaaaactaaatagtatcacaccacaccaccatgatccgacctaaaaacaaggatcagaacacgagattcacactccaaccatataaagtattaacctacgcatgatctcgtgagagaactaaagtgattctctctgtaacggcagactccaaatgagcaaaacgagattcaacgcatgaaatcaacagaaactaatgggtatcgccaaaatcgaataaaaatcataactttacctgacaaaacttggaattacggagaggagacggtgaaggaggaggctttgggcttgtttgtttatcactagacgccattgatgaagaagaagatcacaaaccctgaatttttttgagaaaaaaaaaatcgaatcaaacaacagagaaaaagaagattccgattaaagaaagggttcgagaggagtatttacgagatcgatgagagaaccctaaaaacgaaaactttgtgatctgaagagagcgagaggaggagatcgtatacttttatagtctctcacaagtgtcgggaacttcttcttcctctctgtaaaattttgaatatattatctggaaaagttagatatttttatttttttgttgagaaattctttttttagacttttttttgtgtgtttgtttaatttgttttgggtgagataagattagtgacttaaaaaacacgaaaagtggaaaaatcaatatcaaatgttaatttgtggttactcgattacaacgacaacgtttgaccaaacgtattatctgatgtggcattttctttactcgtcaagaaactaaaattccacaattttagggaattttagttgtttattattaggcgaatttctagctaatttttttttttctttttgttaaagatttctagctaaaattttcaatatactcccatgttttatgaaaattaatttgtttgaattctcatatacattttcctatttgggatgaaaaatccgattattattattgagcatagtttaattattgttagttattgtagtttaagttcagattttttaaaaatgtttgtttatacaatgatacatcaaatagttttgttattattggtttgtttgtttgcttgctagatcgtagaactaataaaaagcttgttctctggttgacttcagttttgtacattacgagtataataatatatttttttattatatcatcagaagaaattaaaaattagtaaacgtcctatacatgtttgacaactataaactatttctttgatcagtgatgattttgtatcagttcttcgattaattttcttaaaatagaaaacgtaaaccttttaaatcagggtgaagaatgaataatcatttcttttcttttgagaaaagacaaaaacttgtacaaaaaatcatcgattaaactaagtttatgacactcacctatgattataacttgcagcaacgaaaagtaggggtgcggacatttcggtttaggttcgggttatttcgattttaataaatctataaaacttagtttggttctgtttggtttagtttggtttggactgaaaaagaatcatgaaatgatccatgactttggtctttgtgttctcagctttttaacaaaatatgattagcatgatccatcaaggattttagctacacatttctcaatttctaatcacattaaataaatctgatttttacaaaacattaccaacaatggcaacaattgtacacagagttttactgcagagggtgaccaaagtctcatcacgatttaactggaccataattactttctcccaacgtacaaatgtactcaaccgcaacaaccattaaccctaaaccaagacccaaaactacgttgagtccgcgtttgcaatgaccacgctggatgagagatggggtttattcactaatgactatgtatatatcaacgcctatcacacttactattactatgtatacagaagacatacgcatgtgcctgaaattaattatggatggttcttaccttatggaagcttaaaagggtctgctctcaggatcagcaaatccagctagtagtgcaccgaagagccatatcatgagtaagaacacgactgctgttcgcagaacttggctgcatatgttcaggctcggctcgtcttcataggataaatcaggtgtctgggcattgtaactccagtggctgtcgtctagcttctctgtttcactcgagcttcttctctttcttcttgggtgtgtttgtggctgtggtggatcttgttcgttgagatttgagcatcttttgcagttgcagttgctaccaaggtatgaaggaagtgtctggaggtattcagagaggactcgatggaaagtttccccttcaattctcagcttcttgcgtgtggttggtctaagaatctatgagagaagaacataagtttaggcaagggatatgcaacgatcatagatccgagaacaaagactaagaaaaccgaaaaattgaagttagcttaggtagattttttacttggatgaaagtctgggaaatgacacggacaacaggagggaggcgaatgatgaataggcagccaagacggttagggaagtgatcttgaagaatggaagaacaagatctcatcatctgcatgggaatcctcagaggagataatccttcacaatcgactaacactgtaagttctgaattctcaggggtcagaagatgcaaaacgccgtgctctacctgagatactgaaacaataacaatagtggaaaattaaaatgataccgtagcaaataaaatactggaaaatgtagtaaagccactaaggagtaaggacgtactgattgcctgagcgaaacgaggtctctcatgagatggcaactttagaaaagctagccccaaacgaacaatgaggcaaggtcgttggttcttatcatatccatgccaaaagagtaaacttgaccatgtctcaagttcttcttcagaaagaattctgtaagtctccctccaatgaattgtcttttttatcgaagatagtaaggatgtgaagtctccatttgacaccctgtagaatctatgaagctcgtcttcattgagtctacattaaaatgagactaaacgattatgatctaacgcagaatttaacactgaaactcaaaaaagggagaacttattcataaatcacaatctgaaagtacctctctggtaagctaagtctctgcttttccagttcttcatagagttttctaagccagtcttgtgaaattacaggaagtggagcctcatcttcaattctacatttacaaaaacataaagatatttagatactactcaaaaaacaaaatggagcattaatagtttcaagggatttgcaaaacttcaagtgcttcagattaaagctgtacagtctcagactattataatacaacataacaggtaagacttatacatcacataacaccttatatctgatggagactgtaaagtctgcgagtcagattgtgattctgattctgaagatgcatgagaattggtaccacctgaggcttcttgctttaactctgactggtctgtcagagcctcagctatcgtgatgaccaacaatggccgagacaacatctgcataacgatcacacacaataactgagactcgccaaagatcaatatactgtatcattctttcatcaatgccatagggagaaagtatcaaacctgcattgcattgatcaactccttgaaaggagcccatctttgaatccacttaagaggaggataacaaagacattgcaacgcctgaagactattccacaaatgaggacatttagcctttgaaacccttcgaacaacttctaaaacagcgattttaagcagaaacacagctgcattacgagcggttccacttccaaatctaccattactcccaaaagaaacatgcttagagattgtctgctgaacagctcttggaatagcagctactaagcttcttttaggtaacaactctttcccagaagaaacagttgccatcatagagtttctacttctaccagaattatcccccattaaaaatcgattccacacacttaaaataagcaaatacgccacgaaactcgaaacgagatcacaccaatttcatgtcgaaacaatatcaaaatctgcaaacaaaatttgcatatataagagaacggataaacggaatcagagaattcttataaagctatgaacaaaacgaaccaggatcgaaatcaacggaggacagatcggaatcgttgtagtgatcggagaatcaaatttcacggcggcgaaagcgagcgagatttcgtcttctctccgaagttcataaagcgaaacagaaaaaaaggaaacaagaacaacacggtgttggacacgtgtactctcccaactgttttgatagcgattgataggtaaatcaacggtccaggagcgacaacgtcacgggccttttaaatacgtggacccaagaaacaaacatcatgctgtttgtttaaatatttttactagaagccgaaaactgtacgaagtttctgaggagaacgtaggaacggcgtggagttttagcgtccaaatcaaggaagtaaacacactgaaaaacaaagcttcgacagacaaaaacaaagcttctatgaagaatagtataacttttaatgtcagtttttttcaagaacaacatttttttcgaccaaacacttcatttcacgttgaggaacgcgattaaaagatgcaagacgggtttattacaagtagtgtttggacagtttttcaaagggaatttttttcgataagataaatgagcttttgaactccatagaagatggtgttggagtgtgaaagtgtttctttgatcaaaacatttcttgagactttctgacacaacggctcactttcttcttgaactcatctctcttctctctccattctttctgcaagaggaaaccccacaaggagaatggttaacgagcaagctctggtacataaactatatgtaaatccaatgagacagtgttaatctgatgagttcatagctaatcaatagaaaacactcacagcagcctcaacgtttgctggagattcgtcgttgggaccagagagcattgatataatactcaacatgatactctcaacctgaaatcagcaatgttatttccactcatcaaatctaattgacatcattcttggttataagaagaagcttctcagatatcatacaaggagaatgttggatcattgtaaaacgtactgtgtgaacaggcgtccaacgctcacttgcaagctcatatccacttggatcatcaccaggaggatgtagaatagatatacaaacgcggccatcgggataaactgcagaccacaagacgaacattttcacaaaaccttagctactcaaacaagatcaatgagctaatgagcgcataaccgagagaaagaactaaccgttaggatgccaaatatctgaagtaaaccgcaccgtaggtgggctattaggatagttttgtgggaatgacataatggcatagaaaaatcctccttcactgcatttacaaagttccataacttatgcttaatccttttgttaatgtgacaagactaagtaaatctccatataaacaaagcaattcatttcaattccacaagaacactactccaatctaatccagcattaaccaattcgcttcaaaaccgacaaatcgatccattctaagctcaaatccacatgaatcatcaaatccggaacatagattatagcgaaatctcaatggaagctgatgaaatctcatggatcaaaaggaacgtactagagagtatcaggaggtccaataatagttacgctccattcgaatatattcttctcatcaactaaaccagcagagaatccatctacaggatgcttacaaagatctgaaaccaaaaaatcaaatcggattcaataagagagaattcaacaccaaattcgtagaagaaacagattcgttgagattcgcgagtgtttgtgtgtacctttaagctgtttctgaagaagaagacaagcttgtgagttcatggcggattgtgagaaatcgagctagagcttccagtgatctgagagaagaggaagatgaagaggaagaagatagagatgggaattgaatagagagctttatatcgagaaggttcaaaaaagatggaaactggggattttttttttttttttggtaagcatcgatgtttcattgttcatcaagggaacacatgggagtggagggatctgctacggacgtgtcttctttacttttttcgcttccagccaatagaattgcgaaatattatttttgttcaaagtggccgactaatattaaagatagaacacatcattaacaaaaagagttaattttgcattcacacaaaatatggatcgttttagtgagtgtagtagtgtcggtttaatgcgatggaatttaatccgacctccaaatttttgagttctttaatttgtttttttttttgttttcaatctttaatttagtttagtgttggtttagattgtttgttaccgggttagatggttaacgaataaaaatactgatttcgtgattcggtgtgttttgatatttcgaagtttcgcgtgttaaatagagttgaaattttgtttttgtggagaaacaaatcgagctacaactcaactttgtgtacaagtgatgatatgtgacagtttttatagggaaaataaatattgagtccgttaaatatttagaataaaaataaatattttattaaaatttgctcaatttatactatataaaagttgaaactatttgtttttaaagccatccacataggatttagaacaccaatcgggagctgcaacatcaataattaacatatttagcatctaattaattatcattttttaagacaaccaatcggaagctgccacgtcaataattaacatatttagcatctaattaattaatatttttaaaaatagtaattactttctgttttaaaatttaaaacaaaaaaagaaagcaacaaatattaaatttaaacttataaaaagaagttatataattataattatgtaatattaaacccaaaccttataggattttatacaactaaatccaattttttaaaatataacttaaagaaacttaacaaggacgtggtttgatggtggtatttttaatcgtatcaatttgaatcaagttctcgaagatataaattgaggtctttcagtctcgaaagcgtgaaggtgaagaagatctaaactgcatcaaaagagagaagtgatagagttaagtaccaatttagtagctaaaatatttttttagaataacagaaaacaaaacagagtacatcttgacgagattgaaaaatgtttatactaacaagaaaagaaagagattttcgaagaagaaatatggagcatgtgaaaagtttagaaggtatggcacatattgtttagacaaaatcataagaggatggaaagagacactgtaagaaaaaataaaacaaataaaataagttcttgcaaaaagatagggagagtgatagctctctgtaaaaaaaattatgaagacagaaattcatatacatattgaaaagaatgtgagaaaaatatgaaatgttaaaagaaaatgtagataagcttatgaatatacgatctacataatatcttatttttagaagagctatactaactaatgcagcgaagataaacgaaaaacaataataaatttgcgggtaccaaaatgagaatcatcgaatctatttcccgtacaacaatttatttcatatgtacgtaaaaaagacgttgttatcctaaatatctaaagctaaggagagagtcatgaaccaaaaaaatcttcttttgctaaatgttgtaaaatctaagagttgtataaaagttatttttaattatgtatttaaattgtaaatatttgtcacggtaattttaaaattcaaagagtttataatattaaaagcgagttgacatataaaatcatatctttcaaaatttttaataaaaaaaatttagtcacacaaaaaattattaaacgttttacaaaaagatccacgcgtagtgtgggttcataatctagtctatactatataaaagttgaggatatttgcttctaaaagcgtccacgtaagatttaaaacgactaatcgggagttgccacatcaataagtaacatatttagcatctaattaattaacatttttgaaaataataattactttttttttaaaataacaaatattaaatttgaacttataaaaaaagaaactaagttattataatttttaatattacctttataggattttacaataacattaaaggagagaagtgatagagttaagaactaatttagaagctaaaactttttattaaaataatagaaaacaaaacagagcaaaacaaagattttattcttaaaagttcaaacaaagagtttattgaattaactaagctatctttggacgagcttgaaaaaaagctttcactaacatggaaagtaagagattttcaaaaaaaatatagagcatgtgaaaagtatggaagatagtacatgcattgcttagataaaattataagaggatggaaagaggcaccataggaaagattttttcacatgaaggtgaagtgatgagtgattaagatgtgtttggtctatgaagcgcaaaactttcagagatatgagagagtaagacactgtatgaaaacgctgcgaagagaaacacatgatacaagaaaacattcgacaaagatcagcaaaaaaaaaatcttaaatcataaatagatttagattaataagaaattctcaaccgcagtgatgttaaatgatttcttgttatgaaagtcccatttccatatcaattaaaaccattatcagattacaataaaataaactatacttagttttcattacgattaatactatatttttctctcttagaagactaaccaactgtcttccagttagatgataggcttttattgactttccccttcattcgacattctttgacttgaaggtattttctcttctgcaacacagttttttccacatcaacctgatcccccaaatacatgtaaagatacccaaaatcgttttcttgtagagggaaaaagaagtggagaatccttccattatttaccaaaaatttcattcactacttggcgtttgacagttggcagtaatgtgttcttgaaacctttgatgcagaaaattttatacctaccaaccaaaaaaggtaatttgcacaaatcaattaatttgtttctaaatcaaatactaaataaccaaagaaatgctaaacaacttacatcggatatgtagacctggtaagactaatagttcgtcccaccaatttcacttcattaaagttttgcaacgctgccattgcttcttcgtgagatggaaactcaactctaaattctcgtttcttgtttaaaaccacttggcagttgcaaccttgaaagaactctagactgttacaattccaatattaaatcataagagaaccgtcaaaaaatctaaacaaaagattaatatagagacaaagaaatcaacttacatctctagttcggagattttcctatggacattagagagcatgagaatattactttctaagaattcttcaaactcttcatccgaactggaggcgtatttggcatcccaagtaacaggaaataatccgctgggcattctttgtttctctatccaagcaatatcctacaagtgaatactaattattaagttgttggaaacaagttagtttaagaagcataatatataaatgacgtcattacaagaaatatctacattattaccaagagagaagagctattatatgttcttaggtgatcacccgcgctacgccgcagttttttcagattttttttatattgtttaatttaaatattttttatatatctaattattcactcatgcaataagaaaatatttttagtattaaaatatttttttctaacaacattctcaatatttcatcatatacataattcataaacaacgttcatcttaaaccaatttaaccgagggtagtgttcaattctagaatcctaagaatttgatgatggagctccgtacgtattttgcaccttcggtgatttattatataaatattaatttaagagaataacttacttaaatcattaactaatccacgattattatatactcatactttgagtttggattaccaaaaaaatctttgataataaaaaaactattaaaatagttttattgaaaaatcatgtaatattaaaataaatttagtattagtatattaaatatttaaaataaaataatatataaaataaaataatatataaaattaaataataaatgttcactaatctataattattagtacattacattaattatttaatagacacatgacaaatactaaagtgatgatgtagcaatcatatggttagagttgaccaactttcatatatatgattaataaagctgtattatgcccctgttaagaccaatcaaattgtcatacaacgaaaattcaaaaagtagactctagctatattttgaacttagtgagtagaaaccaaaacgttttcatcatattgtatgatgagctaattaccatcataacttcctaataaatacaattccgtttcatttccatttaatcagatttctaccaactaaattttgtaatcgtttttgtaatcgttttatttcaaacacccttaacaattcccttaatgtttccaattaatttttgccgttacacacccttccttcatatcaaattcaaacaatcatcttcttcccatttctttaaaaaaccttaagatcttcttccaattgaattatttggtctccatttttattataaaacctataaagatgtttccaacctcactcgtctatttgtttattaaagtttaaattaccatccaatagccccagtttctccaataacaaatgacgatcaccactcatatccatcctcgaagcattaaatttcaaaatcaacactcaaaccattgttgttcgtccaatccaaacgttggaagtttgtgatttcaaacgttataatattttgcttagcatcgacagtcttcttatggatgaaaagatatagtaaactaattcctaacacaattcatattcccttccgttccacactttaatttactattttcataatattcatgtatgtagccatgtaggataatgcatttgtaaacaaaaaaaaattatgtactacaacagtgaagttaaaaaaaaaacaattaaagaaataaaatcaatatcatgcaaaaatttctaaaatataccaaaacaaacttgcccaacaggcaggctttttttctagtctacaataaacgagagttgcgatacaataatagttgtcgattaaaagaaacaaagatatcggaatcaaagtcaactaaattaatcagagtaatagaaaaaacttttttttttgttgcaagacatcaatcaaagtattataaaaagactccatcgacgaaagatctatctaatagaaaacaactcaacaacttgttcaagcctaaaacaattataaaaaaaaagttatataaaaaaaaaaacactcaagatttagaatctaagcatatttattaatgaacgtagacgtccaaaaaaatgaactgtactggattacaatgatcagtatttctctgtagttctaacaatcccaatttttttaaaaaaaaaaaagaaaaaaaaatcctcaactatttatttgatatatttttccaaaaatgtggttattatggaaagtgaaattttaaatgtggagggtgacaagcatctttgcttagtatataaaaaaagcctttctcctttcttatcctccaagatttaacaaagagaacgagagatatggagaacaaaactcaagaggaagcttcgaccatcaaagtttcatcccttacttgcatagatcttgccaacccgaactttcaacaatcagcggtttctcttaaacaggtatgtttttattttttctttattatagctaagtatgtcaaaaacattttattttcagatatgtatggaaaaaaaagttgactcgttgtgtgtgggttattcttgttccaggcatgtctagattgtggatttttctatgtcacaaatcatggtataagtgaggagttgaaggacgaggcttttgagcagagcaagaagttctttgctcttcctttggaggagaaaatgaaagtcttgagaaatgaaaagcatcgaggctattcacccgtccttgatcaaattttagatcctgagaatcaagtcgacggtttgtttgaccatcttttcgcttgcttgatcaaaactttgttgttgatgatctcaatcttgttgtaacctcatgggtttcaggtgattacaaagaaagttttttcattggaatcgaaggtgtcaaatacaccattctatagccccaacctatggcctgaccatggttagttttttttcttccatagttagctcttttatttgtcaacctcatgttttctaccttatataaactttgatgtttctggcagttgttttgccgggatggcgggcgaccatggagaaatatcatcaagaagcattgtaagtatttgtttattatcatgaagtagctagtttatttcttcagactttgaggcaagattaaattcttcagtttactaaggccatactaaaaccatttaataattaatggattagtatgtggattcagttatggatttgctattttttaatggcatttatggatttttcaaattttttgaatagtttgtggattttgtcactttttaggctatagaaatataatttaacatgcgttttattcattatatttgggtttagtcggttgtacttgttttgaagatttaaagtttttgatataaagtacgtatttttgccaaaaaatcttaaatccgtaatttttaataaaagtgataatttcaaaagattttgatgaaaagggcaaaatcaacaataatccttgtgtttttttgacaatataagaccttacattttttcttttgatgtggataggcccctaacagggaagttttctaaacgttatactaatgatgagcttttcacatggtcaggagggtttgcaaggctattgctagattattagcattggcgctcgacttggacacaaattactttgataaaccggaaatgctgggaaatcctatcgcagttatgcgtttgcttcgttacgaaggtgatatattttcttaagcttcgtagccctacttatcctaaacaattttctttcttccttttgttaccttttagggatgtctgatcccttgaaaggaatatttggatgtggagctcattctgattacggaatgctgactctcttagcaaccgatagtgtaaccgggctccaggttttcacatttttgctagtcatataactttagatgtgaccaggtttggttatgagaaattgctatacgatggcagatatgcaaggataaggacgtgaagcctaggaagtgggaatatgtaccatctattaaagggtataacgagaatttaaggtcttaggatccatgatccaattttaaacactacactaactcccatgataaaaaatttgtttataaatttcctctttaagagcatatatcgtcaatcttggagacttgttggagcgttggagcaacggcatttttaagtaatttcgatttctgtgagcttactctccctaatgtctcttttcaccctctacattgtcattttcccaaataaagttttctagctgacatttttctcacatatacacatagatccacattgcatcgggtacttgggaatggtcaagaccgatattccgtaagtctcttaataatacacatccgagtctatccttacaatttcttacaagacgatgtgctctatatagttgttataatttgtcaacaatctagcttattgttgatcatgtctacaaatcacaaatgagttataatttctcaacaatctaggttataacactcaaaatgttttttttatttgttcttgtcacagattccattcttcatagaaccgagtcacgactgtctagtagaatgtctacctacctgccagtccgaaaacaaccttcccaagtaaggctttaattctttaccttgttacattgagaccttggacatgtaacaatgtctcctaaagacattaacgattgtgtttaatgaatagatatccagctatcaaatgttcaacgttcctcacccaacgttaccagcaatcacatgtgaatttgagcatctacaaacagccctaagtgaagttcatggaaaaacttaacccaagtgaaagtctttggttttgtagttttgtttttaatatactttggctttttagttgggttcgtagtcaaaaactcttgtgttaaaggcttgttcaccaaggtttgatatacaagaggacctattggattaataaagagaatgtaagaagagattcgaaattttgaacaaagagccaaaattagtttcaggccaaacacttggttcatatcctgaagcgagccgtttcagcaccaaagcgcctgctgattttgttgaccaaagaaaatgctaggaacctttggctccacgagctgaattttgtgccccactccacaggaaggcagtgcacaacttttcaagtgcttccaaacacccctttgggagaggaaaagttgttgtgcagaagttaataatatgctaaagaggacagattgtatcaattgaaaccttccattttttttttcaactgttaagataaattgtttatttcatgcaacttatgctcatagcaaactttataactttatatcatatcgaaggactactttcatatatgtatttagattagactcactacaagaaaacagttaaatacccactacacccggcaactacatacataatcgctatatttggtgactatttggctacaattatacgagtagaggcgagacgccttggtagtcgctaaagggcgactattatatgacacttcttaatgagtcgccaaatgtagtcgtaaattagtcgctattttgcgattaatatacgacacgttgtaatagtcgttaaatagcgactattatatgacaactgcggcgtgtcattaaatatagtcgcaaaatagacgtaatttgccgactaatatacgacagctcgtaatagtcgtctaaatagcgactattggatgactacagcggcgtgtcattaaatatagtcgcaaaatagacgtaattttcgattaaaaaaacatgtaattcgttttgtaagttgttgtacctactttaaacgactacactatttagtcgtgttttagtcactcaaaaattgcctatataatgaaaatttctcgtacacaatattcattcacaacacaaacacaatactaatattacctttaaaaaaaataaacatttttgaagaaaaaaaacgtttaaaaatatatttagttttattattagtcttataatggcgggaaactataattatccgagtagcggtggttttaatcgagattggatgtacaagaggttcgatgaaatgacgggaatttgtcagcagaatacgtcgcaggagtggaggagttcttgacatttgctaatagccagcctatagtacaaagttgtcgaggtaaattccattgtccttgtgctgtgtgcaagaataaaaaacatatcgtctagggtagaaaagttagtaatcatttgtttagtcaaggatttatgccagattattatgtttggtatatgcatggggaagatttcaacatgaatgtaggaacgagtaattatgtaattgatagtacgtatctaagagagaattatgaaagtgcgggtaatgttgtagaagatccatatgtggatgtgggtaatgttgtagaagatccatatgtggatatggtgaacgatgcatttcgttataacgtggggtttgatgataactatcatcaagacggtactaatcagaatgtggaggaaccagtacgtaaccattctaaaaaattctacgacttgttagaaggtgctcaaaatccattgtacgatggttgtcgacaaggccagtctcaattatcgttagcagctcgagtcatgcagaacaaggcggatcataatatgagtgaaagatgtgtggattcggtatgtcaaatgttgacagattttttaccagaaggaaaccaagctactgattcgcattacaagccagaaaaattgatgcgcaatttaggccttccttattatacaattgatgtttgtattaacaattgtatgattttctggaaagaagacgaaaaggaagataaatgttggttttgtagtgctcaaagatggaagcctatggatgactaccgtcgaagaaccaaagtgccatataatcgtatgtggtatctacctattggtgaccgattgaagagaatgtatcagagccacaagacggcagctgcaatgcgttggcatgcagagcaccaatcaaaagaagaagaaatgaatcatccttcagatgtggcggagtggagatattttcaagagctacatcccacgtttgccgaagaaccccgtaacgtttatctcggattatgtaccgatggattcaatccatttggcatgtcgcgaaatcattctttgtggcctgtgatcctgactccatacaatttaccaccgggtatgtgcatgaatacagagtacttgtttcttacaattttgaattctgggccaaatcacccgcgaggtagtctcgatgtcttcctccaacctcttattgaggagctaaaagagttatggtctactggaatcgatgcatatgttgtgtctttgaatcaaaattttaatctaaaagcagtgttgctgtggacgataagcgactttccggcgtacagcatgttatcaggatggacaacccacggtaaactgccttgtccaatttgcatggaaagtactaactctttttatctacctaatggaaggaagacgtgctggtttgattgtcaccgaagatttctttctcatggtcatccattacggaagaacaaaaaagacttccgaaaaggaaaagacgcttctaccgagtatccacctgagtctttaaccggtgagcaaatttattacgagcggttgtctagtgtaaatccaccaagaaccaaggatgttggtggcaacggtcacgaaaagaagatgccaggctatgggaaggaacataactggcacaaggaaagcatattatgagagctttcatattggaagaatctgaatctccgacattgtatcgatgtgatgcatacagagaagaattttttggataacataatgaatactcttatgagcgtgaagggtaaatcaaaggacaacataatggcaagaatggatatagaacgattttgttctcggcctgacttacatattgatagtaagggaaaagctccatttccagcttatacattgacaaatgaagccaaaatgagtttattgcaatgtgttaaacatgcaatcaaattccctgatggttattcgtctgatttgagtagttgtgttgatatggagaatgggaagttatcaggtatgaagagtcatgattgccatgttttcatggagcggttacttccatttatctttgcagaactcctcgaccggaacgttcaccttgcattatcaggtaaaataagaatataatttactctttatatcatatatgcacttgagatgatgatttttttttccaggggttggcgcattttttagagacttatgttcgagaactttgcagaaaagtcgcgttcaaattcttaagcagaacattgttttgatcatatgcaacttagagaagatcttcccaccatcattttttgatgttatagagcacctgcctatacatctcccctacgaagcagaattgggcggtcctgtccaatataagtggatgtatccttttgagaggttttttaaaaagttgaaaggaaaagcaaaaaataaaagatatgcgaccggatcaattgttcagtcatatatcaatgacgagatttcttatttctcagagcactactttgccgataatatacaaacaaaatcaaggtaaccatgaattatcgatgtgatgcaagttttcaatgcgcaaaaataaccatgaattacctcttttggatcaggttaacaagattcaatgagggtgaagttcctgtatatcatgttcctggagtacctactatatttagttctgttggtcgtccaagtggagaaatacgtgaagtatggctataagaggaagactatcaatgcgcacatggatatgttatacggaattgtgattattttcaagtaattgagaggtatataacaaagtcatactcccattttaagttaattatataaatgtttgtttactaacccttatatgttgtttttgtctttatatagtatgttcgaagattttctttctattaaatatccaggattgaacgaaaaagaacttttcgtgaaaagaaacgaggaatatcatgtgtgggtgaaagattatgtatgtctaaatagtttataatatatatgatttgcatttatttattgttattcttatctctataatgatgtttatttctaaatttgcatacaggttacatattggaactctagtaatccttttccaacttgggttcaagagatagtcaatggacctttgcacaaagtcaaaacatggccagtgtattttacaagaggctatttgtttcatacgcagagtcatggagcaggacgtaagacttgtaactatggtgtatgtgtgaaaggtgaaaattatacggatgcatctgacgcagcagatttttacggcaacttaactgatatcatagaacttgagtatgagggggtggtcagtttgaaaatcacactttttaaatgttcgtggtatgaccctaagctcggaagaggtactcggaggagcaatagtggtgttgtcgacgttctttcatcgaggaaatataacaaatacgaaccctttattttaggtacgtatggtatatatatatggtcatttagtttttctagttcatatacaaatatctaattctccaaatatggtgcatttacaaacaacatctcaagcggaactagtgtgctttattccttatccatacacgaaaaaaccaaagcgggagttgctcaatgttttaaaagtaaatccaaggggaaacatattaggagaatatgaaaataaagacccgagtttattgcaaacagaaaatgatgatgctgttttaataacaacaatagaagatcttgtactcgacaatttgacaatcaatcgcaaccccataaacctcgatttagatgccggagatgctgatccagaagatgaatttcgatgtaatttatcgtcttctgatgatgaagaacaacaagacgaagaataatattagttttgtgtttatgatatgtacataagttattttgaaatactatgcaaacatttttaaattattttgaaaaactatatttattaagtatgttatgtttatttatatttctatagataattactatttttgaatatctatggcccaaaaaaacacaaggcccaaacccaattattaaaaattaaacaaagcgactaatttgtgacaatttagcgactataaccattctattgggccaaaataactcgaggcccaaatagggtgactaatttgtgacaatttagcgactaccgaaaaattattgggccaaaaatttcgaggcccaaaattggtgactaatatgtgacaatatagcgactaatgtttaaattttgagaactttttaggcccaaacccattagacccaatccctttcaatgtcaaaaccctaagttccatctctttctcttcgaaacatccgcagccttcttcttcgatttctctcttcctcttcgatttcctctgcgaaaccctagcaaatttctctcttcctcttcgattttcctcttaatctctctaccaaacatctgcagtcttcttcttcttcaatctctctcttcgatttcctctttgaaaccctaccaaatcaatctttcctcttcgtttttctcttaaatctcttcttcttcttcttcgatttcgtcgatttgaacctctgtctcatctagatctctccttaatatcatgtttgggcgaggaaaaaagaagcgaaccagtcctaaccttgctcagagagcctccacatccacggctggtcgacgacctcgttctctcccgtcccagtacaatttcacgccgacagcagaacggtcgcctcagctacagacgcctgcatcagaagacgcggtcctcctttaaaggcaacggcagctcatgttcggagctatccgccgcctctgcagttgttccagcactctggcagttgacaacctgaagtgcaaaggtctgcctccgtggaagtgcagaacaatcctgcgaatcaaggcgcgactactcagcaggttcctccggctcctcaacaagaccctccgccttctcagcaagaccctctgccttctgcagttcaagagtcttgggctcacagtcacccatcctctcaaggcaacaacttcgaagaatatccacctttctcgccggatctccaggaggacacacttcaatccctaaacgatcttcttatgttgccggagagggataagttcgtcaccgtcctctctcccgttcctcgaccgaataccacctggtatgatcttcttcttctcttgtttgtgatcccatgttgtgttcaattagggtttagttgagaaatgagctttgtgagattgattagattaagaaaatgtctgaattgattctttgttgtgtctcgtgttgtgttggtctgaaagttttgttcttaggatttaagttatgtgttttgttcttagggtttagttgggtaatgatctttgtgacgtgttgtgttggtctgaaagtccttgatattatagatgttactttgcagccacaatctattctcatgtttgaagagtcttgttgtgttggtcttattttgttgtttgcgagaacaggtagtttaagttgtgttttgatcttagggtttagttgagtaatgagctttgtgagattgattagattgagaaaatgtctgaaatgattctctgttgtgtctcgtgttgtgttggtctgaaagtctgaaagttttgttcttaggatttaagttatgtgttttgttattagggtttagttgggtaatgatctttgtgacgtgttgtgttggtctgaaagtctttgatattatagatgttactttgcagccacaatctattctgttgtttgaagagtcttgttgtgttggtcttattttgttgtttgcgagaacatgttttgttaagttgtgttttgatcttagggtttagttgagtaatgagctttgtgagattgattagattgagaaaatgtctgaattgattctttgttttagtctcgtgttgtgttggtctttggtctttgatattttgatgttctttgcagccacaatctattgcaatgtgtttgaagagccttgtcgtctaggtctctactctacttgttgtttgcgagaacaactgcttgtggctgcaaagtatcgtgtctgtcattgtgtaagtttagttctagatctttgcagccacaatctatgttctgctctatatgatctgtttgtactttgcagccacaatttatgttttgctagtctttggtctgatatttagatattttctgccatataataactgcttgtttttcttgtgtttggaggtttactcgggacacaaactcacgacttgttaggaatatcactagagtgtttacaaacaagtttgatggtccctactacagctggacatgtgtgcctcaagagagacaagagaaatacttcctcgagtttgctgttaactgttctttcagcccttcttttatatagttgattacacttcttttttttactgacattaccttttctatttgtagaaaacacaccattgggatcctttgatcacagggactgttcagttttacttcaacgagatctgtttaaggcgaatgaaaggcatggttagcactgtaagaactagtcgaaagaaacctaaatggattgggaaaactctatggaaggaaatgactgcgtactgggacactgaagaagctcaggaaagaagtcaaatctattcaaatgcccgtatgtctgaccgtaatggtctaggtcctcacatacacttcttagggtctaagtcatatcatcaaatccgggacgaattggcaagtcttctctctgtttactcctttgcaactttaactcgatgtttcaatgtacttttctatgacttgttttttttttcattacaggaagaccaattgggcaaaactgtcagtattggtgacgttttcatcaaaacacatacaaaacctgatgggacgtatgttgatcgaaaggcagagaagatttcagagttatatcagaagaatttgcagctgaggcagtctgagctcgaggctgaagcttctgctgtttcagatggcacttcgcgggtacgggagctcacagctgaggaatgtacaaccatatttcttcaggtaacgttttatgtttcccaatttagtgtttttgagttgtctttttcagtctctaatctcagcttttatcatactatgcagtccactgagagggattcgagaggcgttccttatggagtaggaagcctcaaagagtctcttgtcaatggcaagcggaagcaagcaggtgactcaacttcttttgtggctttgcaagaacaattacttgaagctcaacgcaagatagaagagcaggtctcttgcattcagaggcgtgaagctgagaattc

SEQ ID NO: 1062 - DNA, 100815 bp, Arabidopsis thaliana
gaattcttcaaactcttcatccgaactggaggcgtatttggcatcccaagtaacaggaaataatccgctgggcattctttgtttctctatccaagcaatatcctacaagtgaatactaattattaagttgttggaaacaagttagtttaagaagcataatatataaatgacgtcattacaagaaatatctacattattaccaagagagaagagctattatatgttcttaggtgatcacccgcgctacgccgcagttttttcagattttttttatattgtttaatttaaatattttttatatatctaattattcactcatgcaataagaaaatatttttagtattaaaatatttttttctaacaacattctcaatatttcatcatatacataattcataaacaacgttcatcttaaaccaatttaaccgagggtagtgttcaattctagaatcctaagaatttgatgatggagctccgtacgtattttgcaccttcggtgatttattatataaatattaatttaagagaataacttacttaaatcattaactaatccacgattattatatactcatactttgagtttggattaccaaaaaaatctttgataataaaaaaactattaaaatagttttattgaaaaatcatgtaatattaaaataaatttagtattagtatattaaatatttaaaataaaataatatataaaataaaataatatataaaattaaataataaatgttcactaatctataattattagtacattacattaattatttaatagacacatgacaaatactaaagtgatgatgtagcaatcatatggttagagttgaccaactttcatatatatgattaataaagctgtattatgcccctgttaagaccaatcaaattgtcatacaacgaaaattcaaaaagtagactctagctatattttgaacttagtgagtagaaaccaaaacgttttcatcatattgtatgatgagctaattaccatcataacttcctaataaatacaattccgtttcatttccatttaatcagatttctaccaactaaattttgtaatcgtttttgtaatcgttttatttcaaacacccttaacaattcccttaatgtttccaattaatttttgccgttacacacccttccttcatatcaaattcaaacaatcatcttcttcccatttctttaaaaaaccttaagatcttcttccaattgaattatttggtctccatttttattataaaacctataaagatgtttccaacctcactcgtctatttgtttattaaagtttaaattaccatccaatagccccagtttctccaataacaaatgacgatcaccactcatatccatcctcgaagcattaaatttcaaaatcaacactcaaaccattgttgttcgtccaatccaaacgttggaagtttgtgatttcaaacgttataatattttgcttagcatcgacagtcttcttatggatgaaaagatatagtaaactaattcctaacacaattcatattcccttccgttccacactttaatttactattttcataatattcatgtatgtagccatgtaggataatgcatttgtaaacaaaaaaaaattatgtactacaacagtgaagttaaaaaaaaaacaattaaagaaataaaatcaatatcatgcaaaaatttctaaaatataccaaaacaaacttgcccaacaggcaggctttttttctagtctacaataaacgagagttgcgatacaataatagttgtcgattaaaagaaacaaagatatcggaatcaaagtcaactaaattaatcagagtaatagaaaaaacttttttttttgttgcaagacatcaatcaaagtattataaaaagactccatcgacgaaagatctatctaatagaaaacaactcaacaacttgttcaagcctaaaacaattataaaaaaaaagttatataaaaaaaaaaacactcaagatttagaatctaagcatatttattaatgaacgtagacgtccaaaaaaatgaactgtactggattacaatgatcagtatttctctgtagttctaacaatcccaatttttttaaaaaaaaaaaagaaaaaaaaatcctcaactatttatttgatatatttttccaaaaatgtggttattatggaaagtgaaattttaaatgtggagggtgacaagcatctttgcttagtatataaaaaaagcctttctcctttcttatcctccaagatttaacaaagagaacgagagatatggagaacaaaactcaagaggaagcttcgaccatcaaagtttcatcccttacttgcatagatcttgccaacccgaactttcaacaatcagcggtttctcttaaacaggtatgtttttattttttctttattatagctaagtatgtcaaaaacattttattttcagatatgtatggaaaaaaaagttgactcgttgtgtgtgggttattcttgttccaggcatgtctagattgtggatttttctatgtcacaaatcatggtataagtgaggagttgaaggacgaggcttttgagcagagcaagaagttctttgctcttcctttggaggagaaaatgaaagtcttgagaaatgaaaagcatcgaggctattcacccgtccttgatcaaattttagatcctgagaatcaagtcgacggtttgtttgaccatcttttcgcttgcttgatcaaaactttgttgttgatgatctcaatcttgttgtaacctcatgggtttcaggtgattacaaagaaagttttttcattggaatcgaaggtgtcaaatacaccattctatagccccaacctatggcctgaccatggttagttttttttcttccatagttagctcttttatttgtcaacctcatgttttctaccttatataaactttgatgtttctggcagttgttttgccgggatggcgggcgaccatggagaaatatcatcaagaagcattgtaagtatttgtttattatcatgaagtagctagtttatttcttcagactttgaggcaagattaaattcttcagtttactaaggccatactaaaaccatttaataattaatggattagtatgtggattcagttatggatttgctattttttaatggcatttatggatttttcaaattttttgaatagtttgtggattttgtcactttttaggctatagaaatataatttaacatgcgttttattcattatatttgggtttagtcggttgtacttgttttgaagatttaaagtttttgatataaagtacgtatttttgccaaaaaatcttaaatccgtaatttttaataaaagtgataatttcaaaagattttgatgaaaagggcaaaatcaacaataatccttgtgtttttttgacaatataagaccttacattttttcttttgatgtggataggcccctaacagggaagttttctaaacgttatactaatgatgagcttttcacatggtcaggagggtttgcaaggctattgctagattattagcattggcgctcgacttggacacaaattactttgataaaccggaaatgctgggaaatcctatcgcagttatgcgtttgcttcgttacgaaggtgatatattttcttaagcttcgtagccctacttatcctaaacaattttctttcttccttttgttaccttttagggatgtctgatcccttgaaaggaatatttggatgtggagctcattctgattacggaatgctgactctcttagcaaccgatagtgtaaccgggctccaggttttcacatttttgctagtcatataactttagatgtgaccaggtttggttatgagaaattgctatacgatggcagatatgcaaggataaggacgtgaagcctaggaagtgggaatatgtaccatctattaaagggtataacgagaatttaaggtcttaggatccatgatccaattttaaacactacactaactcccatgataaaaaatttgtttataaatttcctctttaagagcatatatcgtcaatcttggagacttgttggagcgttggagcaacggcatttttaagtaatttcgatttctgtgagcttactctccctaatgtctcttttcaccctctacattgtcattttcccaaataaagttttctagctgacatttttctcacatatacacatagatccacattgcatcgggtacttgggaatggtcaagaccgatattccgtaagtctcttaataatacacatccgagtctatccttacaatttcttacaagacgatgtgctctatatagttgttataatttgtcaacaatctagcttattgttgatcatgtctacaaatcacaaatgagttataatttctcaacaatctaggttataacactcaaaatgttttttttatttgttcttgtcacagattccattcttcatagaaccgagtcacgactgtctagtagaatgtctacctacctgccagtccgaaaacaaccttcccaagtaaggctttaattctttaccttgttacattgagaccttggacatgtaacaatgtctcctaaagacattaacgattgtgtttaatgaatagatatccagctatcaaatgttcaacgttcctcacccaacgttaccagcaatcacatgtgaatttgagcatctacaaacagccctaagtgaagttcatggaaaaacttaacccaagtgaaagtctttggttttgtagttttgtttttaatatactttggctttttagttgggttcgtagtcaaaaactcttgtgttaaaggcttgttcaccaaggtttgatatacaagaggacctattggattaataaagagaatgtaagaagagattcgaaattttgaacaaagagccaaaattagtttcaggccaaacacttggttcatatcctgaagcgagccgtttcagcaccaaagcgcctgctgattttgttgaccaaagaaaatgctaggaacctttggctccacgagctgaattttgtgccccactccacaggaaggcagtgcacaacttttcaagtgcttccaaacacccctttgggagaggaaaagttgttgtgcagaagttaataatatgctaaagaggacagattgtatcaattgaaaccttccattttttttttcaactgttaagataaattgtttatttcatgcaacttatgctcatagcaaactttataactttatatcatatcgaaggactactttcatatatgtatttagattagactcactacaagaaaacagttaaatacccactacacccggcaactacatacataatcgctatatttggtgactatttggctacaattatacgagtagaggcgagacgccttggtagtcgctaaagggcgactattatatgacacttcttaatgagtcgccaaatgtagtcgtaaattagtcgctattttgcgattaatatacgacacgttgtaatagtcgttaaatagcgactattatatgacaactgcggcgtgtcattaaatatagtcgcaaaatagacgtaatttgccgactaatatacgacagctcgtaatagtcgtctaaatagcgactattggatgactacagcggcgtgtcattaaatatagtcgcaaaatagacgtaattttcgattaaaaaaacatgtaattcgttttgtaagttgttgtacctactttaaacgactacactatttagtcgtgttttagtcactcaaaaattgcctatataatgaaaatttctcgtacacaatattcattcacaacacaaacacaatactaatattacctttaaaaaaaataaacatttttgaagaaaaaaaacgtttaaaaatatatttagttttattattagtcttataatggcgggaaactataattatccgagtagcggtggttttaatcgagattggatgtacaagaggttcgatgaaatgacgggaatttgtcagcagaatacgtcgcaggagtggaggagttcttgacatttgctaatagccagcctatagtacaaagttgtcgaggtaaattccattgtccttgtgctgtgtgcaagaataaaaaacatatcgtctagggtagaaaagttagtaatcatttgtttagtcaaggatttatgccagattattatgtttggtatatgcatggggaagatttcaacatgaatgtaggaacgagtaattatgtaattgatagtacgtatctaagagagaattatgaaagtgcgggtaatgttgtagaagatccatatgtggatgtgggtaatgttgtagaagatccatatgtggatatggtgaacgatgcatttcgttataacgtggggtttgatgataactatcatcaagacggtactaatcagaatgtggaggaaccagtacgtaaccattctaaaaaattctacgacttgttagaaggtgctcaaaatccattgtacgatggttgtcgacaaggccagtctcaattatcgttagcagctcgagtcatgcagaacaaggcggatcataatatgagtgaaagatgtgtggattcggtatgtcaaatgttgacagattttttaccagaaggaaaccaagctactgattcgcattacaagccagaaaaattgatgcgcaatttaggccttccttattatacaattgatgtttgtattaacaattgtatgattttctggaaagaagacgaaaaggaagataaatgttggttttgtagtgctcaaagatggaagcctatggatgactaccgtcgaagaaccaaagtgccatataatcgtatgtggtatctacctattggtgaccgattgaagagaatgtatcagagccacaagacggcagctgcaatgcgttggcatgcagagcaccaatcaaaagaagaagaaatgaatcatccttcagatgtggcggagtggagatattttcaagagctacatcccacgtttgccgaagaaccccgtaacgtttatctcggattatgtaccgatggattcaatccatttggcatgtcgcgaaatcattctttgtggcctgtgatcctgactccatacaatttaccaccgggtatgtgcatgaatacagagtacttgtttcttacaattttgaattctgggccaaatcacccgcgaggtagtctcgatgtcttcctccaacctcttattgaggagctaaaagagttatggtctactggaatcgatgcatatgttgtgtctttgaatcaaaattttaatctaaaagcagtgttgctgtggacgataagcgactttccggcgtacagcatgttatcaggatggacaacccacggtaaactgccttgtccaatttgcatggaaagtactaactctttttatctacctaatggaaggaagacgtgctggtttgattgtcaccgaagatttctttctcatggtcatccattacggaagaacaaaaaagacttccgaaaaggaaaagacgcttctaccgagtatccacctgagtctttaaccggtgagcaaatttattacgagcggttgtctagtgtaaatccaccaagaaccaaggatgttggtggcaacggtcacgaaaagaagatgccaggctatgggaaggaacataactggcacaaggaaagcatattatgagagctttcatattggaagaatctgaatctccgacattgtatcgatgtgatgcatacagagaagaattttttggataacataatgaatactcttatgagcgtgaagggtaaatcaaaggacaacataatggcaagaatggatatagaacgattttgttctcggcctgacttacatattgatagtaagggaaaagctccatttccagcttatacattgacaaatgaagccaaaatgagtttattgcaatgtgttaaacatgcaatcaaattccctgatggttattcgtctgatttgagtagttgtgttgatatggagaatgggaagttatcaggtatgaagagtcatgattgccatgttttcatggagcggttacttccatttatctttgcagaactcctcgaccggaacgttcaccttgcattatcaggtaaaataagaatataatttactctttatatcatatatgcacttgagatgatgatttttttttccaggggttggcgcattttttagagacttatgttcgagaactttgcagaaaagtcgcgttcaaattcttaagcagaacattgttttgatcatatgcaacttagagaagatcttcccaccatcattttttgatgttatagagcacctgcctatacatctcccctacgaagcagaattgggcggtcctgtccaatataagtggatgtatccttttgagaggttttttaaaaagttgaaaggaaaagcaaaaaataaaagatatgcgaccggatcaattgttcagtcatatatcaatgacgagatttcttatttctcagagcactactttgccgataatatacaaacaaaatcaaggtaaccatgaattatcgatgtgatgcaagttttcaatgcgcaaaaataaccatgaattacctcttttggatcaggttaacaagattcaatgagggtgaagttcctgtatatcatgttcctggagtacctactatatttagttctgttggtcgtccaagtggagaaatacgtgaagtatggctataagaggaagactatcaatgcgcacatggatatgttatacggaattgtgattattttcaagtaattgagaggtatataacaaagtcatactcccattttaagttaattatataaatgtttgtttactaacccttatatgttgtttttgtctttatatagtatgttcgaagattttctttctattaaatatccaggattgaacgaaaaagaacttttcgtgaaaagaaacgaggaatatcatgtgtgggtgaaagattatgtatgtctaaatagtttataatatatatgatttgcatttatttattgttattcttatctctataatgatgtttatttctaaatttgcatacaggttacatattggaactctagtaatccttttccaacttgggttcaagagatagtcaatggacctttgcacaaagtcaaaacatggccagtgtattttacaagaggctatttgtttcatacgcagagtcatggagcaggacgtaagacttgtaactatggtgtatgtgtgaaaggtgaaaattatacggatgcatctgacgcagcagatttttacggcaacttaactgatatcatagaacttgagtatgagggggtggtcagtttgaaaatcacactttttaaatgttcgtggtatgaccctaagctcggaagaggtactcggaggagcaatagtggtgttgtcgacgttctttcatcgaggaaatataacaaatacgaaccctttattttaggtacgtatggtatatatatatggtcatttagtttttctagttcatatacaaatatctaattctccaaatatggtgcatttacaaacaacatctcaagcggaactagtgtgctttattccttatccatacacgaaaaaaccaaagcgggagttgctcaatgttttaaaagtaaatccaaggggaaacatattaggagaatatgaaaataaagacccgagtttattgcaaacagaaaatgatgatgctgttttaataacaacaatagaagatcttgtactcgacaatttgacaatcaatcgcaaccccataaacctcgatttagatgccggagatgctgatccagaagatgaatttcgatgtaatttatcgtcttctgatgatgaagaacaacaagacgaagaataatattagttttgtgtttatgatatgtacataagttattttgaaatactatgcaaacatttttaaattattttgaaaaactatatttattaagtatgttatgtttatttatatttctatagataattactatttttgaatatctatggcccaaaaaaacacaaggcccaaacccaattattaaaaattaaacaaagcgactaatttgtgacaatttagcgactataaccattctattgggccaaaataactcgaggcccaaatagggtgactaatttgtgacaatttagcgactaccgaaaaattattgggccaaaaatttcgaggcccaaaattggtgactaatatgtgacaatatagcgactaatgtttaaattttgagaactttttaggcccaaacccattagacccaatccctttcaatgtcaaaaccctaagttccatctctttctcttcgaaacatccgcagccttcttcttcgatttctctcttcctcttcgatttcctctgcgaaaccctagcaaatttctctcttcctcttcgattttcctcttaatctctctaccaaacatctgcagtcttcttcttcttcaatctctctcttcgatttcctctttgaaaccctaccaaatcaatctttcctcttcgtttttctcttaaatctcttcttcttcttcttcgatttcgtcgatttgaacctctgtctcatctagatctctccttaatatcatgtttgggcgaggaaaaaagaagcgaaccagtcctaaccttgctcagagagcctccacatccacggctggtcgacgacctcgttctctcccgtcccagtacaatttcacgccgacagcagaacggtcgcctcagctacagacgcctgcatcagaagacgcggtcctcctttaaaggcaacggcagctcatgttcggagctatccgccgcctctgcagttgttccagcactctggcagttgacaacctgaagtgcaaaggtctgcctccgtggaagtgcagaacaatcctgcgaatcaaggcgcgactactcagcaggttcctccggctcctcaacaagaccctccgccttctcagcaagaccctctgccttctgcagttcaagagtcttgggctcacagtcacccatcctctcaaggcaacaacttcgaagaatatccacctttctcgccggatctccaggaggacacacttcaatccctaaacgatcttcttatgttgccggagagggataagttcgtcaccgtcctctctcccgttcctcgaccgaataccacctggtatgatcttcttcttctcttgtttgtgatcccatgttgtgttcaattagggtttagttgagaaatgagctttgtgagattgattagattaagaaaatgtctgaattgattctttgttgtgtctcgtgttgtgttggtctgaaagttttgttcttaggatttaagttatgtgttttgttcttagggtttagttgggtaatgatctttgtgacgtgttgtgttggtctgaaagtccttgatattatagatgttactttgcagccacaatctattctcatgtttgaagagtcttgttgtgttggtcttattttgttgtttgcgagaacaggtagtttaagttgtgttttgatcttagggtttagttgagtaatgagctttgtgagattgattagattgagaaaatgtctgaaatgattctctgttgtgtctcgtgttgtgttggtctgaaagtctgaaagttttgttcttaggatttaagttatgtgttttgttattagggtttagttgggtaatgatctttgtgacgtgttgtgttggtctgaaagtctttgatattatagatgttactttgcagccacaatctattctgttgtttgaagagtcttgttgtgttggtcttattttgttgtttgcgagaacatgttttgttaagttgtgttttgatcttagggtttagttgagtaatgagctttgtgagattgattagattgagaaaatgtctgaattgattctttgttttagtctcgtgttgtgttggtctttggtctttgatattttgatgttctttgcagccacaatctattgcaatgtgtttgaagagccttgtcgtctaggtctctactctacttgttgtttgcgagaacaactgcttgtggctgcaaagtatcgtgtctgtcattgtgtaagtttagttctagatctttgcagccacaatctatgttctgctctatatgatctgtttgtactttgcagccacaatttatgttttgctagtctttggtctgatatttagatattttctgccatataataactgcttgtttttcttgtgtttggaggtttactcgggacacaaactcacgacttgttaggaatatcactagagtgtttacaaacaagtttgatggtccctactacagctggacatgtgtgcctcaagagagacaagagaaatacttcctcgagtttgctgttaactgttctttcagcccttcttttatatagttgattacacttcttttttttactgacattaccttttctatttgtagaaaacacaccattgggatcctttgatcacagggactgttcagttttacttcaacgagatctgtttaaggcgaatgaaaggcatggttagcactgtaagaactagtcgaaagaaacctaaatggattgggaaaactctatggaaggaaatgactgcgtactgggacactgaagaagctcaggaaagaagtcaaatctattcaaatgcccgtatgtctgaccgtaatggtctaggtcctcacatacacttcttagggtctaagtcatatcatcaaatccgggacgaattggcaagtcttctctctgtttactcctttgcaactttaactcgatgtttcaatgtacttttctatgacttgttttttttttcattacaggaagaccaattgggcaaaactgtcagtattggtgacgttttcatcaaaacacatacaaaacctgatgggacgtatgttgatcgaaaggcagagaagatttcagagttatatcagaagaatttgcagctgaggcagtctgagctcgaggctgaagcttctgctgtttcagatggcacttcgcgggtacgggagctcacagctgaggaatgtacaaccatatttcttcaggtaacgttttatgtttcccaatttagtgtttttgagttgtctttttcagtctctaatctcagcttttatcatactatgcagtccactgagagggattcgagaggcgttccttatggagtaggaagcctcaaagagtctcttgtcaatggcaagcggaagcaagcaggtgactcaacttcttttgtggctttgcaagaacaattacttgaagctcaacgcaagatagaagagcaggtctcttgcattcagaggcgtgaagctgagaattcccaagctgcagatgagcagaagaagaagcttgagcacttgtccttagaggagaagtttttgcgcgaaaatgatcctcggttcctcaatttcctcgaatctcattcagctaaggagacaaccacagatcctatctcaccctctccagctgcctctccctcttcatctgcttcataggtctgaatcttaactccttcctcaagactcaatatcaaggctcaaagtttttatatgtgtacttgtgttgcttgtgcttatgctgaacaaaattctaagttgtagtgaatcgaacatgtttctgtaatttgggttttgtacttttctgaaatgacaataaatttgttttcatgcttcttgtatgtgtttatgcttattgtaaagttttgttttctcaggaaggtttcaatctttataacaatcatatagatgttctaataacaacaatagtcgcaaatttagtcatcaaaaatgtaaccaagcagtcgtttatttataacaattcagtcacaaaaatttccgactaagtgctattttagtcgcaaatcagtcttaaaaatagtgacaacgtagtcgtaaattttaacgactaattaccaacaacgactaaataaccctcaagttaatcgttaatttgtcgtctaatagtcgctaaatttagtgacaacgtagtcgtaaattttaacgactaattgcctacaacgactaaataaccctcaagttattcgttaatttgtcgtctaatagtcgcgaaatttaacgactaaaatgtctctaaaaaagcgattacccaaacttagtcgtaactttgtcgctcttttgcgactaaaatacgattacgttatttagcgactctcgattagcgactaattttaatagtcgtttatttgtcgtaaataggagtttaacgactacagagtaactaatactgtagtcggtaaatgacaattttcttgtagtgactggattatcagccactgtaaatgcgggttactattagtttataagaattatgttttgggtttttatgtgtgtttaaactatatttgagctagttagacttacttaactctttagcattttcgctatccttaaagtgtgtcaataagaaaagaaaacttattaaagcaatatttttacaagttatacctatcaaattttggagtgcatgcaaatgagatttcgaagataggattcgatcggtcagttgcatatgtgatcgtaatataatgatggccattggccaacggacccgacaacgtgacctgtttttacattattgatcctttctctctagttttcgaataaaaaaaagactagtattaatttgatattttccaattgaacattaagaacgtggagccaagtggctgtggttaatacatatatgtatgattatatggtagtggcatcgcttactataagataagctaaacaaagaaaaaacttttatatttcctatccaaagaaagactagagagtggtagagaaatggagaataaaactgaggaagaggtatcaatcatcaaagtttcttcccttacttgcatcgatctcgacaactctgatcttcatcaatcagctgttttactcaagcaggtctacgtccatttatttttcttaaaactgattacagtatgaacattataccttccgcgaaaaaacattattaattcggtcattatgtgttatatatatattcttgttccaggcatgtctcgatagtggatttttctatgtcataaatcatggtataagtgaggaactcaaggatgaggctttcgagcacagcaagaagttcttcgctcttcctttggaagagaagatgaaagtcttgagaaacgaaaagtatcgaggctatgcaccattccatgattctctcttagaccctgaaaaccaagtccgaggtctgtcagatcagctttcgcttgcttaggctaaaagttttgttgttcatgtatatctcactcttgttgtaatgtgatggggtttaggggactacaaagagggttttaccattgggttcgaaggtagcaaagatggtccccattgggataaaccattccatagccccaatatttggcctaaccctggttagtttttaccgtctcattgtttgttaatttatgctttgatctttaaataaactctaatgttttttgtagacgttttgcccggatggcgggagaccatggagaaatattatcaagaagcattgtaagtgtcatgtttgtttagaaaatatttaaatagggaaatcaagtgggaaaatttgctaatgacttaaaggataaaaatttagttggaaattaggtggaaagtttgatttaaaacaacttgactctttttctcccaatgaatgtgacatctctctctccacattagttataaacaaaaatattccacatatagaattccctcagagcatccacattggacatacctttgtaggtgtttcaaaagtaaattaagattaaatttaaagacatcttctattttgggggtctgaaatgtctttctaaatactctattacacatttaaagacacaccttcttgtttcttctattatttttaactagatgaattctcacggtacgcgtgggtttgttttaaaaattgttaataaaaatatgttaattgttttaatcgctaatttatgtttatttttttgtttattattgtataactaatagaattagactcataatagtatttacgtttcgacagttgttccaaataccaccacctcagtgataatttaagtgagtgtatatttaatgttatgtatatcgatattgtgaacttgagttgtatctaatgttttcattttttaatttccgtataggttatacatgatgatggttttgtatcctatttatggtacttgtcccttggtaaacatttactgatgttgtttgaaacacatataaaaataaattggttatgatgttgtcccgtggtaaacaatgtctgtttgaatatttatagagcttatagtagtgaaagcttgtaatcccataagctgggagtgtgaatatgttttagtgaaataaattgtgcatctatttaaaagacagttacagctgcttgttccttgattcagttctgtgtagcttctactgtggcatccattctggcagttacaaggtataaaacgttttttctaaataaatatgatgtacagaaagggagactacattgttggatttagaagcattaagccatcattgaaatggggccgacctattagtattgcactctaatagattctaaaacacatatggcccatctggcatgagctattttgtttactctatttgacacttataattagaagctgatgtgtaaaaaataaaagctgaatcatattaatgaaatgtttttattggaagattagaaagctgatgtgtcatctccagaaaagcttaaaatgctgacgtggcaaaatgatggagagagttgagcttctttcatatatatgatttaaagacatcttcatacaatctccattgcacataaaaatgagggtatttaatttgaaataagattataaaaagaaaacaatagacatttttagttagagagagtctagatagagacatttgaatactctctctcttgtatggttcttcccgtgtcaactttttatttgtttttaaattttaaataattaaactaaataaaaagtattattattaaattttaaagatacacttatcattagttaaccaatgcagatgctctcaaagtatcaccaatgaagatggtctaaacgacttcagttacttttggtctaaattttttgttatattgcttttttggtcacaaatatcagaccattaattaaggggatggtaaaaaaaaatatcatagcattgagtaacaatgatatatcactaattttcctttattcgtcattgtatttatagttaaaacttaaatacgaaaaaaagaaaaacgttaggcaaatatttagaattctgaactctagtatcatgtcaaaacttatggatatgcatcttaaaattaattgacaatactatactaggtgccatacatatattttctgtggaactcttaaggaacaaagtttttcaaactgtatacttatgatgagcccttctacatgatcaggagggtttgtaagtctattgcgaaaataatggctttggcgctcgacttggatgtggattactttaatacaccagagatgctgggaaatccaattgcagatatggtcttgtttcactatgaaggtattttcttaattgcattagctttgtatgtcaatgtcatacttattctcattattcttcattttttgttatattttagggaagtctgatccctcgaaaggaatatatgcatgtggagcacattctgatttcggaatgatgtctctcttagcaactgatggtgtcatgggacttcaggtttggcacaacttttaccactctcatataattaacttcatatgtgatcaagttactaatataatatctaattgcagatatgcaaggataaagacgtgaagcctcaaaagtgggaatatactccatcgattaaagggtataacaacaatgagatattttaggtttttgggttgttgatacatttaaattgctacactaactcccataacatatttttgtttattacgttataatgttctgctttggtaaatttgtttccgtctacagagcctatattgtgaatcttggtgatctgcttgagcgttggagtaatggctatttcaagtaaagtttttgtttgtttgtgcttcgctcaatacatcatgtaacatgattttcaagtacagtttcttttgtaatgacatttttttccacatgtttttataccttacagatctacattgcatcgggtactcgggaatgggcaggaccgatattctgtaagtttcttactatacagtcgaagaatcttcagccacaagccaaatctcattgatatcatttctcaaaaatctagtttttatcaaacatgttcgtaagggaattcgaaaaattacgtacatttctatttaattataagttttcttctcacacagattccattcttcctgaaaccgagtcatgactgtataatagagtgtcttcctacctgccagtctgaaaacaaccttcccaagtaagcatttaacacttcaccttgttacattaagaccttcaactagtaacattgccttatagatgtttatggttgtgttaaatgaatagatatccagcgatcaaatgttcaacgtacatctcccaacgttacaaagcagtacatgcacacctaaaacagacctaggtaggtgaagtatggtccatgcgtaccacgctctaaagtcccacgatatgaatgcttcgttttccaattggtttgttgttaaaattctatatctatctgatggagatctattcaattaataaagatcatcatttaagtgattacagatgaatttctcgaatcggaattttgggttatttatttcagtttacaaaatcatggaagacgctacgtcctctatttacgacggttatttggtattttaatataaattttgggggaaaaaatctgtttgagatgttttggaatgattatgtgaattatgtccaagttttgtaatcacaagcaataatttgatttgtttttacgtaaagcataagccaaggaccttccatatgttgtgactactactgacattaaaaatttgatggacaagacaaattaagagtgtagccaaacatacaagctgtggccaaattaaccccaacaccttgcgcattccgtgctatagtgaaattggctacgccttaatatgcttttgggttctcctagcgacataaagttatagaaatccaagacaaccaaatctatacgcattttacgggaaaaaaattattgtatacttaccaataaatataaaaagttagatgcaaggcatcaattagatagagtgtattagaaaaagactcgatcgactcaagggactaatagaaaaagactcaacacttgttcacacataaagcaattaaaaaaccactcaagatatagaatcacagcatgttataattgatgaacattcaatatatatgtgtcctctagttcttgaataaaaccaaatttaatatgatataaagaacaaactattaattttgatatttttctcgaaagatgtggttattttggctgttaacatatcacaagactttaataacagtccgattgaaattttaaatgtggagcttacataatatatgaatttatagcagtggaatcttggaacaagccattgtccttatcttgaaagagtcaacacagagaattagagagatggagaacaaaactcaagaggaagcttcgaccattaatgtttcatcccttgcttgtatagatctcgccaactccaatcttcatcgatcagctgcttcgcttaagcaggcttggctcttcttctttctttttctcaacgtcaatgattacggtttggcctttattagttatgtgactagttgttggttattcttgttctaggcatgtctagattgtggatttttctatgtcacaaatcatggtataagtgaggagttaaaggacgaggctttcgagcaaagcaagaagttctttgctcttcctttggacgagaagatgaaagtcttgaaaaacgaaaaacatcaaggctattcacccgtccttagtcaaatctctgataaccaaatccatggttcgtgtaaccaagtttcacttgcttgatcaaaaaaatttgttgttaagtgttcccaatcttgttgtaacctctcatggattttaggggattacaaagaaagttttttcattggaatcgaaggctccaacgatacaccattctgtcgcgctaacatttggcctaaccctggttagtaaacactttttgtaaatttaatgaattttctttgaataaatttgatatttttagcagatgttttgtcgggatggcaggcgaccatggagaaatatcatcaagaagcattgtaagtcgttgttttcgtcttctaaagtagatgtttcttttctttagatttgaatataagggtatgaaacctgtttcccacaatgagtatatacgcgtctcatgtgtgcttgcttatgcaaataacaaataacttttgagactagattaagttcttgtgtaaagtgactcctgacatataaattttttataaccgtatactgatgatgatgagcctttctccattgtcaggagggtttgtaaggctattgctagagtattggcattggcgctcaacgtggatggagattactttgatacaccggaaatgcttggaaatcccctcacatttatgcgcttgcttcactatgaaggtgatgtttttactttatcacattaatcttaatgtcaatgctctactcatcccaattaattttcttccttcttatgttaccttttagggatgtctgatccctcaaaaggaatatatggctgcgggccacattctgattttggtatgatgactctcttaggaacggatagtgtaatggggctccaggtattacgcgattttcaccatagtcatataacttttgatgtgaccaggtttggttataaaaatttgtcttatggcagatatgcaaggatagagacgtgaagcctaggaagtgggaatatatactatcgataaaagggtataatgagatttttttttaggtccatgctccaatttacactaactcccataacaaaaaattgtttttatatggtttgttttcctatacagggcatatatcgtgaatattggtgacttgctagagcgttggagcaatggcatttttaagtaaataattgttgtttgagctagctaatttatccttttgcattgtgattgatttttgcaagtaaagttttcttgctaacatttatctcacatgtttttttttacacatagatccacattgcatcgggtacttgggaatggtcaagaccgatattccgtaagtctgttggctaaacccatccgcgtctatctgcacaaattttttcgacatgtccacttttcggtgcggttattgtgaaagaagttttaaccagatgctcaatgtcgtcattataatatatcaacaacaatctacggttttgttaaacatgtttacacatgagttcgacatatataatctaacattggaagtgtatttgatgtgttctcaccgcagattgcattctttctgcaacctagtcacgactgtatagtagaatgtcttcctacctgccagtctgaaaacaaccctcccaagtaaggacttaacttctttaacttgttacattgagacattggacatgtaacaatgtactaacgacgttaattaattatgtgtgcgtagatatccagctataaaatgttcaacgtacctcactcaacgttaccaggattcacaagtggatttgagcatctacaaaaaatagacctaagtgaaagtctttttggttttttttagaaaggtccaagcccttcccactataaatgctttggttttctagttgggctcctcgttaaaagtcttttgatggttcttgctcaccaagctctctatacctttttaatgggaacctattggatttaattaaaaacaatctattaaatcaacccgcgtttaaagtgactccactacactcatcacaagtgtagaaccattctagtggctacggaaacgctcataacgcccataagataattacgcatacgatcatcctccgcaaccatgctttctcgatgaggggaacttcctcctgtcttgatgtcttccattgggctccacatatgtaacaaaatttgtagccacatctatatgatatccatcaaccatgaacattacgatactgttaattacgtgaaaacataaacagattctaaaaggattaattataacagatagagaatgtgaatatgtgatgatgatgatacatgcatgttactctgatgcatccattagaaaattcaatcatttggttgcaatttccacattgacgccacatattctgatttgctaaagattcgaactttatatcatcttctgtaggatttggacccaatctcttgtaatcttcgcacgacaagttactatgccacgcatctttgcagatgttacaaaaggggtcaccgcattgtaaacagtatctcatagttccatctctggttttcgacattaaagccgaacaccttggatttgggcaataaactcatatccttactttgctaaaatcttaaaccctaattaaacaacccctttttgaatctatttgcacaatacatctagtaaagtagttcgacatatataataatctaacactggaaatgtatttgatgtgttctatctctctctctctctctctctatgatccgaaggaatggtctctacttgtgatgagtgtagtggagtcacattacatgttatatttgtgcttggagacatatttgttctatggattctctaagaaattttaaaacgggttgagattttactatttgatagttttgtatacttgtattgaaacattatgcatggaatctatcgactctacaagcagtttacgcatctgttcatgaaaaatgggaatctgcattatattcaattagtatctcaatgctattaagaaagcgaacagagagatcttgtattgaaaacaaaaaaaagctcgtggaaatgattacaaacatagtgttacaatgatacaagttgacgtgtatgtatgcatatttgcttttctctcctgtggaccagattgctctgtccacacaaagatatcaccataaagttaaaagtagatcggagaaggaggccatttccctcttccgcgtctaccgtgaatcctacctcgagggaggatgagtagcacaaacaaaaagtgagaataataaacatacgtacgtgaaagagatgacccgaggatccaaaacaaagacaatctttaagtatctgcagcttctgtggtggattctggatgtgttggttcagcttcttcttccggttgtgacacagccgtttccttctgctgttcagcgagacggctgatgcgttcaagcaactgcgctgcttttcgtttccctctatccgtcccatttccagctaaatctatcaatggacccataaggccgagtttctgcgcttcgacaagatgttgtgggtctccagaacagaggtggactagaacagcagctgcgttttctctgtttctaggcgagccagttctgataaactcaaccaaacttgggactgcatcagaggatcctatgattgcttttccttcggggtggctagagagaatcgccaaaatcgcgagtgcctcatcgaccattccgcttccgggctctgtcaagagtctagtcaacgtgggaatcactcctgcacgtatagcttttcctttgtttccttggtatatacagaggttaaagagtgcagtagcagcatctttcttgcctctttgtgtaccttcattaagtaatacaacgagtggcggaattgctcctaaggcaccgatagtcactttattttcatcgatcactgatagactgaaaagtgtagccgccgcattctctctggcctccatgcttcctttcttaagcacttgaactataccaggaatagctccagctgaaacaatggctcctttgttgttctcacatatggagaggtttagaagagctgttaccgaatgttcttgaatacgagaatcaggagttgagaggagacctacgagaagaggtatggctccagcttcggctatggccacgcggttgtctgcatttcgttttgcaagaaggcggatttccccagctgcagatcgttggtcctcggggtttccgtacgcaagtctccacataagatcttcaatcttgttcgcttctgcgggagatgagaaggacgatacttttctgggtcttaaactgctcggaggctttggaggctcaatatcgttggcctcgcaccactgagctatgagactacggagaacatagtttggtgtgagggttgtgcttgttagcgcctgctgtgtttttggacatgtcgagtgtccaccttctatccatttctcaatacatgtgcgttcgtatgtctatacatagaggagaacatgcttctataattaaatcttaagagatcgcagaaataaatttgaagaagctgaggttgaagtgaactatacctgccctgatgaaacaataactggatctctcatcatttccagcgaaatcggacagcgaaaatcatcaggaatcacaggtatcttctgactcgctgccgtagaagtctgtccattgcttctagagttaactcctactttctgctcctcgccattatcatcctccgtctgcacaaaatccttaatcatctttaataccattgccatctcctcaatattttcaccaacatctccaccgcttgaagcaaccatttcatgcagagccactgattcttgagctaggtcaggaatctccatcaaatgtaacttcttcgcaacccgctctagcacaggctgataagcatctacatcactacttttgttgcaaagcgactgaagatcttcatatagctcatcatctgatacatctactcttcctttagctcgccgaaactgactaagaaccagctcaacctacaacaaccaaaaaaacgctatgaatcaactacatgtcgtctttactgatccagacactggcctagccagccttgggtttcaagaatttacctgttctctaacttcatccgatatatcgagttcttcatatggaatctggcttaaagattgttctaacttaacagacacctccatcaatttacttgtcacttgttccctctccatcacctacacacagaacaacaacatctcttgtgtatcagagcacaaattctcaacaacttccatagatcaatcaagtcacatcaaccactaccaaatctaacatctaatcaaataccaaagaagcattgatatcactcaaacactaccatagcaaaacaaagcacgtggctctctcattcaatgaaaacaccaattcgtcaacgagaacaaaaattctcagtgaccacacagatctaatcatagatgctaataaatcgaagaagaaacgcaccagataaatcttgctcccttggctacaaaatttgagataatccttcgctgaacacatagcttccttcaaattcatcaaagtcttcaacgtatcttcgctgatcggttcgttactttctctaatttcctcaaacataggaacaagcagctttaatctcctcgctagattataacaaagcttcttcactgttatacgataatcagaaatcgcagcaatctcgttaactacatcgattaagctctgtgcagcagaagctttctcttcctccattgaattgattcttctctgtttaaaaattcacgatttacggatccgtttttcctccggagaagatggagatctttcccgattgagactccagtggcgagattgagcttaaaggaagaagagaaccatttgcagaaagtgcgaaagagagagatttctgagaaagagagattgtgtgagagagaagacgaggacttttcgaaaacggcgtcgtttagctgacggctttagcttattgcaacttgtacgattctctcggcttaagaactaaaccggaacaaaggtaaattcgaccacgaagccgcgggaccggttacgattgtgtttgttttattttttacattaatatattatattatcatttaaattatttctctataaaattactaattttcttgtgaaattttgaatatttttcaactattatattttcacggattgaatatacgaatttttacggatatagtggtcacttttttgctgtagttggtgacatttttggggtgtcatagaagaacaaaattgttaatgcatttataattttggatttagtgataattgaagaattaaaaaggttttatacctctatctctctaatcatgcaagaaaatattttaaaaagaaaaattaaaaatagttcaactggacaacgaaattatcctaaaatagttatttcttttgatctaatccttcttcttttaaacttttttttacttgtttctactctacatgtttcttgttattaggtaaagtattaggctctttttttaaaaaaaatgcttaatcctctgggtacctcgaaaagggaataatactctagttagataagtgcagcgatcaacatgacaaaatgaatgaatgtttgctttaattggtggctaaaagctaaatacacagaaaagtcaaaattcaatctcaaaatcaacccctctgtctccaatgtccctaatctataccaaaatgtcaatttattttcttgatcatatattccactaattaaaaataaatccttctctaatgaaatttgtcaaggccttggaagcctagttttaaatattaaatggaaactatttcttcaacaatcacactgttatttagtattgttgtatgttgttcactactttcttcatttgttttgtaagaaactataataagcaaaaacacataataaagtctcatgtcaaataatgaatcttatgcacatgcttgattattttacttgcacatatccctatcatcattatcacatttgtcaattaccgttatcatcattactctcattcttcccagaactttttcagcaatttccatacctcacccactaagatcttttaccctttttcttaattatagtttggatagcactcttttacatagcactgaaatttcggttgaacacataaattactagaaactagaaggaaatgttactgaaatttcactgattgtctaaaattgaataatctaaagaaaatggccttttaacctttttcttaggcccaaatgggctcattaccactcatgcttgttcggtgacccgattcttccggtaaaacagagcctaaaccgtattttcaggttaggctggtgttttcttaattctccaacctaaaaatagatggacacgtgtctatagaggctgagatattggtctcaatgaagaaaactaacggctcagacccgtgtatgaacgatattaagggccaaagttgcttctgttttccagaaatttttgaaacccaatttcagggcacgattccacaacctctttcttttcttctagatctacgtaaattcatcaggtacatgttattttttttgtttatttgatgtcaaaattttgatcacaaggaggcaaaaccaatataaatgtaacgctaatgcgtttgattatggtatacgtaacgaattagatttaatggttacattttattgttttagatttagttatgagattggcattaattattggtgtttcctttgaatttgctatgtttcttatgttgatgtaatcagctagagattgaaaaatggcggacggtgaagatattcagccgctcgtttgcgataacgggactggaatggtcaaggtaatcaaaaagctttagagaaacaagatttgtgaatgttattatgtgccataagttaagcaattcaactatgtgcgtgtaggctggttttgcaggtgatgatgctcctagagctgtattcccaagtatcgttggccgtccacgtcacacgggagtgatggttggaatgggacaaaaggatgcatacgtcggagacgaggcacagtcgaaacgtggtatcttgactctcaagtatccaattgagcatggtattgtcaacaactgggatgatatggagaagatttggcatcacactttctacaatgagctgcgtgttgccccggaagagcatccggttttgctaaccgaagcgccgcttaatccgaaggctaaccgtgagaagatgacacagatcatgtttgaaacattcaacactcctgctatgtatgttgccattcaagctgttctctccctctatgctagtggccgtactactggtcagtacattactacactcaaattttaccgtttggtttaaataaagttcactttggttcgatttcatttgctctcattgtttttattttgttggttaggtattgttttggactctggagatggtgtgagccacacggtaccaatctacgagggttatgcacttccacacgcaatcctgcgtcttgatcttgcaggtcgtgacctaaccgaccacctcatgaaaatcctgacagagcgtggttactcattcaccacaactgctgagcgtgagattgtcagagacatgaaggagaagctctcgtacattgccttggactatgagcaagagcttgagacttccaaaaccagctcatctgtggagaagagcttcgagctgccagacggtcaagtgataaccatcggggcagagcgtttccggtgtcctgaagttctgttccagccatccatgatcggaatggaaaatccgggaattcatgaaactacttacaactcaatcatgaaatgtgatgtggatatcaggaaggatctttatggaaacattgtgcttagtggtggcaccacaatgtttggcgggattggtgataggatgagtaaagaaatcaccgcgttggcgccgagcagtatgaagatcaaagtggttgctccaccggaaaggaagtacagtgtttggatcggtggctctatcttggcttctctcagtactttccagcaggtaaattacttactatactcatacacacaaatattattaatataaagtctataagtgatttgatgtaaaaattgttacaaaaatgtgttcaaatttgcagatgtggattgcgaaagccgagtatgatgaatctggaccgtcgatcgtccacaggaagtgcttctgatcaaaagtcaccaagtaaaacaagagcggtaaaaattttgatatcagtttttcaccctgaagccatttgctataattactcacaacttctctatttgtgttcttttattcttgtccctcattgttcattttaatctctcttttgcaacaaagcaacttaaaaaaacagatcagtcattaacagaatgttattattatatgtatacatattagtatacacccattatcttcttctgagtttcctctctgtctctgcttagtttttttcaagcttggacctcgatttcatttaaatcttttatcatataagcataggattctatacatcgatatatatttattttgttgacactattcagcacatgcgtatgtcttatcttgttagtatatgtaaccaaagacaaagaaaagatgctacaaattgttttctctgatgcagaaattcaatcttaaaattgttttttttttcaattgcacaaaaaatcatgtagtttgtaaattttctaaacaattttgatgatctttactagtacatgaagttcaacttcttttctagacatgtgacgacctgagtctgcgcggctgtgaatctctttgctgcagtaaatgtttacaagtggtgtgtaaattggtactgattcaaaagctttaagagatctacacattctgtggtattatgtcgcagacttgatattaaaaagacataaatcttaaggcctggttcacatgttttcccgtttcttgtagctcataactcatcagcagtagatttgaccaaacgctcgcaaacggtttggaattatcagctttgtttctcttttcgaaacacttatttccagctcgatcaaattgggcatggcctcttcttctatctgcaactcatctaaacttctcattaacaagtcaagcttcctcagcctaccaaaaccttgttcgctgacgctcatcttccccgagtaattacaacttaacaagatcagatcttccagtctcggcattttctgcaaaaaaggcattgggtcttcctcgaaagttattccaaccagtgtcacggattcaagactgcgtgatatcacatccatggacctaactgcttcttctgattccaacgataaatggacttcagtgggcgtcgccagcttcagaacacgaagactttccagtttagtcaaggaagcccagctcacatgaactcttctctcctttgacctagacatttcagaaatccccaaatctcgaagatttatgagcaactcaggttttagtttgttccagctgtcaaaggagatagacgtcaaggtctgaaggttcgctacgtcgcctataagcaatcctccaaaaaaatttcctatgacatgtcttaatgatgtgagcttacggagatcgattgtttcctcgatgaaataattgtcagatacaaatagtgtttgtagaaaccgtaacttggatataatagctgctatatcaaaatcgttgatagaattaccatcaattccaaggtacctcaagtggatcagatccccattaattttaaaaggaagccaaagacttccgaaatcaagcactcgaagtagcttcaatgtttcaaaatcaagccctaccaaatggtcgaattctccaaagtataagaaggatcgcatccgtttgttcttgcgtttctcagatgagtatctcttgaactgatggtgaaccacttcccttctgcaagtagtagaagaatgttgggccacatgatcgttatacacgtttacaaagttgagctctttagatttcttgatagccacgtctctcagaagatcatggattctacaagacatcacttttcctctttctcttctcactgcttcaagtaagcttctatctatcagctcttcgatgtagtaccgagccacatcttccatcatcatctcttcatccccttgtataaaaccttctgctacaagtaagtgtatcaacttctctaggtcaatctcatagtcctctgggaagatactaaggtacagaaaacagagtttggactcatgccgcagctccttgaaacttagatcaaacacaataggggcaacatgaatggagtcatcctttaggcgtctccataaactgttacaaacatcattccactcgcttggtgtcttcctcgacaaaagccccgcaagaacaactatacaaagtggtaaccctctgcatttttgaaccatttcttttccggttttcagcaaatcttcatccttcctttgtatattcctgaatgctctttgttcaaacaactcccagctttcttcaaacgtcaagaaccttaacttatgagcatagaatctcccatctacgccttcagccacggctttaatacgcgtagtgatgatgactctacttccttcatggttgcaaggtaacgctctctttaagctgtcccacgcttctcgctcccatatatcatccaccaccaccaaatattttttcccttctagaagaccgtaaaggtaaacttctaactcttcctctgcaaactttctgatcttttccaactcttccccagaagtcattcccaaagatctaatgattctcattagtatatctccagttttatactcttgagaaacataagtccatgcgcggtattcgaatctttccttcacatcccttgagttgtagagcttcctagcaagtgcagtctttccaaggcctcccataccgaagatcgagataataaatctatttttctcttcataatcaagaagcttttccaaaagaatcttagcatcatcttccaaaccaactacaacctcttcttgatcaacagatcgagcacgccgaagttgtctcactctcaaacttgaagtattccctcctccttgaggctctttcaagcctcctataccataagtctccctcttgcgagtgatatccaaaattcttctcttgagaattctgatatcatcaactatgctgtacgcatccatcttcctgcctattttgttggtcaatctcctcaagcctcgcctttgtgacctttcttcgagtttcaagtgataagtgtccaaaacatcttcgacgtcataagcgaaatctaaaaccagttttgaccactcttttgagacctcatcttctctttctcgcgcttcaacgtccttgagataaccatggatgcacgtcaactccgtcttcagctcttctagatcctctttgactgccataaacattgatgcttcttcaatgagatagttgccgatctttcccacaacgaactccgtgatcgcatctaccatcttctcaatatcgatttgaatccacggatatcaccgtaagcacaagattgaagaaatgttttctttatttcagaaaccgtcgtacttaacttgttggaatgaaatttcgacctctcctatattatctcaaaactatgcatcacctttattaaagaaaccgtcgtacttgacttgttgttatgaaatttcgacctctcttacattatctcgaaactatgcatatatagtttgtaactatgtccaaaataattcaagtagacgtgggaccaatatacgttctcatctctcaacttgttagacaatctttcgtggaagtttcaatttttcacatatatttatgtaagtgttaaattttaaagatttagagtctatagattgttgttcacaccaaacatatatgattgaccattaaaccctaaaacaagttggaaatttgcgtttttgagataacatctctatcaccttgaaactcataagaaaacattttctctggttcgtgagtgagcaaaatgctcataaactacgagtgagttataaacaccatacttgtctgatattatagttgagtgcttttgtgtataaactgtgtgataaattgatacaaaatgtgccacatgtgttccaaatttgcagatgtgaattactaaagccgagtatgacggataccaagtaattctactcaaaataataagtaaaacaagtgcggtaaaaactttgatatcattgtatccattctttagacaactgccatagttacttaaatctttctatctgtgttcttttattcttccttcattgttcattttaatctctctcttgcaacaaagcaagttaaaaacagatcagtcattaacagaagtgttattattgtagatatgtatacatattggtatacacacattatcttcttctcgtgttttttctcttatacagattgcgatatcacgtaattaaaatttaatctgtgttctcatcaagcaagactactgtatgcttactctcgccatccgtaaatggatggttctcgtcttctccggctagttcttgaccctcctttttactaaaacccaaaagtgggtttacctctgtgttctcatcatcttcaggatccatattttctttcatacccgtcctagattcctcgctcgggtcagctaccagcggctgaggaaaaaggttggcgtcattaggagaaaccatagtgttctcttggtcatcctcatcgtaattcttggtaaaattggaattacatttcctatagactgtagattcttgtaagacttcatgctctgacaaagaatgagatgaagacttgtggttaaagctaccgaaaccttgaatccctcgagacagctcacgagctcgcttcctttcttccttaagtaattcccctttctcaagtagctttaaaaccttctctgctttctttctaacagctaatccccaattaaacctaccaaaaaacaaaaccttatagcctaagaacattgaaactctcttcataccaaacatgatccgtcttaaaacgctaaaaccattaccctttctcgtcaatctgttggaaggtttgcatttgggagataacatctatatcaccttgaaactcatcggaaacactctctggtccatgagtgagtaaatgctcaacaactattagtgagttataagccatcctccagtttctcttatcgaactttgccaatctaatttacaccaaacaataacaacaacaaatgctccaaatctcagtaatagaatatgcttgtttaagtaaaatgtatcgattaatcacaagttatgtaaccttttgtgcaagacttcaacaatcgccaagtaatcttcaaactcaaaagcagcctttgaaatggaccctaaggtttgtgtatttggtccacatgactcaccatccgtagcttcctcagtcattcttcaaccaaatttacatacacataaatctgtgttagaaaccaagactcctgaaaaaaagatagaagcaagaagccaaaaataaaaaagactaacagttgaagaggagtaacatcggtgagagctaaacgcgccgttttaagcttctctttgaagaaaaatgaagcttgtttcttcaactcaaggaaagatggtgttcccatggcgatgctgcttcgagttctgctcatcattgacatctttctttcaaattattatcaagaaccatatgagaaaaacgagagagaggagagaggcctttggatctatttctttagtgttgggttagttcaaaaacagatgaattctagattggtcattgaatatatggacaaaaaaaactttaatataaccaagaaaagtccaaatctgtgatccccaaaaaggtccacaagattgaaaattttgaatgatcgttgatcgttttacattggaaaagtcaagcactatagtaccaccaattaccattaattccacatcaattgcctcaactgatctgattttgaatcatttttataactcataaattcataaaaagacatagaagttacaaaattaatagcttgaaaacgaatttctcgattgaaaatacatgaataattcgttttcaagatcaacagttaaaaagaaaaatcttaaattactcaaatatacggtttagtaaaatagtacggtagtagtgtgtgagcgagcacaggggatcaatgactcccttctcttttcacggagtcagtgaagtgaagtgaataaggtagagttagatctggccgtacacatccacacgcgcgctgatgacactgggatcttaagatccgacggctctagataacccgaaaatctagcgagaaattgacttgagagataggcgatctggaccgtcggtgtcaacttggtaggacccactactgcacctgtcacgcactcactgtttattattccgctgagctaattcactcctgatatttagattccatacaaacttctttagaatttcaccacacctcaatctatataaattaaccatttaaaagttacaaatccacgtgttatttgtagaaattagaatatactaatgtttagaaaattgaggtcacgcggttgcatgatgaagtaaaatttattgacatattttaggttgaaactgggaataaccttcggtaaaagatgattcaagagcaaaagagaaaatgaaggatttatatagtcatgggttttacccaaaatcgcccattcaatccaaatttacatgggaaagtgaatttgttttttcctcgactcaaatacaataacattatcgtgaataaatataaacccttgtgaaaaaaaaaatccagtaaaaataaataaagccctaatcgaaggcaaaacattatgtgataaaagaaagaaagaaaaaaaaatcataccaaaacataacaaaatgctatacaccaacaccacaagaccaagaaaccaagtggtcttttaaccgcgccggaagaaactatctcacgcggtggtgatactagtcgtgacggctgttcactagaactctccggcgacaaagaaatctcctgtggaggagctgtggcaacgggttgacccgattttggaaatagttctttaggcaaaagaactttggatactccgaaaacagaaaccgggttttgatcaaaagccgtttgagtcacaacagctaaaaccacacccgaattgatcgttacgattgacccgttaacccgggagatgttgagagtgtatgaaccggctcccatttcttcagtggctaatgtcggttgaaccgggttggttattgattctagtgaaccgagagtgtagtatgaatgtagcacgtggaattttaacacgaatgctttttgctccgccggtaatgactggaggttaacgttggaagggagatcggagaaggcggagtcggtggggacgaagactgtgatgccggcgccacgttcgtcgttttcgaattctgttatgacaccggaagcgacgaggagggatagagcgacgttgaagttgtgtccgttgattagtatctgagtgagattgattcccgccggtggaggggagagagatgttgacgtcggcggtggagtgagagtctccgatgcggtgatatcgattccggtggggacgatgagggagtccacggtgaggacggttatgttgggaggtttggtctcgagaagctttaacacagtgacgtttttggtggctggagatccgatcgtgacggatcctgaagccgggtcacgggttacgttaacggatccagatccaaagaatgtacgaccggaagcttcgtagagagtagtgacggcggagcctgacggtggaatacgtcggagatcggaatctgaaaggaactggaggaggacatggaagcggaggagatctgctagggcggaaggaggtaggcggcgcgtgaggtccaaggaggcggaggagaattgagaattgggaacggcgaggagggttaatgagtttctaccggagagttcggcagcgatgccggaagagacgaggaggtttgagaaagatgagagattagggaaagaggagaggacggcggtgacgttaattgcggcggcggtggaagataggaggagaagtaaataaggtaatgcgagaagggtaaaatgggaaattgagattacgttcgccattattttttgagttaggtcatgagattggtaaagagaagaacacagagaaggaagtgagtggatagagagatgggagtgatgtgtgagtgaagtttggtggacgaaattaaaattagagacatcgttgggaattgtatgacgcgcggtgtttgggagtttgaagttcacgcgtagaacaaaacagatgtcattgtgtcagaaagagagatgcttttgtggacacttctagtcttgtagtgattagattttggtgagaagatttatttgattgaaataaaattaatgtattttatgtggtgcccacgtggggtatagttttaataataatgtcattaaagtttttttcgtttgcatgtgagtttcctagctgtgaattaattaagctgcagtcacttaatcttaatcaacaatagtacaatgcaattacttggattagataaaatatcgaattaggattaccgtttagattgttttttttccctcaagtttagtgtatttgatttagaaaggaattcaaatagtttatgagactatttagataagtaagataaccatatgtatgtaggcgagtattatatatttggtaccgttactatatatcgggcctaattagtaaaacattaggctttaatcaagtctaagtaataaagcccaccaggcccaataaagaaaatcgctagggtttaagtcttaagcacagaacaaggaggcgatgaagaattgaatctgtagtcgaaagaaaagagttgggaaaaaaatggacgcaagcatgatggctggacttgatggtcttcctgaagaagacaaagccaaaatggcctccatgatcgatcagcttcagctccgtgataggttcgtcacttagatcggtttctctgtttttcatttaggattctcccaaaaaaattgacttttagctccttgaaatctttgttcttatagttcaaagctaattagatttgctttagaatattgattcaaggttagtgtgtacttatttctggctaattatagatctttgggtccttatggttcattgataaacaaaagtttggattagagttagtgaaattgttctttaagatgtaactgtgttgtctcattttgtgtgttgttgtcaaaactcacaaaatcttcacattatttaggttgtaacaacttatgcaatgcctattgttgttttgtgtttaggccttaactttggctacttttgttgagttttgtttttggtgaatttcagtttgaggatgtacaattcattggtggagaggtgtttcgtggactgtgttgatagcttcacacgcaaatctctgcagaaacaagaggagacttgtgtgatgcgttgcgctgagaagttccttaagcatacgatgcgtgttggtatgcggtttgctgagctcaatcagaacgcaccaacccaagactgatatagtctgctttttctgtttggttttttcgtacggtttacgagtccgaaaccagaataaaccggttgttagttgttcaggttactactccgatactgttttttgaacatcttgtactgtgaaattattttgactgtatccagttctgatattgatattgacttgtatttcaatggagtctagagaatatcatatcatatcagtattacatcgaccagttccaaattttcaatgtgtaatattgcttaacatcttgaaactttgttacaaaagaaatcgagctctaatctaatctaaaggtaccttatttgttttaatgatatcgacattggtaagtctagtttaatcaaaccgaagttttgctcggaaccgtagatttgatttgtgatcttcgttgaagacgagagaaagagtgtaactctccaagagaaggaagagaagagaagagatgagatgtagatgaaacaacttgagttctcatcatgatcgtgtacgagtttattaaagttacaacttctacgtttggcaaaactcactatgagttatttttgggagcagatcatattcggtttgattgtggaacattactacaatactactacttgattcatgtagacgtgagcgagtgactgattttcgtgaatgtctatttattaaattagtgataataaattaactaaatttggtaattgaaattctttataggtatagaaaaagccaccttctctgttgttaaaaaaaaaaaaggtaatattagtggatagcgatatttgacatcataattaagaaactaatcatatgtgagaaatggggggaacggcctattccatcatgaacttagttgttttatcgtattcatacacataactttgagtcgtgcttataactacatgaacttaactaaaatttgaatttcctatgtaaattcggtcaaaaccatcaattcgacaaacggtgttactattttgttaacgagtgctgactgggatgccacgtcgtatcacaaaacggcgtcgttttgttcaattatagaaaataaaaaatctgaaacaaaatcttacaaagtggagaatcaaaccaacaacctttggcattattactccactttggaaccagtagagccaaggtaacaattgttattttggtcgtttgaacaattatatataatgtaataaattaaaaataataaaaaatgttcatggagattttcaagtttacgggagatgcttttctttgaatatcagaccacgaggaacatccatgttttggaaggaaaattggagaatggaaactgagaataagctggtggagaagaaactttgagtcgtgtttataactacatgaacttaactacatgttttgtgatacgacgtggcatcccagttagcactcgttaacggaacaataacaccgtttgtcgaattgatggttttgactgaatttatattgtgtaggaaatgcaaaatttagttaagttcatgtagttataagcacgactcaaagttctatgtatgaatacgataaagcaactaaattcatggtggaataggccgttctcccgtgagaaatgttgggtaaatgattctttttgtggtggagtaggggtaaagaaaagaccaattaactttgtaaacttatagtttttacaatgatacttttatttatggtgatagagatttcataaggtttagtgagaaaaagaaaagagactccgaaggttcagtaagaaaaagaaaagaaaagagatctagaggtggaagccataatcatcgtgatattattacagggtaagtagtctagaaagggagtcatctaatggcaaaaaactaaagaaaaaaaaaaagaaatcatgtgcttttttaaaataacatgaatcaaataaaaataacgaaataataatcgtcgtgatattattacagagtaagtagtccagaaagggagtcatctaacggcaaaaaattaaagaaaaaaaaatctatgtactttttaaaaataacacgaatcaaataaaaataacgaaagaaacaacttgctatttgtccaaaatcttatgtatttttgaacaatagcatgtcaaaataaacaacatcatgacatattaaaaaatcatatgtaaaacataaatatagtatgttaaaacggaaagataccagtatatcataaaatattacataaaattcagaaaaaccataaaagtttacgaagtaacacgaatcaaataaaaataaagaaaaaacaatttggcatttggtcatggtcaccgtaatattattacggagtaagtggtggtagacaatatccataaaatgaagagaagtcgatgacataaatccggcgatagaaagaatcttagaaaagagagtgaaagaaagagaaaaaaagagagagaagatgaaagagaaaatgagaaaatgatatattagtaattttatttgcctctccgataaagtactattgcccatagtcatttactctattctttttggtttcatggttattttgtacatataccaaaaaaggaaagaaaaagtcaccttttgaatattaaaaaaaactatttaagtttagctatggaatataattaaacccattgaaatttaagaagtcaagttgttggaagttttgtttactattgcttaagtttatgatataaccaaggtcatgtcttagttataggatttgaaacaatggcctacggtctttcttctttcataatcattttaagtgtcaattcaaaaatattaatgtaacttagacttatgtatagaaacctgattttctatatgtaatcaaggacaattcaattttaatcaaaatatttttttttataaattaatagtgtcacactgcaaaattctattaatttatcgataaatgaagaattattagattatacacacttctagttaattttgtaattttgaaaaaaatgaatatgaaataaattgtgttttttaatagaaatcaatatccttttaaaaccaaatccaagataacaaaaaattatttataccttgaaaacaatacaaaaagattttgacgtactaaaatattattagtgaaccctaggattaatacatagttaagaaaaacaaacaatactaaaattatactttattaaattttcttacatatttatatatatactagattttaacccgcggtataccgcgggacgatttattttttaaaagtaatatatattaaaacttgcaaattttatttttataaaatatttatattttacagtttataattgttattaagtaacggtataccacgaatccatgagataattgtaaaaaaactgaagttttaacccctattaaaacagcatattaataatattttaaaatttaataaatattgattcaaatacatccaccatataacctaattccaaaatagaactcgttctgtaatttttttaccgtccatgatttttttttaaaatagtaatttttaaaatttaagaataattttttatatagaaaagttttgcaaattgtatcattctctaatacatttatatctatagtttaattttatatatagtaacattatgcataccacataacatttttggttttatataatcttttctaaattaggatgatttgatatgtttaatattagtggtcttaaaaaataataaattaaagatttaacccgtattaaaacggtggattaattatattttacttttttattaatgttgattcaaaaacccgtccctccaaatccgtcttgtcaaaaagctatttattttgttaatattaattttattaatatttattttattaatgatatgattctgaattagaatctaaacattttagctaataacataggagtgcaccatatttatttaataggagaatgtccatatgacccgaatgcacttttatccaaatccaccaaaaaagtcttgcaaaaatactatagagataagaaacgatagtcggttttgataggtataagattagcaaatatattagttagcataaattagttaaagaatacaaattgaaaaggtatattacactttattcgaatatagtatcaaaacttatataacacagagatttgataaaattttaattgatgaatactttttttgtgctaatttttatgtgattaagatttaattgatttcgtatataaaatattaaattgacttatttgtttataatttggtaacagatagatatttgaatattcaatatattttgcttctaatctttgatgatccgtctttagatccaataagccctataatctagatattaacttgcggtatatattttagttaaactaaaattttttattgtaaagatgatttaaaaatatttgatattattttatttgattttaaatgtatagtaaactgtgagttgtatatgttttgttgatattatctatattgtttagtgtttaagattatacacttgtagtttgattgttaatttaagagtttcatctgtagtataccatcttgtattaatatcgatctaaacatgcaattctaggatttccaacttgtattaaaaattaaatcacatctaatatgttattaattattgtagtatataagattataaattttcaatataatatgtatgaaattgaatataaatatttcaaattatgacccgttacttagtagaaagttttcttaaatctattttttatccgttataatatttttttatgtattgaacagtttatatttgtttttaaaaattcaatttatggcatatgggaaaaaactttagttgtttttttataatgatgatattatttttctgaaaaaataaaatcatataaaaatgagaagtgaactataataattaataaaaaattaatatgataatttagatatcaaatataatttgttgattttaattggttacttttttagaaattaataatgtatttcgtttttctaattaaattaaattaattaaaatttagatatcaaatcttatatgttgactatgattggttattatttttggaaattaataatgtatttcgttttttaattaaattagtatttgactttttaatccttaaagagataaattaatttactctttaaaattttatttctaatggcatacctatgtaattacttacaaaaattaaggttacatttaaaatgtacttcccaaataatatagtaggatgtattatatatgtattatatatatattgataaatttatacaattattaatttatgatactgatgtgaacatataataacatttaattttcaaacatttttttattattttaggttaaatattacgctgacccgactcgagaccggaaaattttcttaatttataaaggtttttttgtacaagctattcacaagttaattaaatttacaattgtgctcacttcttttcttatagttaatcatcggaaatttattatcttagttttaattttagtaatctctcaactcacaaaaaatcttaatcctttgaaaatcataaagatgttgatggaatacttcgaagaagacgaaaggattcactttgatccaacgtactaagaagtcatcaacgattaatcttaaacgtgagctaagatgtgaagactccagaaacttcatagtgatgaaggatgtttatgccaaggagccatggttgcttgaccattccaacaattcttttttcaaagaagacgagtggtactacttctcgacaagaactcaaatctccgagaagaagattggtcgtggtaagtattcaaaggggagatcacgggagacaacaacaatggcatcggccgcgggaattggagggtgaatgagaaagaatatatcatcgacaaggacataggggatatcattgggatcaagaaaaacctaacagataagagcggcaactaaaccaataaatcatgattcaacgatttggtcgtacaatttgtcaagtattttatcatctatattttaaagtaccatgcaggagatagctttttgggttattggtttattggttgtgacttgtgatttaagccaaaaaataaaattttggtggtatgaatctaaaattatcatatctaagcaaaattattgttttccaattatgattagaaaacaatatcatttctacatataaaaaaaaaacaaaaaggaacttttattaatttagtatatttctaatagcataaaccaacaaagcaataattcaaataaaaattgaaccctcagtggcataggtatatcaaaggagacaaactctccacaagcttgggagctttttcttcagtttgacgatttggttgaagttgaaatatcgacgcaaggttgaacatcctcaaatgctctaatatgaacatcagctaaaatcttaacgtctacatacgctaacacaccatcctcatacatttgtgcagcttctgttaccaaaaaatactatttcatctttttatacagaggaacttactgtacaatattgtttaacaccttgaaacttggttacaataattgaagcgtatataccttatttgttttcatgataccgacatcgtaaaccggggtgaagtccggtttaaacaaaccgaagttttgctctgaaaccgaagatttgagattctcgttgaagagagaaaaaacataagtttcgaaaacccggtttggcatcaatggagtgcccttaccagaattcacatgctttataaggttcccattgtaagctgcggcataatctaaaccgacgccggtttggttcggttcaccagctgaaggccaaccggtctcagccacaacaatgtccacgtcaccgtacccaaatcgtttcattgcggagtaaacagcatcaagctgagcgtcgaacatgttggtgtagttcaacttcgtaaccgggtcaacatatacaacgtcgtttgtgttaaagagtgcgtagtttaacgtttcaggtccgaaaccgaaatatggatacgggttaaccataaaaggagacttggtgcggttgtggaagtctaggattggagagaagatggctttgtcgtaccctttacggaactttccggagctaggtggctcggaggagcctgagaggataccgagcgagtgaggcgtcgagactaagatcctactgacgttagcaaggtgtaatgctaacgtaagcgtctccatagcgggaaggagatgagtgatgagggttttgtcggatgtggcgacgacttcgtttccgacagcaatgtaacggattgaagttgttaggaggaaggggaggaggttgtcggagagccatgaacgtgcgttggaaagcttggaaagagaaatgatatcggagtttgggacggtgacggtgagggagattcctgtaatgccggaaaatgcggcgaggatgtcgtggtttgtgtcgaagattttgacgtggttgattattgtttttgttttgatgaagttgacgacttggtgaggcggtgggaggttgttggccacggtgccgtagtttacgccgacttgatatgcagcggagaagggaaggatgagagtgagaattaggaagtaaagttgatgaacaactctagatcccaacatgatcgtgaatgagtttattttatgacttccacgtttagcaaaacttactaggagttgttttttgggagcatgatcgtgttcggtttgattgtggagacgtgagcgagtggctcccaaaaaatcactcactcctagtaagttttgctaaacgtggaagttttgctaaacgtggaagttttgctacataatgtaataatcataaattaataacatttgataattgaaaccattaataaggatgtaaatagttgcaaattaattgtatttgggggtgattgggaagggactctcagaccatcctcatcggacaaatttaaaaggtgtcttcaaattttaacagaataaaaaaaataggaagatgagaattaatgcgctgaataggagtgacatgatgactttaatgtctgtggaaaaacattttttgatacgggaaaacacgaatgtgtcaccatgctattggttggtgttattgttttttattttttctcttcatttgaccaacaattttctctctgttcattttatcaataaatttctctctcttcatttggcagttaagacatccaatatactgatcaccgatgtggatgctctcatagctttaaaggtgttttaaagtcctcacagtttttattttaacagtcatgctttcttgactttatttttttttaaagttctcaaagccttgtttttatttgttctttgtttcctttttttttttaaagtcacgattacatggctttcaaacaaataaatattaaaacttttctttttcttctcccatgataattaaaaactttctacaattttatatatattttttcacaaatcatttttgattaattaattattattaattttatattttcttttaagatccaatttactaataaataatttatttattacatgtgcagtttatttgttgagaatatttatttaagaatattttttgtattttaattttatattattaataaaatatatttgtgtcactatgttgaaacataattcaattttaacataattttatttacaaaaatatatttaataatagtaaaaatagtactcaagcttttacaactttatattaccaatcagaatttaacatctaaaatctcaacagttaagtctctacatccaaattttctatggtaaaagtttttaaagccaaaacatttaccgtcatccttaccgatcggcccatagttgttcaaataatttatatcagttacacacatttcgattttgatttcggttacaaatattttatccactctaattcacaacaagaaattaatttaccttaatgggcccaaaagcccaaaaactgcaacgtggctaattaagccattcctcgagctcaaactttaaaacagaaacaaaacttctaacttacaaattgtacttctgtcttttactctgtctgattcagtcaaaaagaaaggaatattaaaatctctcaattttatatacactcactcaatcatacctttctctggagacctccacagggtttgtttccggaaatgtcgaacggcacggatcaggctcaaccaccaccggagaacccggctactccggtggattcgaagtcacggaaacgtgcgacgccaggggatgataattggcttcctcctgattggagaaccgaaattagggttcgaacctctggcactaaagctggtactgttgataaggtgaaaaaatctcagccctttcaattccttcgcagatagaatcgtccgtacaaatggaaatgttatgttgtttgttgatttgaattggaactttttcttagtatttatgaaattgggtattgaagttaggttatgatgatcttattggtttatattttaaggtatttggagactttataactagtctttaagtgtaacgttgctgtatgtatgcttgttggatgaagattgctctgtttaggatgttgtaggtgtgaatatgataatgcagtgcttgatgatgtcttgtatttgtaatgtagttctactacgaaccgattacgggtcgtaagttccggtccaagaacgaggttttgtactatttggaacacgggacgcctaaaaagaagtccgtcaagacagcggaaaacggagactcacattccgaagtgagtttgttagtagacattaccttaaggtttaaacccgtgttttacctgaactgttgttgtttttgcacatttttgtagcattctgaaggtagaggaagcgctaggcggcagacaaaatccaacaaaaaggttactgagccaccgccaaagccgttgaacttcgattttctgaatgtgccggagaaggttacttggactgggataaacggttcagaagaagcttggttgcctttcattggggactacaagattcaagaatctgtcagccaagattgggacagagtattcactcttgtcacctcccaaaacgctggaaaaacgatgttctagaagattgctgcagaaactcacaaattgtaataacacgcgctgctagattatcatatctacttagtatttactgatcgttggttggaatgcaggttaattttttagtagtgatagttttagtaacactttgatttgagttgtaatgtactttcttaacattttcttagataatttgaaggcaatgtatgtctatattattgcctttgagagaatccgatagtaacaaagttatgaaatctaaagttcgatgtgcggtacttctctgctcagttctctctgctttaaattgtgaatcatcagttatgcataggctctatctatctatgcttctctgcctttgtcctaaatgatatacggaagcatactgacataatttggaataagttcaagttataacagaacagtgtgaaaatatgaaccaaagcgtctgtagtccaacggttaggataattgccttccaagcaatagacccgggttcgactcccggcagacgcatttttaaattttgacattttacgctcgttgtttatgaacagtaaatattttctttagatctttgtttaagaattttttttctttctaaaatggctaagaacattgtcgtcaaagactataattcttttctgtcttatgcagtggataaaaaaggggttcttatcgcacttttcagttatcgtttgtttcctatcagaaaacaaaatgggaaaaattctccacctcaaaattcgaggaattctaacggcgtggagatgaataattaccaaaagtaacatatacacccccgtcgaaaataacgagttttcaaaaaagatattttcggttgatttgtcgataatcatctgcactacgctgcggtatattttcagatttttttatcgtttaatttaaatataattttaattatctaatcattcactcatgtaataaataattatttttattattaaaatatttttttcaaacaacattttcaacaatgcatcatatacacatttcctaaacaatgttcgtcttaaaccaattaaatagagggtaatgctgggattctcgaaacctaattaagaatttgatgattaaacttcttacatactctttaccctcggtgatttattatatagataaaaatctgcaaactattcaaactattaaataattcatgacaactatacactcattatttgagttaagattacagaaaaacatcttcgagtatgagaaaaccgataaaataattttattgaaaacatataataacaaaataaatttagtattagtacaattaaatatgaaaaattaaataataaatacatcattaatctataaattagaagttgaagagcttacattaattatttagtggacatagggcaaatgttaaagtgatgatgtgtcaatcatatggaaagagttggccaactttcatatatatgattggagtgaatcgaatctacatcattcatcaaccaaaaaataatctagaaaaatatatatcataatttctaactaaactaaacaaaaacgctcgttgttatattttagctttttaaatataataaagctcgtattgacaaagctaacggataaacccttattattttgactggttaattgttatctcaaagaaaaagtatttaacatcctgactttaaatttagaaaagttcatcgactatttgtgatgtcccttcaaaaagattaaaaaaccataacaaaagttaaatgtttctctgggttgtacaaatgttagatgttaactggaccagatcacatataatataagaaaatgaacctgattaattctctttactgagctaaattttttactgacaagtctatcaaattttaccatcatacttaaatcctcaaaaacacataaactatacagtacttttttcttattacgtatttactattctatgcatgaaattgcgtaaatgtttggttgtatgcatattagaatattctttttatttttctctccaacagatttaatattgaacggtggtgttcgtatgatataaattcaaaaccacccaccttttatcctttcgaactttttcgagataggataagatgacataattattttatttgtaatttaggaaaaggggtaggcctttttttttttctttcaaattaatgattgtggggctaaaaaaaataatttgtgtccaacacaggatataatattttgaaacttgaacgtaaatgttgacttttgatttttttttcttctcagcttttgttaaatttaaactcgttcccttatcagatttattaaaatggtgagtgacgaaaaaaaaaaaaatggtgagtgaaacgttagagaaatcgacgtatgaaatgaaattatgagagtgtacagagaaatatttgaacaatacttagagctgacaacaaattcaaacactgaattagttcttgaagacaaactcgctctttgctatagttgaggagaagaatcccacatactcaattatagatcgagaacgaatctttacgttttagttttcttgtcacatttactatgtaaaatggttcatattattattaaattttcatttattttcaaaataaattttttacaaatatatatatattttaatatgatgttaaaggtttttgtacataaattaccttttaattttgtttggtttatttagaaatcaaaatgtaatttattatctacctaaaaacacggttctttcagtataaaaatttacagaatataaatcattaaaagcaaataactaattagtattgtattaaaaattaaacacttatctaataatacaaaacttttgttctaaaacatgaaaacggaagaagtatgtttcttttaaaactatgaaattcatataccatattcagttttatttaatatcatttaatatgaatcgactacctcataattatacaatatagcaaactagggaccatcttatcttttacgtgattcctaaaacataaatatttatgggaatgttgcccaaaaaaaaaaatatatatatatatatatttatgggaattttatcattttcttcctattaagaaaaacctcaaaaataaaaatattaaaatacaaaaggaaaacataaaagcacaaacgaatattccaaatataaactaaaaataatactcataaacccaaaaatacatttttcctttcccgaaattcttttttttgttaatattattatcatgacaagacgaaatttactcaaaaggctacgaaccaaagccatgtgatgactacatcagtaccacgtgtcaagatctaaggacttaacgagttacgagtgtgtcgtgggccatcgaccatggaaaagcaacgagtctttaggtgaatgttttacttgctataaccggtaacaacgggtctggtaataccggtagctccggtggttggttgagttatatggctatgggggtttaagcaagaaagacgtggtcgtgttcttcttataagggtttttgtttataatttggtaatcgaaaaagagagatttgataaaatcctttgtgttgaaggaaaaaaaaatcatataggtaacgtttgatacaagtaaaaaaaaaaaatttccatcactttcttgggtaaaaaaaacatgggttagaggaaaaactggggaaaagattttagattaagtgcgtaaagaattctgattccttcgtctccgatctctcatttttctggagaaattgtcaaaaatttcagatatctatattgtcttggaactgaagattcatcgaaaggtgagaaagatttaaactttttttgatggtttttgtgttctcgattttgtcaaaagtttttgtgtttgtttgatcatcgagaaacttagtaaaaattcattttttatgtgaatttagatttggaattttcaaattcaagttcttttggtttggatcttaaaagggtttttgttatctttttgaacttatcatcatcttcgattgaaatttttcgttttcttatatgatcagaatcatctcattcatcgatctgtgaactccgatctgagaatttgaaagtgtctctctttttgttctaagttgatctgtttatcctttaattcaaagatcgaagcttttttataattgaattacgttttgtgttcttcaattcggatcttgtgtttattagggttttagaatggtttatcagatttgatttgatattaccgatctgtgattcttgaattgaattgagtcttcttatggttcttgtttcttatatactacagattggtgagttttattcgctgcttatcgcttgtggcaatcacatcatctgtgttatgcatccaagtaatggtgtcacataaagtcttagaatttggagatgatggttacaaattacctgctcaagctcgagctccgagatcactccgggtaaatgaccctttgctatattctctgtttagctgttaaagaatttatcagttacatgaatgatcactcgcatgtttgttcacatttttgctagaagaagcgcatttacgaaaagaagataccaggagatgataagatgtgcgcgattgacttattggccaccgtagctggaagcttgcttctcgagagcaaaagtccggtaaacgcgtgtctagttgtacaaaatactgtaaagaatgaatacccggctgatgaaaaccccgtaaaggcggttccttattcggaatccccgagcctatttgacaatggcaagtgtggatttagctctgtgataacaaatcctaatcacttgttggtaggtgacaaagtaggaaaggaggtggagggttttagtagtttgggtgtgagtggtgatgtaaagcctgatgttgtagctagtataggtagtaacagtagtaccgaggtgggagcatgtgggaacggtagtcccaacgagtctcgggatgatgtaaatttgtttagtagaaatgatgatgatgaaaacttttcgggttacattcgaactcgtatgactaggcctgtgcctcgtattggagacagaagaattaggaagatattggcatctagacattggaaaggaggttcgaagaacaacacaggtaaaatcgccttttgttttagttttgactatctttattattgtgatttgatgtttggtatttgcagatgcaaagccatggtattgctcaaagaggagttattacttgcaccatcatcagaggagttatcccatcaagaaaaggaaatactttgacagtgtttacgactcgaactctgatgattaccgtttgcaaggaaagactcataaaggtccaaaacttgtaatcttctcattctcttgttagtatgttgtaagtctttgctgttgtaacacggttttgcaaattcatccgcaggaagcagaacaatatcttccatgaaaagtcgaaatgcgtcctttgtgtcaagggatcatcatggtaatttaatggagtctcaagtctcaatctatcctttgttcgcttattgtttcgttgaaatatttttgttttgttttgttactctttagtgaagctgcggatcaagtcttttagggtgcctgagcttttcgtagagattccagaaactgctactgttggctccttgaaggtgtaataacaaaacctagttgtgctgaaaatcctgatcaagaagaacttatatttgtatttttgtaatgtcggggttgtcagcggatggtgatggaagcagtgaccaccatactgggtgatggacttcgagtcgggctgatggttcaaggaaagaaagtccgagatgatggcaaaactcttcttcagactgggatctctgaggagaacaaccacttggattctcttggtttcagccttgaacctagcttagagaccacccctcaaccactgttatccaggttcactcttctcttcactctcagagatgccacatcgataaaaaatcaatcttttgcggcttaagggccttgttttctctctgccagttatctgtcagatcatgcctgtgatgatgtgacgttatgccacgacaatgcgttggattctagtcatgagccagaaccatccccagctgactcatttgggaaactaggcacaagtgatcattctagagctttgattcctgttgcctcagcagcaatgctggctcctcggcctcctaaccgtaagtttaaaaggactgagcagcagctagctgcacaacgcagaattcgtcgacctttctcagttactgaagtagaagcactggtccaagccgttgagaaactcggaaccggaaggtacaaaacaaagaaatagcactttctcttcttcatgttgctgacaaaatgtgtttgaaaactacaggtggagagatgtgaaggttcgtgctttcgaggacgcagaccatcgtacctatgttgatctcaaggttagttagttttttaactaactcttaaccttaatatatacagtttggtattgagtctttgcctttgtaggataagtggaagacgctggtccacacggcaaggatatctccacaacagcggagaggagagccggtgccacaggaacttctggaccgtgttttgaaggcacacgcttactggtcacaacacctaatgcatcaactgcagactgagccaccatccactcaggtagaggctctctaatctgaacaggttcttggtctaaagaacctttgtgtattattatgatgatccatattgtaagattctgacatagttgaagatctggtctcagttcttctttgtttttttttttctttctttcaaatgtaaagttttataattggaaataaggttgggttttttctaacaatgtaaaggatttgttgtaaatctttggtgacatttttattctgtctatatgatttatggctcggcctatcatatcacaacgacaacgaactgatatatatatacctcatccaaactctaggagtgctggagaattcaattgttggataaattgttactcaagctggtctatgtttggtcagtttatggttcacatgtgtcctatattaggaaagaatacacagaagcttgtgcttgtgagtggtatgtgtgctatggtatttaccttaaatacgggtcgttcagagtaataagctggtctcaaagcctcttttaaaggctatagccacaaacaaaggcacaaaatcctggatctctaaccagtaaagaagtcgatgttgaactaaagttcgcaaatatttgcagatagcattgagtaggcaagctcttcccacttttttttttttttttttcactgaactgttgcctttcattgaatattggagtttgtgaaaaaatttaaagcaattagcaataaaatcaaaaggatattgaagtttacatttggacctggacgagataatagaggataacgttcaatttattagaagttatgatgactgatatatttaccgatttaaaactaatatatttagcaacttgacgcagcaagaaaattatgattcttaactaatatacaccatattatatatatttagaagatttaattaatatttaaaattatgctttttatttgattttgttttaaatcgtcatataatacataaaataaaatcaaaaaacaatttttttttatacatatattgtgatttttaattttaaacacggacacgtattacccaattgacaaaataatgtgtatgtttaatgttccacattgactaaaatatttagacaatgattcagaatcatatcatataatgaatatttacaataataaaataactgggtttttgttggaatgggttttgcggaacggatttttgaatctacattaataacaaattaaaatatcattaatctgccgtttcaatacatattaaatcttttttttaacaccactaatattatacatatcaaatcagtctgatttaaaaaaatatatataaaaccaaaatgtctcatggtataatgttactatataaaaattgtaaattataaaatattaatgtcttagagaattgtataattttcaaacttttatatataataaataatcattaaattttaaaaatcactacttaaaaaaaaaaaaaaaatcaagggacaggttatacaattaagatttacatcttgttttttttttggaattttggtgatgtggtaacagactactaaatagtttacgcgtattatatgcaaaataaattatcaaacaaatatattgtagtaaattataaaatttactatattattatttaaaaactgaaatttgcttgtgtcttgtagaaaaaaaaactgaaccaaaacaaacttaatttacttcgaagttttatatttcgttatacaaaaagaaaaagtctaaatttctaaatacatttagaaaatatattcaaggtaataactaataagtcaaatatttgaccagacaagtgaccaaaaggaagacaacaacaagaaaacaaatagctttttagccatttggacccacgacagtagataaagtcttggacatattattactaaccttttgtggcggcttagtgtttatcttcaaccccacacattctctgtttcctcgaaacttcatttttcttctttgccaagacaaagattaaataagacaaatatcaaccctatcctttgtttatatcaacaacatctcgcaacttgtgttcacatgaaacttctcactactctctttcatttcctcttttcgttgacttactaaagtactcttgtttcaatcttcattctagagagattctgtttcatggatgctattttgccagtacccgttgatgggttcagattcgacaccggttctggatcttgttgcaaaccgaggaacaatcttgaatctgggacgaccaatcgtttcacttgtttcaacgaatctgaatctcagagcaacccttctccgaccgagtctaaggtatgttcagattaccttcctgtctttaagtacatcaatgacatgttgatggaagaagatcttgaaggtcagtcttgtatgttggaagacagtttggctttacaagccgcagagagatctttcttcgaagtgcttcaagatcaaactccaatctcgggtgatctagaggatggttctcttggaaacttcagttctataacgagtttgcatcaacctgaagtttcagaggagtcaaccagaaggtatcgacatagggatgatgatgaagatgatgatcttgagagtggaaggaaatcgaagctccctgcgatttctacggtggatgagttagcagagaagtttgaggaagtgttgttggtatgtcaaaagaatgatcagggagaagcaacagagaagaaaacaagacacgtaaaaggctcatcgaatcgatacaagcagcaaaagtcagatcagccagtagatatgaggaatcttttgatgcaatgcgcgcaagctgtggcgagttttgaccagagaagagcttttgagaaactgaaggagataagagaacactcttctcgccacggtgatgcgactcaaagacttggttatcactttgctgaggcgcttgaagctcgtattacaggaaccatgactacaccaatatctgctacttctagcagaacatcaatggtggacattttgaaggcgtacaagggatttgttcaggcttgccccaccttaataatgtgttatttcactgcaaacagaacaatcaatgagcttgcttccaaagcaaccacacttcacatcattgattttgggattctctatggatttcaatggccttgtctgatacaagctttgtcaaaacgtgacatcggaccaccactgctccgtgtgactggtatcgagcttcctcagtcaggtttccgtccatcagagcgggtagaagagaccgggcgaagactaaagaggttctgtgacaagttcaatgtcccgtttgagtacagtttcatagccaagaattgggagaacataactcttgatgatctggtgatcaatagtggcgagacaacagttgtcaactgcatcctccggctacaatatacacctgatgaaaccgtgtccctcaactcaccgagagacacggctctgaaactattcagagacatcaaccctgacctctttgtgtttgcagagattaacgggacttacaattcacccttcttcctaacaaggttcagagaagctctcttccattgctcgtcactctttgacatgtatgagaccacattatcagaagacgacaattgcaggacactggtggagagggaactaatcataagagatgcaatgagtgtgatagcctgtgaagggtctgagcggtttgcaaggccagagacctacaagcaatggcaggttaggattctaagagcaggatttagaccagcgaaactaagcaaacagatagtaaaggacgggaaagagatagtgaaagaacgttaccacaaagattttgtgatcgacaatgataaccactggatgtttcagggctggaaaggaagagtcctttatgctgtttcttgctggaaacctgctaagaagtaataaaacagttctgtaatcatttgcataattttgctagctttccatttctttgtttttggtttcaaagtgttgtagaaactgtttgctctcatatatattgaatgagtctctctctttctctctactttcttgcaagtacatatggcaaaccaagaattcaaaacttatttcaaaaagatccataactttgaactgaacaaaccagtttgcatatcaatgtgtctgatgataatacagatgttgtacgaagataaaaattcacaatataaacagagagactagacaaactaaaaagagtattaaagaacaagaaagtgattacttggaaactttcttcttccctgtaatggcaattttcttgcctttaagggtccttggatgcgccttaccccacggtaaccttgtacaatgtgttttcgtcagactaaggtctattctttttgtctggtcgaggacccaaaagattaagatcaatggtggctccataagtctcagctgatttaacaaccgcatcatatggcttagaagagagtttaagcccttcgttttgagccttcacatgtaactcataagcaagccttggctttgcatcatttgcaagagcctcaatcaacatctcgtaagttatctcgttaggctcaacattctcacttttcattctatgaaaccactcataagccacaccacttaacccgttcctcgcgcaaccacttataaccgcgttgaaagtcacaacgctcggttcaataccctttgaagccatttccttgagaagggtatccaaaagattgaacttttgctgtcctgtcaaaactgaagccattgttgtgtacgcgtaaagatttggctcaatccctaccttaatcatatggttccaaacccgaaacgcctcatcatatagcttccctttctcaagagcactgagtagtgcaccgtatgagatgaccgttggcttttcaccattgtcaaccattgctttaaagatttggatcgcagctgtggtctcagaggcttttgaacatgctacaagaaccgcgttccaatgtctcctctgcggtttcaatcctttatcttccattttgttaagtaacctaactccccatctccatatccctctcttgctagctgcactcagcaagatattgaaatgagagaccactaactcataagacaaattgttaggttcaggtccttcgtcaagaagatcctcgtagatctccaacgctgcccaccatttcttagccttacccatcagccaaatcaaatggttgcaaacagacagacttatctcagaaaacctctctctgattcttttatacaactctttaccaacaatataatgctcttcacgagtacatgcccatataagcctctcgtgctcttccctactcggtctaacccctgcactgtccattgcattcaaaagcttcaacactctagtagtccaattatcatctttcaccaaccaccgcctcatcacttggtagcatattctaccaataaagttctcaagcttaacaaactcaaattcccaatcgtaaccaacatcattccctatttccctctttgcgtatttctctctcaattcaacaaagaactctaaagctcccataccgtcttccattcttctgtaaacaagcaaagccgttgaatatgtaatcgggttaggctcaaaacccttttccttggttaaatcaagaatcccaagagccttgagaaactcaccttcctccatgtaaataaccatcaaagtattgtaagtaacaatgtttggaacaatcccttcttcctccatatctttcagtatcttctctgcttccccaaaccctctcatagcacccaaaaggctgttatatataaaaagatttggacctatgacaccgcctgattcactcttcttcctcttaagccaatctactacagctaccgcaggcttcaatctcttgtccttgccaaaaccctttatcatagcacaaaagacttgcagaggcaactctcccttgtccttgagaacagcatccacatcatcagctgtcttagcagctcgtaaactaaacgctaattctctaacatcaactcttaaattgttcttttctcctccatttgctgaacttaaatcttccgtggaaacttcttcttccccgagctcgagctctcgttgctcagtggcccatcctaccccaaacgatgatcccaacaaacttctctttggctcacacaaaaacagaactttcctgttactcgaaacgaagatgaagctagagatactactactactaccgaagcaagcctgttcaagaaagcaaagtctctttctagtagtcttagggctaactacaaaacaagaacaatccaactcaaattccaatcttgatccaactaaaagaccagactttaatggcaaaatgcttaaagcttgcatctttttccaaacacaatctcacaactagcgttatgtagcatggaagcgtcaaaagacacacgatttcacgcttcaaaagcgcaacggaagcactctcttccaattttgcaaaatcagaagcgcaaagttctttcagaaactgaagcgtaaagatctcttacaaattaatattgaacaaaaacgaaaattgaggagggcttgaaaataacttcaatggcggattcagagccgcgaagaagaagatagaatttttgtcttcttttctttatgtgaaaactgaaaataaaatactattgggcttatgggcctcaattaagcatgagatttaaaaagccttttctacaaattaaaaaattgctaaattaattgttttttagaaatgaaaaatgtaattaaaatccccaacttattgaaaaagttgatttggatctttaactctcgatgaaacgaaataaatatcaaacttctatttttcaaaaataacaaactttcgttggttaaataggttaacatatcccgttaacgaagttaattttttgtcaatatacatgttaactgaaaacgacattgttttctataataacaaaatgacgtctttttgtcgtaacggatgaacgaaatccttaaattcaatcttatatctctaaatcgagcaaaatccatgatcctaaattttcatataatttgacactcgggattttattgaacaattacgacaaaacgatgttgtttattgtgagaggaaatgctatcgttttcaattcacaggtctgttaaaagaaaattaactttgttaacatgctctgttaacttacttaacatcatgtctcaaatttgaataaacgttgagatattaaaaaatcttcaataatataggaaaagaaaactatctctggtcgtgcatcgtgtgcaaagtagtccattctctttagtttttctttttgggttttccaatatatatctttaactaaaacagaaattgtaatacttttcgtaaaactaagttttcatatagttgaatggacagtgataggtgtactaagatgaatgtgagtagtgggaactgagaagtcttcataggccatgtcttgtaagaactcacatgctcacatgtggatatgaaattggtccaaagtgttttttttttctttcataaaacattaaatgttctttaggtatttgtcattggtcccaaaatttattgtctctttatatacatgtctttgatccaactaaattattgttagatgaccattgaccacattgttcatatggatccttcgtattttccccctgtttagcatgttccttttccatcttgtccttggacaatctcaaagtagaaggaagaaacatagtgatatgtcaaaaagagtaatttcaatgtaaagagaagtaattgtatttaatatcttcaaatcacaatgaacaaaagttttagatgcaataaatatcaatttaatctgtctatatatggttcaaatattcaaacaacaacaatcaatattttttatgttcatgatccaaataacacttagggttggtaaaatttcaaacataaattaatagacatgtatatcaaaaaagttttaaccgattggtaaaaagatgacttatgtcaaagtattaaaaaaattcaatttttattacaaatttcaatttttttttacgtacaatatatatatatatatatatatatatatgatgcaactaatatattcttctatatatcaatgtaaagagaaatataattgtattttatatcatcaaagatcacaacaatcttcatgtagtctagttttttaaacaaaagttttggatgctatagatataaagcacatcagaaacaagctctcctcaatccaagcaagcggagaccggcgttacgacaattgctttcaaatttggtttgcatcaaggagctagaggcggaagagtctgaagtttctttctaaattttaaaattttcaaacatttctatacaaacattgcacattgtgtaaaaacgatttttctttgaatttctaatttaacattaccaatttttttaaaactaaagttatatggattgcctgattttcagccttgttcccctcccccccccccccaaacttttctgctctgaaaatttcaccatcaacttacatttttcttaaaattcgtataatcattatcgtcgtttccctcatccccgctacaacttcctccgtcgacattgctctcactctctggaacggtgaaatcaggatcatccaaatcgctctgatacagtaactcactaacctgcatatctttatttgaattctcaaaccagtaagacataatttgaactcgaacacaaatttctctcaagaaccctagttctcaaaatccccaaatcgcgaatccattgagttaaattagaagaagaatgaaacgacgtggttttgcctttgggctgttttgattcaggcccaaatcgattttgattcggttaagcccaaatcaattgcaggacaaatacgacgtcgttttggtaatgggttgctgagtgattatatgggcaatcttaaacgtggttgcctaaacgcgattatatggttaagtatggtttaatcaccgatttaattggaggcgtagttgtaggaatgaatccaaaagtacatgtaggaattttatgaaaaatgtaagttgatggtgaattttcagagcaaaaaagtttgggagaaattttgagaatgcaataagtgtttgactgaaaaatcaggcaacctatagtatatttgttcaagtgaaaagtaatatagaagaatataatagttgttggagaacaaaactcactagtaataattaaagaaattaatttaaggctatatttgatcgtttttgttgttagtttagagggattgcaaagttgctaatataatttaatcgaatcttcacatatcatgttacattcatcactaaccgacagatttgctagaaagtaattaagactcgcatggacagacacacagacagtgaaaaataacatttatagatgcggtcaaagttatacgctcgttgactgccaatagttttatagtacgaattttccttttgttgttggaatcttcttaacaaaatttataggtagattaatctcaatgatactatcatctatgccaatataaaattgcttcataatccagaagatatcataaatgttactactacacccaattataagatcactagctctcaaaagattatgtcacgactactttctagtatcgtcatgtatgtaatttctaaataatatgctaataaatatatatagttcgttcacccaatggctcaaatcaacaaaatgattcaaacatggatttttcttagattcgattcccatgcaaccacatttatgcagcatccatgcaaacgatgtagccatgtagaccctattttatatacttacatatatgtatatataatcgacacgtaaacgcaattttgttataaactatctctctcactcttctctctctccacgcacaatatacacaaatatataaacacatttggatcaatagaaggaatcacattgttgattcatggatgttgaaaagctatggaatcatacaaagaaagattccatctttcaaactactcatttctcttcttcttcaaaaccttttttcacaagaagcttctcaacaaaaacttcatcttctccatcatccaaatcccatttcactagaagcttctcaacaaaaccttcgtcgtcttctagttcttcagatctcattttcagacggagtttctccgcaaagcctaaaacatcgaagtctttgcttttgtctagaagctgttccacgaaatcctcagctgatttatcttccaagtcttcttctctatctagaatcttgtcaaagaaaggagcttccgtgacgggaaaatgcttcaaagtagcgaaggagcataagtcccgcttctacataatcaaacgctgtgttttgatgctcgtttgctggcacaaacattcttgagattcattgcattggatccaaatatagaagagaatctttgtggaagcaaaaagaattattaaatttataactatgaaaagagtattccatttgcatttggttatattctttcgttaacccgtctttttcttctatcaatgaccgtatttggtataaacaaccatctctattgcgtattatttctgacttcatcttattattctgcattttttgaaaataatgaataaagttacaaaaatgaataattttgaagttttttttgcacaaaacactctcttaaactattggtaagtacacagttttgattcatagtattggaatgtaatcgaccttcttatcctaagtgtctgaatcttgaaaggaaaacttgaaatggcatttggcataaactaaactaaaggttgtttcactcttaggcgaagttttttttttttcaaaggctaagttagtacacaagtctagatattaagtagcataatttcatgacaatagttccatgctacttataatatagttggtgggaatttagtttaaatatttatacgtaagggaatcaatttgaaatctcacatataattatagaaaacaattttaattagaaagatagtagcaaataacatatgtttaaaaaattattttatttattactaaaatttgaaagatacatgcatgaactatcaacttatgactataattataagtctcgagaccgttttgattaattagtacaataaataacccttacacatctcgacactaacgtacgttgtacaaaaaccaaagaagaagaaacattccatgtaattgtttgaagtgtggccgtagatgaaataagcatcacgtggaggctgagccaaagaacgactcacaatcgattctatgaagtctcgaagtctactaatagttgatgaccttcgaaacgcataggaacctcaaaagagatttcaccggaagtctttttagtatttcaaccgtaacatggaggggtaattggatatctccacagtgaagaagtcgtagtgtcgacgatagtgaggtctcttcgtgtcctctcttcatcgcctctgttttatgaaaccctagagatcacttgtaaacttatatgtcacgtaagtggaaaattaggttgtctttctcgggcctacaaattagaaaagcccaagtttttgtaggcgatacgaaaagtcaacgctaatgattactttccttgttccaagaatatgggaacatgacccatgcccgtttctccactttcttcagtgtaggaacttaatagttccaagctttctccttcgtaaagtccaaaagaaaacagataaaggcagagaggcttttttcccactgaaactgttgttcttgtgctgagtttatgattttattggaaccgcattattccttggatgatttgaatataatttggataatccgttaaaatttagcttctgcaaaaacaaatctaagaagaattatcattaattttacatatctgattgtgttataataatcagtgttcaagaaagaaagagctagggactagtcgtcatgtatgtgatttaaggcgatttgtgtataaatatataatatataatacaatgtatattggtttttatatacataatataaaaggataaaagtttttaaagaatgtatattggtttacacaacgttttacatgtataatatagaaactcacacgacgttgtgatttatttactttgtggtgtgtgtttttttcctgctcgtttgttatgttgtatttgaggttgttgcgtttgagtgtattttgaaagtagtatgtattaggagtttatttgtttacctgacctttcattttctcattggcagataaatctcttcttgaagttatgtttctctgcataaaaaaccctctttcttgaaagcaaaacaatgctgttagcagtaaactatatataagcagagtaatcaggaccctaattgtctaactgaacacatggaacaatagataaaactagaaaaaattatgtgaagaaagaaacttacgacgaattcagaattctccagagtctactctaatgcgagattgattgttggctcgcattttttccttttagtcctgccatgaccaggataatgcagtattatgaaccaacaactgcagaataatgccaagtgttgtaagagattaaattaccttaaaaggaagtgccgagggaatatcaagtggtcgtctcgtgtccaaaaagcttctctaacagctaacatcttatctctaaaatctttagtattttaccttaaaaaataaagatcaaataagttcaaatatttcccaaacgttatataaaaatcagtgcataggttgtttactcggttttcatccaaacggagagattcataaacaccacaaacgttctgcatcaagaaacaaactcatgtcatttctttgatggtaatacactagtactggagaaaataagatgtcacgagaattatgtaacaaagtaccacacaataaattatacatattatagattgtgagtaataccagtaaacatctaacagagaacaagagagtataatcacctgacccttcatttttcgaggcaactgaattgcttcattgaatctagatttttcagcttaagaatcctatatcgtttgaccaaatacagaatcatatatcgtgatctaactcattatgttaccagtaaactatgagtaaagacaaaagaccaaggtacttactggaaatcttacttaaccagttaaccggatccaagcctatatgcttgtccaaagctgaaaaccaaaaaaattgtttatcttcatagtaatattgaaaaggtttacgaagtatgatggaaactagttattattgtgttaatttctcctttgcgaagtatgaatttataagcattttgtgtaaagcaaaagtaaggttctcgtttcttttcttggattttgaatcatcaccgaatttccattcacatgaacagaacgtaaaatttgacaaatcaaaacatatctacattgattacctgtttgtttttgtatgcaaagcacagttttccctcgtaggcgcttgaattcctctttcaaaataacataaaagtttacgaacttgttaaacaacatactgaacgtcaatatgactaacaatagttgtaagatactaaaatggaaagacaaggagacttcacaagatattgacttggcaacataatggcattgttcttgccaataaagaaagattgaattttttttttcctgtgtctagtattgtgttgaattttattattgtgttatgttgtgttgtgttcgagggtgctttgagtttatctgcgtgacgtgtttttttttgcatcgtgtttcagtttcacgtgtttatgtttgaattttgttgtctttcggtgtgttttgagtttaggtgattgcatgtatatgtattcgtaaagttgtgtgtttctagatagtttgaggaaccaaaacaagccaagccaccaaggctcatcaaatgcaaataacatgtagggaagaatacatgagaattgagtatatacacatgagaatagaggaaactttactttacctgacctctcatatgctcttgctgcaaaatcgtctctcatttgctcttggcaaggacctttgttctttacagaataaggatccactctctagaattcaaagcattttgttagcaaacattatgtgcagagcaaagcaggatcctaacacaacatacaaacaatatataaaaactacaaaatcaatgcaaagaaaatatatggtaagaatcttacagaggctgactggttttcatctcttgttctttaaatcttcacggaacatgctgtataacgaaaaacccgaatagaaaacataacccttcaagttagaaaatatcaagagaatgtcaactgttgtaagaggtgatgaaaaaatttaatcaccttagcactgaagaatatatttgttgtctcatatgcacgagactttccaagaagaagaatctgatccctgatttcgttagtattgtaccatggaaatcaagatctagtagagaaatgtgatatgccttattagttcttgcaagttaaaaaccattcaaacacgtcatacatttccaaacaacattgtatcagtgtgtgtaatttatatacctggcccttcttctttcgaggagactggatggctttcttaaagttggttcttttccgcttaagaatcgtctatctttgtacaaaaccattatgttagcagtctatacacaagaccataatttgtttacaaaaactctaaaaagggatgaagatagtttatctacctgatccttcgtttttacgaggcaattgaatcactttcctaagtttagctattttcatcttaagagttctccatcttgatacaaaaccattctaatagcagttactaagcatataagactataaataaaccacataaataatgctaattaagaaacttattggaatttattgagttggatccaagctgggattcgactgctttgctcttgttgtttctgttaatcttgacaaggaaacaatgtccacaaaacatgtttattacgtatgataaatattctttgtgaaataagtattaataagaaaatttgtatgaagaaacttcaccttgaaacttgtgtttttctttaagtttgaagtatcactaagtatcccttcacatgaaatcacatgatgaaacatatctaagtaaatatatttatttttgtatgacaccgtttgagcttgtgtggcttggatttcatttttagagtagcataactacttagattcaatgtgaccaaaaaaaaattaatagttgtaaaagactaaaaaagaaagagaaagaaattttccctgaaattgacatagcaacaaaatcccaaagtttttaactataaagaaaaatattgattgttttttttcgttcttttatgtgtctagttttgtgttgtgctgtattttatttcttgtgttatgtggagtttgagctttgtttcgtttgagtatgtttacaattttgtttgcgtgtgatgtgattttttttgtagagtttgagttttgtgtgtttatgtttgagtttatgttgtctttgggtgtgttttgagtttgagtgttttccgtgtttgtgaaagtgtgtgttttcagatattgtgagtaaccaaaacaaagccaagatagctatgcatgacacaattgacatgagaataaagtgagagatatctgacctcccacatgctttaccttcgaaatgttttgttctttggacctcaaagatatctccatgaagcagggcacaaaacccctcattttctcttggctactgaatcaaagtttcacctgaaagtacatcatacaaataggacaataaaatgaaaccacaaaatcactgccaagaaagaaaaaaacttggtaagagtcttacagatccaaaatctgactggttgctaatattttctacttttaatcttgacggataatgcgttaacgacgaatacaacagaaaaacataactatcaaagttagaaaaacaatctcattttaagaacacattaaggagactgcatcatcttaggaacacatataatttaaagagtgctttaaaacttacatcaatgtccccgtctccaaattgagatatgaattgccacttgattgctgaatcatatgaccacaagactgataagagcttgaaacattaacatgcaattattgaaacacgggatatcgagataaacaatgtatgtgatgccatagaatcttcttgtaagaatataacaattaaccattttttccgaatcaatctccacagagccaaaacgatacaataaaaaacattagtttgagtaaccctaacaagccaaggtatctcatcaaatgcaaataacctgtagggacgaattagtcaccttagcactgagaaaatatttggttgttcatgtgagaaagactctccaacagctagaatctgatccctgacttcgtttgtattgtacttggagatcgagatctaaaacagaaatatgatatgttttattagtttctacaagttatagatcacttaaacacatcaaacattttgagaaagaaacattataagtgtttatctacctgacccttcttctttaacggagactgaatggctttcttaagtttggttcgtttccgatcaagaatcttctatcttggtacaaaactattatattagcagtatacttaatacacaagaccatagaaaaactacaaagagtttgaaaagagacaaagatagtttttctacctgaccctcctttaaccgaggcgacgaaatcactttcccaattatttttcaccacaagagtcgtactccatcttgagacaacaccattcatatagcagttaataaatacatacgactactaaataaaactacaaaacagtgctaataaagaaacttgctggaaatcttactgactaatccagtgatcccactgtttggctcctactatttctgtttatcttgataaggacacaatgtccacaactgaaatgttgaacatgttgatatatgaaaaccagtttttacaacacgatttgtcttctgtgaagtatgtattaataagaaaatgtgtatgagaaaaaatcgagaaacttcaccttaaaactctagtgttttttccttcgattttgaatcatcacagagtatcccttcacaagaaatgacagtatgaaacatatgtaagtaaatgtattgattacctctttagttttgtatgcaggacactgttttcgcttgtactggcttgaatttcactttgagagcagcataaaaagtaattagattcaatgtgacaaaataattgatagttgtaaaagacaaagaaatgagaagagaacgatacttcacctgaaattgactaggcaactgaatctcaaacttcttaccaatacaaaaagatattgatcgtgaagttttgtttttttgtcccttttttggtgtctacttttgtggtgtgctgtattttgtttcttttgttatgttgtgtttgagtgtgtttagatttttgttacgtgagatgtgcttgtttgagttttgtgtgtatgtttgagttttgttttgtgtttgggtgtgttttgatttagagtgcattgtgatggagtaatttttcgtgtctgtgaaattgtgtgttttaagatagtgtgagtaacccaaacaaagcctagacaacttggctaatcaaatgcaaacaccctgttgagatgatcctgagaacctatgcatgatacaatagacatgagaataaatgaagcgatatctaacctctcatatgcacttggttacatattcaccttcgaaattttgttctcttgacctgaaaattaccagcaagaggccggaaacacgacccctcgtttgcctcttggctactaaaccaaaatttcacctgaaagtacaacacaaacaataaattgaaaccacaaatcaatgccaaaataaataaaaaaacactaggtagagtcttactgagccaaaatctgactgcatgctactttacagatcatgctttataatgaagaacccaactgaaaacataactcttcaagttagaaaaacaatctaactccagaggaatataaactgcaatatcgtaccttggaaatcgagatctatatgatatgtttttttagttgatatcacttaaacacgttagaaattagtagaaaacattgtatcaaagtgtgtttatctacctgacccttctttttacggagagattgaatagctttcttaaatttggttcttttccacttaagaatcgcctatcctggtacagaaccattatgttagcagtatacacaagaccattagaaaactacaaaaactctgaaaagagatgaaggtagtttatctacctgatatttcctttctccgaggcaactgaagtactttcctaagtttagttatattcagcttaagggtcgtccatcttgatacaaaatcattctaatagcagtaactatatacataagactgtaaaattaaatcacaaaataatgctaattaagaaacttacaaattctgatccaagcctgattcgacttctttgctcctgttgtttctgttaatcttgacaaaggaaacaatgtccacaactcaaatattgaacatgcttattaagtttgaataaaacaagtttttacgagtgcatttgtcctttgtgaagtatgtattgagtagaaatagataaacttcaccttataactctagcttttatcttgcattttgaatcatcaccgagcttccctgatatgtctgagtcatggaaagtaacataactaatatcaaaataaatttcgtatgcaggacaccgcttctgcttgtagtgggcctagtgtctttgatgagtttttcttttggaatagcatcaaagtaagaattgctaacaaaatatactaagcgtcaattgacttagcaactgaatctcaaagttcacctgaaattgacttagcaacagaaaatgattaatagtcgtaagataccaagaaaggaaagaaaataagaagagatacttcacatgaatttgacttagcaacaaaatctcaaagttcttagttaccaactgagaaaaaaagatgttaatcgtgaagttattgtttttttcttttggtgtctagttttttgttgtgctatatttaatttctagtgttatgttgtgtttgagtgtgtttagagttttgttgcgtgtaatgtgaattgtttttgtgttgcatttgagttttgtttgtgttatgtttgacttttgttgtctttgggtgtgctctgagtttgagtgcattgtgtttgttgtgtttgttatgtctgtgaacgtgtgtgtttctagatagtgtgagtaaccctaacaagtcaagacataatagatgaacttatgcatgacacaatagacatgaaattagagggagagatatctgacctctcatatgattttggctacaaaatcaccttcgaaatttttgttctctggacctcaaagatatctacatgaagaaggagacacaacccctcatttccttttgcttactgagccaaaaacttctcttgaaatactgcacctgaaagtacaacagtaaatgaaactacccaaataaatgccaggccttatagagccaaaatctaactgcttactaatataactatcaaagatagaaaaacaatctcactcatgagaacacattaagataatagaaagagactccaatacatcatctaggcaacaaattatactttaaaacagtgtttcaaaacttacattaatgttcccatctccaaattgagatatgaattgccacttgatagcctgaatcatatgaccacaagactaattagatctcggaaatcaaccattttaaacatgcaaataagaaacacaaattcacagattgttcttgcatgaatataacaatcaaccatttttttcctttttcaaaataaatcttcacgaattcacgaataaagacagtgatggactcataatgactccacaaccaaagaaagatccattagtccagattatgcgaatatgattgcttccttaaaatcccaaaacgatacaatcaaaatcatggactaaaagttggtttttaaatcgttggtttttttagccattcagactcatcaatttcaacaagtaagagagacatttagactctattcaactgtttcagaacattaaaagtctccgatcaccaaatttaaaacctatcgaacaagatagacattatcctaatagaaagatcccagaaccatcaaacctctaaattccaacagaaatcaacgaaagcaaattccaaatccaaaccctagattcccaaattaaccaagaagatagagagatcgaaacatttcgtaccttcttcgatttcgtaagactatcacacgatcaggattcaaaccaatagacaagtaataatccttgcattaatcatctgattatcatcgacccaaaatcaaaaccctttgatcccgatttgaatttgacccaacgaatcagagacgcaattcaattgatcggagaaaagaatcagaagaagatagaaaatgaaaatcgcttctccatgcgaatatgtaaaccctaacgcatttttctcaaagaggatttgaagaaatgaattttgaaatttcaactttcgctaaccgttacttgtggaaggggaagagttaacgttggcaaatagagtaagtgaggccagaactatttaaccggctcttttgaaacaatcagcatgttaatttacgattatgaccctgagttttcaaaatttgtttcccgcttttgagttagaatcacatacacgctagagtagtttaaacgtcgtgtaaaccaccaacccaaactaatcctttggactttagattaacaaaaacggaaactaaaaaactaaataattcattggagctaggtcgtgaaaacattacaacttgtggagtttttgattttagtagcaccaacaacacttggaggtatgtggtcgctgctccttgtcttattgatggtagaaataatctattatatttagatggatcactctattggttcaccaacgaggatatcacagaaacaaagatattatctttcgattttcacatagaaaagttttaaatcatctcaaaagctccgtttggccaagcaactcgtaagcatatcatcatgtgtaacctgaataatcgtctttgcgtatctcaaaagaagtggtcaagacaagagatatggacattagacaattctgacatgacatgggagaaaatatattcgtttgatctgccagtaacagttgattatcattcgttctatgatgatatctacccatgtgtcactctgatcatggttatgaagaataagaaatcattactgcttttggatacaaatgtcaatgatcacaatcttgctatattcgaccctgaaatgaaatcctacaatttatgtttcacacctggttattactcatatgcgctttcttgtaatcaaagcttgatgtcaactgaataaaaacagtacatttcgttttctaagtaattttttttatatatttggtctccatgacacttttttgtcctcaactttagtcgtaagcagaagcgaacccacgttatgggtggtgggggcaactgccaccaataaaatataaatagtttacgttttttaataagatatagtaagtaaagtagcagaattgtaagaaatgcccccactaaaagcaagagttatcgggtttaaagctatttagagacattttgcccccattaaatatttctgctgggtccgcccctgatcgtaaaccatatgtcagtctcataaggatttgctttgttgtgctgaagtaaatccgcaagcttttgttctctaacacaaaagaaagtcacatagtcatcattcccagcactaaactactattattctacaccactcgtctttacattaacgacctttacattgtccgtgctgcttctttagaactactaaccacacttgttctgttttgcatatgtgaaagttttttacatgtttgtgtgtccatacagaggaccgcatgtttacaacaacaacaaaaaaaaaaaaagaaaaaaacagaggaccgcatgttttaaagttcctttggtgaatggaggaaaaaacacgttactcaaaaagtaatacgataagtggtccggccatttctagctcctccattactccattcaagcatctagatctaacccctttggttacacatttacaatgaatcttcttagaaaatatctgacaccaaaacttggtgacttttttatcagttccgttcaatattatcgatttttttaggatcacccaaatgagtagagaggagaaccttgactttcaccattaagaaacattgtatttgtcataaaagaaatcaagatatgaagaccgtgtctataaagtctatccattcaattattttgtcataatattcaatgtaaagaataattcagatcatcaccaagtgatgtaagtagtgacgtatgcgagagtaatgccacaagaactcaatttcgttgtcctaattttatattccttttctcaagaaatctatgtatccacgtaactcaatatagctttcctgatattctttttgtatacttccatgaagtgacgaaatgttgttagtaaaatgatcttatagatcaaatcacaatgatcatcacccgatttggtcaaaaatcaatggctccgaatggagacgtgcagttcaactgcggataaagtgttgtgcggttcaaatagtaacaaaaatatatacatacatatatatgtaaagaatttcgttactatttgaatcgtactgcactgtacggttcggtcaccattcgaagcctatatcactaccaaaaatgaagatgaattcaaatctggcaattgaaaccatcaattttcacaatctctctctctttcactttctcagaatccattaaaaaggttttaagaataatgaatttgacattttttttctgtttcacataaatttgatgtaacaagagaggtaccaaataagttcatctaaataaatatatatacattgttgaatcaacaaacaaaaaaatctcacctagtttcatcagaaaaatcttctgatcaacgaagttgatcgattcataactctagtttcaccatcactatccaaatcaataacattcgaattcgaagagccacgacttggtctaactcttctcataaacgaaaccattccacgaacagctcttctcaatctaccaccattaccagaacgaccaccattcctactcatctccggtgtctcatgagctctaacccaagatatccttctcggtccttcattactaccaagtccaccaccatccatctccgtcaataccaccggcaatatcctctcaccttctctcactcccgcgttaaacctaccaacagcgaaaccaccaccaggtaatctccaaatcgtcatcccaacggcatgttcttcttcattactccgttggattggatctgaaggtaactcaaatctacacacaggacacgaattccgaatcgaaagccatggaacaatacaatcaccgtgaaatatgtgtttacacggcatctcacgaccttcgattccggcttcgaaaacctccgtacacacggcgcaattagcttctgctttcgtatgacaatctgagatttcgactctaggtaaagattcaatcgctgatttcgacgccggtggattcccagatctaccgattccgttacctgacgcttcgatctgactcaattgttcaagtaaccgttcgaatccagatcccatcaagatctcagatacagaatcaggaagaggtcttagacctgaaccagatccatcatcgtaataaaactcataagctcgtcgttctctagtagctccgtcaccttcttcgttctcaactctctcaccggctcctcctcctcctccgccgtgtaagacgattaccggattaaaggacgtccggcgattagatctacgacgtctaattatagatctatgtgtttcctcaaccgatctaacttccggagtcgaagccggaatcgccgcgacggtggaattagaagaatcttcaatctcttcgatgaatccaccgttgcaataaggacataagactccagcgtttgcgtcttgatcttcccaaacgctgatgaatcgtgtacaactgtaacaccaatacgacgtcgttagagtcgttgttgttgttgttgttgtggtggttgattctgtcgtcggagttattgtcgccgatctagaatttggcatcatcttttgaaaataacttgtgttgctggtgaaaggatctgaagttgatgagagaaggaaaaaggagaaaaaagatttgtttatataatgtggttttttgtaggtgagtgttaacggtgttactttagacggtgagaacacgtgacagtgttttgagttttgactaggggagatgatgacggagttattaacggtggtctctttggagtgaagagcgtcattgacgtgtgcgagatatttgacccaaatgtgaaaactgttaccttcgaagaagtttcagaagaatcagcgtgggacctaccttcgtttctttctttgaaagttactaaacgtcgtcgttttgtggggtaagtatactttagttggagtacaaaataattttgtttgtttgtaaataatttgtttcacaaggtaaaagatccatttgaccccaaattagaaaagaaaaagaaggtaaaagatctatttgtattgatgtgaaatatataatataaatctttgaattttggaaatgatgtaaatgtgttcttgtatatgttgattatcaacatatgttgacatattttttagtttgtttaaggactaaatggttattggttcaactttaattttgtcaactaaatgcttgtagtttgttaaccaaaacatttgactttatgagttatatatatggagtcaattatgggttggaataaggtagattcttctcttatcctcatcgtttggaaacattacaaagcgtactggtttgggtttctttttgagattgttcattttgggctttgctctctgacagtttagactttggaaattctctagctacttcgaaagtttgaagtgacaatatttttacttgcaaaggatgttcgaagtttcagctaaaaagattttacaacatgcaaatattgtattccataactagaattactttcggtctcaaaaattgattgttctgcagtctgaaccaactactattttcctaactcattcaagtcttccaatagattgagcaatttataaattttgtacaacaaagcttcatagctgattgtgttatttcagctaaaaatttatgagaatttgctgtgatgatgagtgggacagttatacagatttttagctactagcacgcttaaaatgttcacgaataaacctctcagcgtgagacgggtacttatctcgaacataggctcgaagacacttttggtacgagaaatctatccatccaccatctgttctcacaacaaagaggcatcttgagtgcctgaattgtggatgccgatcaacctgccagtaacaaagtagcacactcataagtccatgcacataaagcaaatgaagatttatggatagagcatgtaagtaagtcatatatctatcatggtgattcgagaactatgcacaatacctcaagataatttctatatgagtagagcttaaagagagagatatcgggttagctcgaatttacgtaccattataaaatcaagaccacaaccaattttgtctttggaatatgggtgataaggaagaagcttttccatgacaattttctcatcctcaaaatctaagcgttctccatccaaatacctgcttaccaaaaaggaaaaaaaaaacagctcactagaactgcaaaaagtaatctacacaaagaaaacagcaagtatgctctgaagctagcttcaaatgtcaatagttcactagaaaaaagttgtaatttgcctaatgttcaagtaaactgaagatatatacaagagcatctctcactttctgcaatgaccactataatcctatcatccattgctaaaggatcctcaacaataagccaagaatatcatcatgtgtaatagtcacctcaaaaggccatatggtgtctctatgttgtttgattaagctactggaagaagctatgagcctataccttcaatactaatccaaacatggaacagctattgaagaacaatcagcaagaatttgaagaaattacctatcggaatgaagaatttctttagcgagaagagaaataggttcaatatctcgaagaatctcagcctctagattcttccatttccgataatcaggatcttcataacgccagctattatcaacaacaggcgatgtcacgttcatcgccgccgcgccggatccctccaccggagaaacagaatcattattctcgtaaaactgtggtctatcagcaagagaacacaacaaacgccgacggtgactgagaattccaccagctacgataccaacttgatgacgatggttgagaaatccgttgcggagaagcggaagcgttctgagaagaagtagcgaggtcatcgaccacaatcaaggagtaatatagacaataataacgaataaaaccctaatctgtactaatcactcgaagaagatgaaaaattggggaaatctcagagaatcagaaatttgagaagaagataacgtttcgtcagtttgtgaagttggggcatcgaacccgtgacgttgaagaagctaaacagagtaactaaacctctctgagcctttccacaataattattttcattttcttaaaagttaggtgccagccaatctgtgccgttagattgatctttatatgcttctataaatatctaaaacaacaatccaacggtggaaagatcacattgcgtgtcagtactgtagatactcatcaccgaatctttctcctcttttcactctccagctggccgaacccaccggttttgcccactttctctctaggcccgcaaacacaacttgctaagtcggtagtaatttactgaaaaaccctcacaaatagctgacttggctcttttcactccacgtggctccatcttacgtgcctagtttggtaatttcaatttcaatcacctagatcgtaactattgatacataatgtgaactgatgacgtgttgaaaagagattggttaggtcggtttgaaaagatatttagaagatctaaaatatctagctaactcgtccacgttggaattaaaatattgcgctttttcctggaaaagaaaaatataaaacaagtgataatcttctctttttcgaaattgtttcacttctgaaaaaaaaaaaaaaaaaaattgtttgctcatcatcttcacaaaccaaacttctcttcttctccgatctcagatttgaatttttatcgattttgagcttcgaagagctcaatctctaactgaatttcgagaaattagagagtttgaaatgggagaggaagtacaaatgagcgattacgatgtttccggcgacggagatagggtttctgaatgggagatgggattaccaagcgacgaagatctagcatctctttcttactctctgattccaccgaatttggcgatggcgtttagtatcacaccggagagaagccgtacgattcaggatgtgaatcgtgcatcggagacgacgctctcgtcgctacgtggtggatcttcaggtccaaatacctcgtcgtcgaataataacgtggaggaggaagatcgagttggatctagcagtcctggatcggattcgaagaagcaaaagacatcaaacggtgatggagatgacggtggcggtgtggatccggattcggcgatggcggcggaagaaggagattcaggaactgaagatctatctgggaaaacacttaaacgaccgcgtttagtgtggacaccgcagctacacaagagattcgttgacgttgtagctcacttagggatcaaaaacgctgttccgaagacgattatgcagctgatgaacgttgaaggattaactcgtgagaacgttgcgtctcatcttcaaaagtataggctttacctcaaaaggatgcagggattgactaatgaaggtccctctgcttcggataagctcttctcttcaacacctgttcctccacagagcttccaagatatcggtggcggtggcggtagcagcggtaatgttggagtgccgattccgggggcgtatggaacgcaacagatgatgcagatgccagtttatgcacatcatatgggtatgcaaggatatcatcatcaaaatcataatcatgatccttatcatcagaatcatcgtcatcatcatggagctggtggaaatggtgcgtttgagtcaaatccttatatgatgcagcagaataagtttggatccatggcttcttatccttctgttggaggtggaagcgcaaatgagaattaaaaagagtctatagatggattcaatgggggaggaagagataggtgagcttgttattgctcgtggaactgataattattgtcaagtttctgtttttttaagtacagtacagttataattcttactcgatttgatcgaaattttcatcaagtttctgtcttttactataaatggtatacaataaagtcttaataatcacttgtttggtgatgttgacagagttaatataatcaactaagttgaatttgattttgagattcttgtgctatgttgaaatgttattgagaattaagtatcaaaattgctctcatgtgacttgagacttaatgtaatccagatcatgtttgattcatcttcggaattatatggtggttttgaaaaccatgtgtttaattttctcttcgggactaggtaactaacactgtgagttatgtcaaatccaagagagcatatgtgtcatgtggctcgacattttcttgtgtactctttttgcagaagtgatagtgtcatgttattttggttttggtttcctcattgggaaagtcttgtgatgttttttgatctagacaagatattacctgtgcaagcttttaggtagaatgagcagtttctcttttatgtttgggttctgcatcttttgcaggtcttgatcatatttgattgttgttacaggttcttggtgtctacaaaatttcttatcttttgcggagttttccaccgcaaagtcccaaattgcatctgttcaggagaggatcatacaaagtatcatgtagaagctaaaccaagagaagactgcagacaaatttcatatactcatttttctatcttgtaagaggtaagtccctttgttttatttgtctgcagacttcttaaagtggtaatcaagagagtgaattgtttatttctgtgagagatggcgtcagacacaaactttattttaaaaatttataaaccaatcaaatgtttcagaagaagccattttaatacaatcaagtattcctcatatgatgaccttacgagtgattggagagccacataccaatgaacgtccaacaaaaggaagaaagtgacattttaacaaaagcaaaagtctttccaatgtttcttgctgacataggtttcagccacttagggttctactttgagatttagataataatttcaagaccttttcatctccaatatatgttcataattttcattaatatatgattgtttctctgcacatcatacattcagtgacaaccttatcttcagaccttgattatcttatttaatagtagcgagattcttctagaatagaaaagtacatagatttcttaacatccacacaagtaattgtcttcatagagtcatcatgaagtgttcaaactcctttagcgagttgtgtaaagaacctccacctctaacagaggctctcagctcctccttcaaagtgacggctctctttctcatttcctctccttcttcgaaaaccgttaacctcttcacagctctctcgaccgctcctctttctagatcaccctccacttgaatcccaattttccaaacacactccaagtaccttgcgttcacccgaaaatggcctgcaaatcaccggaactccttcgctgatcatgttttctagtatcgagttgcatcctttatggctccaaaacgcccctattgcaggatgagcaagtacttccttctgtggagcccttttcacaatgtagttgatacatatgttttctacttgtttatagggcggaagctactgttactaagaaacctgcttttcctccatttccaaaacctacaagaaaactaataagtagctctctaagctccgggcttatagattactctgcttctcatcttctttgaacgttttatatatataaatatcagattctcgcttgtggacactaattcatccgtataatgttttgttagctctctttgcgcacatgtgaagcatgtggtcgatggtgtacgcaagtagttacatctctttattttgttagagagagtagtaatcaaagacaaaagaaaagatgtttattgtgatgcaacaattctatattgagcaaactgccaagagtgatacaaaagaaaccacactttgcaaattttgcaacaattcaattaatattacatgaagttcaacatctttgctttgtcttcaagtaattgacaatatcttccaatgcgttgtatgaggcgcctccactactgacagaggctttgatcttctctttcagaacaagggctctctctcgcatccccgcaccttcgtcatccacgatcaacctcttcacagctctctcaacctctcctctatccactttaccttccacctgaaaccctattctccaaacactttctatatacattgcattcaacttttgctcgccatgaaagggcttgcaaatcattggaactccttctccaatgctctcgagtattgagttccatccacagtggctccagaagcctcccactgcaggatgtccaagtacttctatctgcggtgctcgtttcacaatgtatcctctttcagagaccattttattgacatcctctggcaatgactctattccgttagtgccaaggatagaacccgctcggataacccatagaaatggttggttgctattacacaacccccaagacatctccaaaacttccttggtttccatttgaccaagtgttcctatgcttatgtatatcactgactttggtttctgcttgttcagccattcaatgcagctcctgtcctcttcaagtaaactagaaggtgatgaatctgtcatgtgaagagggcctaatggatacacagaaattcctactttttgttccagccatgacagagacgagctctctagacagctcaccgtgttgatgataacagctgaagctgttcttttgttggctacttccctacagagctcaaaaaatcgatctagtggccccattcctgaagtcggtaggtctttgtatcgtaatggatacaaattttccaccaccttgtcttgcatatcaggatctgcaaagttgaaaaaaacaaataccaaggttaagttaaaagagtgatcatttcaagattggttattaagcttgttttggttaccttccatgtcaagcaagaacttgtctgcattgagttagctaattacacaacgtgaaacgtaatttgcagcactttgagtgctgaatatgacactaggaatgctgaactccttagctgcagctccacagaagtacatgtactcgtcgtaaatgatacatgcaatatcattgccttgttgtagcaacaactgacttatacagtccttgaagcttgcctcgcttgttttgttgagcgttatcatagactcgattcctccgagtttctcgaattcagactctggtaagctttcttttatggtgacaaactgaaaaccagggaagtgttgagaagaagagcttacttgattgaaatgtccctcaacaactgtaattgagaagcccttcgagttaagtactttcccaagttgcatcagtggagttacatgaccttgtgctggaattggaactaacactatccttctctttgcttccattttcttctccattgcttaatctctctctctttctctcctttcatctcgaaacatctcttattaacagacccaaaattattatttaaatcccatttctttgttttatgtgacatttggtagtaggaagaaagtgacagtaacttcaataaaaacgtgtttcttgtagctggtttgtttttttatctcacatatataagagttgggattatacttgtagtctccaaatataacaaatttcttcaaaagtggttttccaatcttggttattgcatcaaagtccaaagagttggtattgacttactatagatttccttcaaaagttgcaacacgtatgattctccatcttggtgaaattattgcatcaaagggttggtatacgatttaagaatcatagttttatgtacaacgtagtatcgttcattttcgcttgctaatgagaaatatatatggtcgagaagaaagtgacattaactcaaataacactcaaagaaaaacttgtttctctgtttgttttgtattggctcacataagagttggtaattttagctacattaggtaggttttgttttgagatttagataataattaatatgtgaagaggctttactttgtagtctccaaacacaaaagattcctgataagtggctacatgaatgattgttcttctccacgtagaaaatctagaagatatcatgctagtgtggttcttcagcaaaagaaaatgctagtgttgttgtttctgataccaattgttggatcggttacatatgaaagttaagtcagaatttgatattggtttgatggatcagttaaatcagagaacagcgatcaagttaatagagaaaatcatcgaatttgggactgtttatgtttattatatctttgtatacaaataaatattcctaagcaattgtgtttgtgactttgttcattagctaatgaacttttcaactgaatgaagagaaactgacatttccaattcgaaccggaagacacgcgctggttaatctaaactggaaatccgaagaaacggtttaataaaaaccgggacattcagttagagaaatctattgtattggtttttttctcttcgtcttcctccaagatccctcctttatcggttttcagctaaccagactcagatgcggcagtttgcggtggttttgtatcgtcgtagcaaaattaagccggagagaatctcagtcaaagactccgaaagagataaaagaggtaactttatagtttttgatgaagtcaaatcaatcaaagtcggagctaattttgaaatttctcggagttgcaacttcatgatcatacatatataacatgtaaattcatggattaattctcatgttgatgtatgtaagattcattttctgaaactaagtagtagaaatgtttctcattgtgacaatttgcatagtaattagagagaatctgcagtgtagctgtgtttaggttttgcggtaaagtattaatttttatagtttgttattctgcaggtgagtttttaagtgatgttcagataaactctatgcaaacaaacttggaatggttgaaaaaggaatcttgatgctttgtgtgttttagtagacacaactgtcttcatagagtccttatgaagtgtacaaactcttctagcgagttgtgtgaagagcctccacttttaacagaggctctaagttgctcttttaaactgaaagctctcttcctcatctcctctccttcttcgtcaaccattaacctcttcacagctctctcgaccactcctctgtctagctcaccctccacttgaatcccaattttccatacacactccaagtatctagcgttcaccttttgatcacccgaaaatggcctgcagatcattggaactccttggccgatgctttctagtgtcgagttccatccacaatggctccaaaaccctcctactgcaggatgagaaagtacttccttctgtggagcccatttcacaatgtaacctcggtccaaaaccatcttactaaactcttcaggcatggactctatccactcggaaccaggtattgaccctggtcggatcacccataagaagtgttggttgctagcagccaatcctgacgcgacttccattatctcgttgatttccattaaagctatgcttcccatgcttatgtatatcaccgagtttaccttttgtttgttcaaccattcgatgcagctcttgttctcttcaagcagacttgtaggagctgaggccaccatgtgaagagggcctataggatacactggaatttgtagctgttgttgttgcagaaaagacagagatgagctctctagacagctcgcagtgttgattatcaccgaggaagctgtccgtttgtcaactgtattcctatacacctccattatgctctctaatgatgcaaaccgtgaaactggaaagtctttatatctcaagggataaaactccggaactagctcttcttgttgtcctttagtttctgcaaaaaaggtcaaaaacaatgctgtttcaatcttatagccactcgcggaaaccacgaaacagagagttttagagtacctttcaagggagcttggacattgtttgcatatagtttgtcaaatacagagcggcaagcgaaagccgtggcacttgttgtgctgaaaatgatgtttggaagcttacactctttggctgcagcttcagcaaagtacatgaactcatcgtagatgacacatgagatctcattactttgttgcagcaccaactgacccaaacagtccttgaagctcaccttacactctttgttgagcttaaacagaaactgtattggtccgagattcttgaaatcagactctggtaagctttctggaatggtgacgaactgaaaatcatgagtgaagtcatctgaagggctaaagtaattgaacttagtctgaacaactgtgatcgagaaaccctttaagtgaagggttttggcaagttgcatcattggagatatatgtccttgtgctggaaatggaaccaacactacgcttctccttgcaggcttttcctccattcccaaaacctgcatgaactactaattaaaagtatcctgctcagcttcgtggttcgcggtttcgatcacttcggtaaccgatatataaagtatctgactctcgaacgttttgttggctctcttcgtcacaacatgtgaatcatgtggtggatggtgttacatttctttatcttgttagagagtggtaaccaaagaaaagcaaaaatgctattgtcttcttggttctcttgccgcatttcgcttcatgtcaaaagaggcttcaaacagaaaaaattgtctttttctggtgcagcaatctatattgagaaacgtgccaaaggagataaactcgtgtttgatttgaattgcatcatatttgcattacaaaatagaacacgtacactttactctctaagtttggcatgttccatacaattcaatgataggaatatcaggttctcacacttgtgtacattgattcattcatgttgcgttttgtccctaacagtttagttattgcgtggtgaaatgatggagttggatcttgtcacaatttcaaatgaatgaagaaactgacatttccattataccgattctgaaaatgataaacactaatttgttgtcactacaactttaacgtctctaacgagcatttcatcgaacaccatctactaaaaaaggcgatccttttgatcttgaccgttggtcatgatgaaaaccagacgacacgcacgcgctggttaatatgaaccgggagtctgagaagtggttttagaaaaaccgggacattcggttcaagaaatctcctcgtcttcctcctccaaaacaaaatgtcaaaatccctcctttatcggtttttacactaaccagacccacctgcgacaattttctgtggttttcgaccgtcgcagcaagaacgagccggagtgaatctccgtcaacgactccgccagaagtaaaagaggtaactttgtagtttttgatctttcttggaattggaacttcgtcatcatacatatataacatgtaaattcatgaattagtgcttaagttatatgtttatgtatgtaatatcccaaaggctctgtctttaaccaagagtcattgcatattcaatttgagttccatggttgcaggaactgtgttgtcgtctatcattgtacttagatttgatgttttcatataatgtaacaatgtgaacatgatgatattttgattctgtagtgaagatggaatcatggatttgagatatggataaaccaatttaccgcttagagattctggtcttcttctcattggtaagcacctggagctcctctgcaatttccatttgtttacttttgttcacaacaatgatcttttaactccacaattcagaaaaagagtgcatggcttgtaagcaagatgggaagacttaccgtaggagtgtagtatgagccggtatgtgaattagtacattgtttaatttacattagttagatcttactctaaacattatgtggttgggagaaagtgagcatcaaaaatgaccatttgaaattttctgttacagcaaagatactgtaaagtacagagatttttcgagaggagattcctcactatcttctgcaatggcatggcaaagttctggcaagttgtgattcggggaagatggttgatttggcaacagatttcaaagcatattaaagaagtgagttgatccatttcttttgttcttttatgtttatatatcttattagtttctagagttagacaagacgttatggtcatttttctggtaatgagatttatggtgattcaagttgttgatgttagcgaacacaatgaaatggctttgttcattcatttatccaaatacatcttggcatcacttagatattttaggatatgatactttctctaaaaacaacttggaatagttgaaagaggaatcttgaagttttggtgttttagtaaagacaaaagtcttcatagagtcctcatgtagtgtacaaactcctctagcgagttgtgtgaagaacctccacttataacagaggctctaagttgctctttcaaactgatagctctcttcctcatcccctccccttcttcctccaccattaacctcctcacagctctctcgaccgctcctctgtctagatcaccctcaacttgaatcccaattttccatacacactccaagtatctcgcattcaccatttgatcactggaaaacggcttgcaaatcattggaactccttccccgatgctctctagtgtcgagttccatccgcaatggctccaaaatcctcctactgcaggatgagaaagtacttccttctgtggagcccatttcacaatgtaacctcgacccgaaattatcttactaaactccttaggcaagttctctatccattccgaaccacgtactgaccctggccgaatgacccacaagaactgttgcttgctactatccaatcccaaagcagtttctatcacctcattgatttccatcaaagctaagcttcccaagcttacgaatatcacagagtttttcttttgtttgttcaaccattcaatacagctcttgttctcttcaagaagactcgtagaagctgatgccaccaggtgaagagggcctataggataaactggaatttgtagctgttgctgcagacgagacagagatgagctctctagacagctcgctgtgttgattatcaccgaggaagctgtccgtttgtcaactgtattcctatacagctccatcatgctttctaatgatgcccaatgtgaaaccggaaagtctttgcatctcaggggatgaaactctggcactagctcgttttgttgtcctttgggttctgcaaaaaggtcaagaaccatgctgttacagattatagaaaccagcaagaatagaagacagagaattcaagagtacctttcaagggagtcaggatactgtttgcataaagtttgtcgaatgcagagcggcaaacaaaagccgtggcacttgtggtgctgaaaatgacgtttggaagcttaaactctttggctgcagcttcagcaaagtacatgaactcgtcgtagacaacacaggctatctcattaccttgttgcagcaacaactgacccaaacagtctttgaagctcacctgacactctttgttgagcttatgcagaaactctattggcccgagatcctcaaaatcagactctggtaagctttctggaatggtgacaaactgaaaatcagtgaagtcatctgaagggctaaagtaattgaactttgtctgagcgattgtgattgagaaacccttcaagtgaagtgtttttgcaagttgcattattggagagatatgtccttgagctggaactgcaaccaacactactcttctgcccgccggcttttcctccatttcgaaaatttacaagaactgctctgcctcgtgctttccgaatttggtcctccaatttcttttcttccctgtgaccgatctatgagaatattaaaatgagtatgtttctgagataaatatcagattctcagacttgtggacattgtttcatctgtatttcgtttttcttggctctctttacttattgacattggtatatctctctatcttgataaccaaaaaaaaaaaagcaaagatggttttgtcttcttggttcttttgccgactttggcttcatatcaaaagatggtccataccaaaaaaattgtctttttctgctgcatcaattctatcctgagtaaaatgccaaaagagataatcgtatttgattttgattttcataaaccaaacacctactctgtaaatcaggtcagtataattatacatagcacaatttattagtctgttagtgagtttctaagggatgttcaaatagcaatcagtagatgcaaacctctatcttctttatattcaaagatttagtataactcatttttaagaagcaataatctttccaacaaatgcttaggaagagcatttgagaagtaagaatgaataccatctgctgtattgctgtgttattattctctgctatatgtttgtcaacatttgagacttaattctgtatttataccgtatttttatgttcaaatagcaatagcacatgcaacctttggatatatcttctttatactcatagattcctttgctatttagatcgtgctctcataaagcgcgagaaatttgtgtttgtgaatccttttgctaaaactgtatttcggtgttgacaggggatttcttcaaacatattcaagaactgggaagcttgtgcctctacactatgaaagcctctacactatgaaaggcaaagagtctttgggaggagttagtggtaagcctcgaaattctaatctttttaaaattttcctttggcatgatgctccaaacgggtctataaattataaaatcgaacattgtaaactttgtagggtcaataaaaatcaatgttcttttatgatacatgaagttcattatgttcttttaagaactgctacatgaggttaacgatctcctccaatgcgttgtatgaggagcctccatttcttacagaggctttgagattctcttttaaaacaagggctctctctctcatgtctgcaccttcttcatccactatcaacctcttcacagctctctcgacccctcccctctctaccttaccttgcacctgaaaccctattctccaaatactctctaaacacagtgcgtttaacttttgctcgccatgaaagggcctgcatatcattggaactccttccacaatgctttcaagcgttgagttccatccacagtggctccagaatcctcccactgcaggatgtccaagtacttctatctgtggtgcccatttcacaatataccctctttcggagaccatcttaatgacttcctctggcagtgactctatccattcggagcctgcgatagagccaggccgaatgacccataagaaaggctggttgctattaaataaaccccgagccatctctaacacttctttggtttccatttgaactacgctccccaagcttatgtaaacgactgacctcggtttttgcttgttcaaccattcaacgcagctcctgtcctcttccagtaaactagaagctgctgaaactgtaatgtgaagagggcctaatgcgtacaccggaatcccgagttcatgttgcagacgtttcagagacgagctctctagacatctcactgtgttgatgataacagcggaagctgttcttttgttgactatttccctacagagctcaaataatcgatctagtggcccaactcctgaagttggtaggtctttgtatcttaatggatgcaaattttccaccaacgtttcctgcacttcaggatctaaaaagccaaaacaaaatgacgtattagtgaaacgaatggtttcaagataggttattaagctggttttaggcaccttccatgtccaccaagaacttctcggcactgagttttcttaaaacgcaacgggaaacttgattagtagcactttgtgtgctgaatattacactaggaaggttgaactccttagctgcagctccacagaagtacatatactcgtcgtagatgatacatgctatatcattgccttgttgcagcaacgactgccttatacagtccttgaagcttgcctcactggttttgttgatctcgaataaaaactcgaccggtccgagtctctcgagcacagactctggcaagctctctgtatctggtatggttacaaattgaaaaccaggaaagttttgagatgagcttactttattgaactgtccttcaacaacagtaatagagaagcccttcatgtttagggctgtgccaagctgcatcattggagttacatgtctttgtgctggaaccggaactaacactatccttttcttctcttccattttctccattgcttaagctctatctctctatatatatattactctctcgactctcgtgttccttgtgtgacaactagtctttctgaatgaagtaataaagtggaaacactccaagaaaagtgtgtttctcttttgtctcatataagagttggtggttttaaccacgttgggtaggttttgtcttgaggctttttacttgtagtctccatatataataaattttcttcaaaagtttgggttgcatgttgaataatatttttggttgccactttgaccaaaaaacttaccaaaaatgtcacttgaccaaaagttttggttgccactttgaccaataaacttaccaataatgccataaatttttatttttttccaaactgtcataattttgaattaatgtggtttgaactgacaaaaatgctcctatactaaacaagtgggaaaatgatagacaaagttatctaaaaattgtagtctactaaacaattttgtagtctactaaagattttgaatcgacatttaaaaaaaaaaattgatactccctctgtttctatataaatgtagtttaagggtttttatttatttaataccatttaactaattatatttaattatatatttttttattggttgaattggttataataaatgatgtttttatataaaagaggtagattaaatgagatttttatgatttcttaatatgtgtgtaaaaatcttaaattacaactaatatgaaacagaggaagtattcaatttcgtgtccttcttcaaaacaacaaattcaaagacatatatccatacaaaattcatctctagtttgaatcacacaaattagaatattgtgaatttaatgtggaaagactgttttctagttttcataaaacacaaaaattgttcaagttttaaattttgataattatgaactttaacggaagacaaaaattaatattccaaagaatgtaaacatttctattggagttttcttataatcgaagttcttttgtaatatatgaagttaagcatcttcactctgtattcaagaacttgacaagctcatccagtgcgttgtatgaggagcctccacttcttaccgaggcattgagcttctcttttaaatcaagagccctctccctcatggctgcaccttcttcatctatgatcaacctcttcacagctctctctacaccttccctttccacttcaccttcaagttgaatccctattttccaaacactttctatatacatcgcatttaacttttgttcgccttgtaaaggcctgcaaatcattgggactccttccacaatactctcgagtgttgagttccatccacagtggctccagaatcctcccactgcaggatgtccaagtacttctatctgcggtgcccatttcgctatgtatcctctttctgttaccatcttaatgacttcctctggtaataactctatccactcgaagcctgcaacagagccaggtcggatgacccataagaaaggttggttgctattcaacaatccccaggccatctctaacatctccttggtctccatgtgagctttggttcccaagcttatgtatatgactgaccttggtttctgcttgttcagccattcaatgcagctcatgtcctcttgcagtaaactaggtcccggcgatgaagctgtaatgtgaagagggcctaatggatacactggaattccaagttcttgttgcagccatgacagagacaagctctctagacagctcgccgtgttgatgataacagcggaagctgttcttttgttaactacttccctacacatctccaaaagtggctctaatggtccaaatcctgaagttggtaggtctttgtaccttaaaggatgcaaaccttccaacaccttatcttgcttttcaggatctgcaaagtaagaaaacaaaaattatgtaatgagtgaaccgactgctttcgaaatgggtcattaagctattttgggaacctttcatgtcgatcaagaacttctcggcactgagttcacttaaaacacagtagcaaacttgaattgtagcactgctagtgctgaagataacactaggaatcttaaactccttagctgctgcttcacagaagtacataagcttgtcatagatgatacatgctatatcattgccttgttgcatcgataactgacttatacactccttgaagcttgcctcgcttgttttgttgagattcataagatactcagctggtcctagtttcttagattcagactgaggtaagctttctggtatggtgacaaagtcaaaaccaggaaagtgttgcaatgatgagcctatttgattgaactgtctctgagcaacagtaattaagaagccctttgattgaagggctttcccaagctgcatcattggggttacatgtccttgtgcagcaaccggaactaacacaatccttctcttctctacccttttctccatttctctcctcttttctcttctcttgtctctgaatcctatacgtgatccaagtaataactaaaatcccacaatcttccaaatgagaccattttctatagtcaactgttcatttttcaaagcaagaataatcgcacgccaatgactattcaacataatcttctaaaagagattttaaatgccaacaagtcaactactttagctgttaagataaaggttgacacatcaattacgtggtaatgaagataaagtcacaagctacatcaacaactctcaaaccattacgtattttctctttgtatgagaattaaagtgaaagctttttatttgcatagcaaagcatctacttttgtaatttttgcaagaacaagcttgatctataaaaatcaaagctggtctattacttatgtttttatatgttacatgaagttcatttgatttattctgtctttagcaaagtttagcaccgtgttttcactcagactccacttcttacggaggctttcaatttctctttgacaaaatttacctatcactcataagtcatacctgcatcttcatcatccatgattattggttagtataacatcattgctgaacaactctaaataagtgatctaaattattattaaaaatctgttgactaaaaagtatttttttggttaaaatcccatttatatttactgagagtatgacattaattccaagaaaaacttgttttattttgttttgtctcatatagatagatataggagttggtggttttgagcaccattgggtaggttttgtcttgagatttagataataataacaaaaatgctaagaggttttactttctagtctccaaatataataaaattttctcaaaagtggctaaatgcatggttctccaatcttggtttcaattattgcatcaaagggttgctataccattttaagtattcttcatatatcttttgaaagcaataactttcaacgaaggaagaagctaacattttcgaaagagtaaacgcatattttggtcaatatagaatttttgtgatgatctatacataattgggaatgttaaatacgaattagaacaatgacgttccttgaatttgaaaagcttggatctttcctctggttccaataacttttttatttgcgcatagaaaatcatctactttgaaaaatatgcatcattaactctttaaaaaaaccatttaacaaaaaaatcattgcattctaattcttcactctgtcttcaagtgcttgacaagctcatctaatgcattgcatgaggagcctccacctctaatagaggctttgagcttctcttttaaaacaagggttctctccctcatgcttgcaccttctttatccacaatcaacctcttcacagctctctcgacggctcctctttccagttcacctcctacctgaatccctattctccatacactctctagatatattgcatttaacatctgctcgccttgataaggcctgcaaatcattggaactccttccacaatgctctcgagtgttgagttccatccacagtggctccaaaagcctcccactgagggatgtcctagtacttctatttgtggtgcccatttcacaatgtatcctttctctaaaaccatcttactgacttcctctggcaatgactctatcccctcggagcctgagacagatccaggtcggatgacccataagaaaggttggttgctattcaacattccccaagccatctctaacatctccttggtttccatgagaaccatgcttcctaaacttatgtatatgacagaccttggtttctgcttgttcagccattcaacgcagctcctatcctcttgcagcacagtaaatcctgtcgatgaatctgtaatgtgaagagggcctaatggatacaccggaatttggagttcttgttgcagccttgtgagagacgagctctctagacaggtcacggtgttgatgataacagcagaggctgttcttttgttgactacatctctacagagctccaaaaaaggttctagttctccaaatgttgcagttggtaagtctttgtatcttaatggatgcatattttccactaccttgttttgcacgtcatgctctgcaaagtcaaaacaaaattatgttgaacataaggagagtaagcataatgggtaataagctagtttttgtataccttccatgtcgatcaagtacttcttggcattaagtttgcttaaaacattgcagcaaactttatgtgtagcagtttgagtactgaagatgaaattgggaagcttcaactcctcagctacggctccacaaaaatacatgaactcgtcgtagatgatacatgcaatatcattgccttgttgtttcaacaactgccttatacagtccttgaagcttgcctccataattttgttgagctgtgttagagacccgactggtccatttgcctcgagttcagaatctggtatggtgataaattgaaaaccagggaacttctgcgaagagtttactcgatt

SEQ ID NO: 1063 - DNA, 140680 bp, Arabidopsis thaliana
gaattccatgggtcctggttactaaaaagtgattttgatgattctttgtggtctgcaccaccaacactagatgacaaggatgatggtaaattagcagcatcaggatttgatgataaggatgatggtaagtttgcagcatcaaatgtagattcaacaacgtcataagcgggattgctggactgcgcttccgctgaatcgaactgctgacctccaaccaatgattgtagatacaaaccaggattgcctaataagggagactgtgttggcacacatgattccttaggctgagattcatggcctggaagaactactcttgttagcctcttagctgaatcagtgtgatctatgtttggacttactggagactgaccagaggtgtcatgtaagaacatattcttccttgccatttgttgagaactggtacccataatatcttctttcccaattttgtcaactggtgagatgaaattctgacaattgctatatatttcaggagcatgtatgttaacattatccaccaatccacttagttctcggcattgtgcatatgctactgaagggtctacgggatgttgctgctgcctagttacttgaacttttatcggaacatctcttactatctcattgacaaaaggttcagtagtctcgacctgagcagtggcaagattggcgttatgtaaagtatctctttcttgatgatttgaatgattgaggaagctttgttgacccgtaaacttatccgtttgttggattctcatgatatcatctggacgagaagcatagaaagctgagctcacatatggcacatacattgtagaaccatcatttccctcccgcataatcggatcagaatgcatatgaggaaaagatgtctggcacatatgacaatcatttaccctttgaaaactttcagccatagttacttgttgatagaaacttccatcggggagaacaacatggttagatggtggaacttgagacccgccataaccatcaaatggtataccaggagaaatcgtaccttgatatgcagtgtttcttggctctgtaggaagcggtactaacttttgagcagcatgatagttccccaacagattttcttgggtttgcattaccgggttaatcaaaactggtgtggaactaatctgagaattcaagggagccattgacatgtgagcagcaggaaggaactggtgggatgagacacttaaaggactatcttgaaaaggttgttgggagaacaaagaagtactacttggcaaaagctggataggtgaatgaacaatatctggttgtcttaaagcttcttggcgagattcaacataggccggtggatgatgttcagatggtgtagtatacccctgttgttgctgctgcatcttaccaactattggtttctctgaaacagtctcaagctgaaaagaatgaggcggatcggcgtggacagtcattggcacaacataagcagaagagcgtggatcaggaggaacaagtcttgatacattactatgataagtctgaggtgaaaaattactcgaggtccaagtagttgcgacaaaatcactctgaccaacgcccaagctatcaacaacatccacgccactaaaatcagaattcggattagaactaccactagctacactttccttactcacaacaacaccattcacagcctctacatatctctgcccaatatcaactccatcaccatactccaatattccgaaagaatcatccacctcagacgaagaagcatcaaacaaaaaaactctcaacttccctgacccatcagaagatctctctaccaacttctcaaactcctccatcatattatcaatatcttcactagatgaaacagaaaccaaagcatcaagatcctcatcaggaagctgatacttaacaacaacagggtgaccataaacctgaatcatcttttgctcaaattcatcaaatctcacattctttttaacactaacgatccttgtttgaccaccaacgtaacgtaacatgccatcacttggtctagggattatctttccattgtagctacataaaaacttcaccttttccaattcttcatcatccatatcacttcttttattgcctaaatttggattgtttctattcgtagcatcaatacttacctgctcactcccaaacccagaaataattccatcagagacacgcttattactcaaatcagagctataatctaacccagaagctgaaagattggccggattagaaacaagattcgaacttgggctactgggttcatgtgccattgtttggagcagggagagggatagggtttatgattactcacctggtcagtatcgtggtcgtcgtattcgaggaagaaacgaagaatcctattttgtagagagaagaagaaaggagaggcaaagcgagtcgttggaactgatacaacgacgacgtttcattgggagtatcaaaacctcaatttggattttctctgtagtctttttagaatttttctaaaagggaaacacgtgagagatgggaagaggcacgtggtcgagcctcatgcaaaagaatggttgcgtttgttttccaaactgcgagagaatcgtgtgtgtaaatgctcccagttccaacactcgacatgttttttttgttttaggttattactgattattcttgaacttttagcaaaataatgaaacaattttgacttttataacacacaaaaaaagcaatacaatttcaaataataaatcgattaagagataaaaattgtgataatttggatattttaattagtttgtgcaatattcttttctcgttgatctctataaattagagaggcaaatgcgactgctaggagtagaaccttaccattggactacaaacgcttttgtgtttaagttgactattaaatttagatatctgattgtttaggatagtttaaaacgctaccgttttggaatctttatacgctaccgtgttattcttctttgaccaaaattctggagaatttgtcttcccttcgtatttctggcaacttttttaatactaaaattctctctaaagccgtcaaagaccaaaaaaaaaaaaaaaatacgaactcgaaatctctctcgtcttgttgttgcttaccattgaagctatcaatttctccgtttgatttctctcttctcaaaacctatttcgacggattattccgattcctgtttccccgaccttcacgcttcgtacttttgttttttgaaaaattcgtgtttcaggtacgttctcgatttctatttcgtttttttctgattcatcaatgaaacaaaatcgtttcttaatatacttgttgttctttgattcgattgatttttgttaggaagagcgcatgtgtagagttggtggtgtaattcagaaaactttccggagattttttggtgatgtgttgttcgtaggtaaattttgaaattttggatttaatggttgaggaagatagatggtgtttcttcaatggatctgtgaagacgagattgttggagattgatacttatcttattcgtctttatggctttgcttgattaagaaattgtgtgattgttttggggaggggtttaaacatggatggagaggttacttcttggattaggagagcaaatttctctcatactgtttgttatcgtatgattacgccgagtttagaatctatgccttttactgtaaaccaagagaagagttctggattgaaaagaatgactttgagttcaccatctgatttgaaatcacttgtaggaatttgtcagagtacgcagcagctgactggtttgagttgtggtagtgttgttggtactgaagtgcagaggaatccagttactaataagaagagatctgtttctccgttgcctcatatggctctttctgatgcttttatcgaagcaaagtctgatattaagaggttttctactccacatcctagaagagtggaaccagagaagggaatgaaggccaagtcgtcgtcccgcaaagattcttctgagaaaaaatcagttaatctacggtccctgtctcactcgggtcctattagggatcttagtacgcagaaagttaaagagaggggaaagagcaagatagataagaagtcttcaaagtctgttgactatagaggttctaaagtaagttctgcaggagtgcttgaagaatgcctcattgatgtgtctaagttgtcttatggggataggtttgctcacgggaaatatagccagatttatcatggtgaatatgaaggcaaagctgttgctctgaagattatcacagcgcctgaggatagtgacgacatattcttgggagctcgtttagaaaaagagtttatcgtggaagccactcttttatctcgactaagccatccaaatgtcgttaaggtgagtttatatcatgttatattatgttggttaggttgtatcaaatatgaatgatgcctttgaaaattaacattacatctttcaactctgtttgaaaattatgattatggtttgtttgacttttttcctctgattgatgtgtcctgaaacagtttgttggagtgaatactggaaactgtatcatcacagagtatgtacctcgagggtctttaagatcatatctgcacaagctcgagcagaaatcccttcctttggaacagctaatcgattttggtctggatattgctaaaggaatggaatatattcactcaagagagatagttcatcaggatctgaagccagaaaacgtgttgatcgacaatgactttcacttgaagattgctgactttggcatagcgtgcgaggaggagtactgtgatgttttgggggataacataggaacttataggtggatggcacctgaagttttaaaacggataccacatggacggaagtgcgatgtttatagttttggacttcttttatgggaaatggtagctggagcacttccatatgaggagatgaaatttgctgaacaaattgcctacgcagttatatacaaggtaaatcattctgcatctcctccttatttcatgattgtgatctagttatatacaaggtaaatcattctgcatctcctccttatttcatgattgtgatcttgcatagatctgactgagttagatcattattgttcagttgttattaaacatttcattgtttcgatattggccagaaaattaggccagttataccgacggattgtccagcggccatgaaagagctgatcgagcgatgttggtcatcgcaaacagacaagagaccggaattctggcagattgtcaaagtgttggaacatttcaagaagtctctaacaagcgaaggaaaacttaatcttttacctagccagatctgtccagaactaaagaaatgtcctaaattctggattcatatattcggatcattccaccaccacagcagcggtggcggcagcagcagcaacaactcagccttacctaagcctaaattcgcttgagacgtctagagtcactcatttttgtgcatagagaaaaagagccagtggtttatgttttagttataatcaactgtctctatttgctttgatttatttgctctctccattaaagagacctcttctttctgttttggcttggtttttgtgtaagtcatctcttctttcttttcttgtaattgattcattttgtagcccaacaaagaaaaaaaacagtgagagtttgtttgaatagtctaaagatgaagcaaagagatagtacaataataatgcccacaaactgttcgacgaaattaaaaaccaaaacacattcataaacgaagaagatgattatcacttagacaccagtagaaccaaaaccaccatcaccacgaacagtctcatccaaatcatcaacctcaacaacatcaggagtcacaatcttctcgataatcaactgcgcgattcgatcaccgaacttaacctcaaaatcagcatcagaatgattaaacaaaatcacaccaacaggtcctctataatcagcatcaatcacaccagcaccaacatcaatcgaatgtttccaagccaaaccagatctcggcgcaattctcgcgtaagttccttcgggaacagcgatacttagatccgttgggataagcgctttacctctcgctggaacttttgaatccaccgcacttgagagatcgtatccagcggagagtggtgagccgcgtgttggtataacagctttctcggagagtttcttcactttgaagaatggtgatggtgatgaatcgccatggattccgtttcggtcgagcttttggagtttaggtgatggttcgtttacgcaagccattgttgaaattgggaatcgaagttttgttaagagtctgtttgtggagttgcagagaaaccctaatttcaattgaggtcgaattgttgttgttgtgatgacgaagaagcgtcgtagttccgccattaaatggagtgtgtgtgagtgagtggcgccaatatttccctccaccctaaaaaaaacttctaaaattctaagttgggctttttaactatttcatgtagttctcggcccattagacccaaaattttattatagaagaataaatatggacatttaaattcttcactgatacaatttggcattttttgattctttgggatttgtattgtcttgttttctctgctaatttatgattctaaattctaaaaaatattcatccattctaaaactcgcaaattctgagcatatttaaatgggcttagccaattcatttaatcggcccattagcccaattcaagttcttcctcaatagcagaagaaaatggaatctttattgatcttagggtttatatgaatttatgattcttcctcttaaaccctaatttcgtattcttactccttcctcgccaatcttcatcttcctcatgttttctctaattctccatggaagaaagtctgtggaattacagaaatggcgtaatttaagagttacagtgagcattgtgcaaaatgcatttccttttaccaccaaatcgttctcttctacaatagctaaagattcgagtccaaagggaagtactttcacagtctcttatctcgttgaatcattgggtttgactaaaaaacttgcagaaacaatctcaaagaaagtcaccttcgaagacaaggtaaatccagattctgttctgaatcttcttagaagtaatgggtttaaagattctcagatatctaggatcataagggcttacccacgattgcttgtaacagatgctgagaaatctcttcgtccaaagcttcagtttttaaagtctagaggagcttcaagctctgaggtcatagagattgtttcgaatgttccaacaatcttggataagaaaggtgaagaatctgttagtttatactatgatttcgttaaggacattatgcaagatggtaaaagtttgtgtatttcttgtccagagggaaagaaaggtaacagaattcgaaatatatcggttttgagagaattgggagtacctcagaagttgttgttttcattgcttatatctagatatcaacctgtttgtggtaaagagaagtttgaagaaagtttaaagaaagttgttgatatgggttttgatccggctaaatccaagtttgtggaagctttgcatgtagtttacgaaatgagcgagaaaacgatagaagagaaagtgaatgtgtataagaggttaggctttagtgaagccgagatatgggcgattttcaagaagtggccttactttttaaaattctctgagaagaagataattctgatgtttgaaacactgaagaagtgtggtttggtagaggaagagattatttcggtgttgaagagtcgtccacaatgcatacgatcttctgagcagaagatattagactctattgaaatgttcttaggcttaggattcagtagagatgatttcaagatgatggttaagcgatatccttgttgcactgcatattctggcgagacgctgaggaagaagtttgaggttttggtgaagatgatgaattggccgctagaggctgtggtcatgatccctacggtacttggatacagcttggagaagaggatagtgccaaggtctaacgtgatcaaagctctcatgtcgaaaggattgatcggaagtgaaaaccctccgatttcatctgtcttggtatgtactgatcaggagttcttgaaaaggtatgtgatgaagcatgacaagctagtgcctaagttgatggctatcttcaacagaggtcgtgtttcatagttaatcttttaacgcgtgaatagaactgaggaagaggagtttttatttactagtgtctgttaatgtctaaactgaaatccatttctgtaatagtcgtaacgaaaaatttaactactatatttgtggacatgtttagtgatttgaatttcaagttaagtgagaagcgtctctggtcaaatgtatgaattgtgatcaaatcttacactccggtcacatacagactagccgcaaagacgatgtcacgttttatggcatttgaagctgcatccattttcttgtgtaacgccgagttccccataatggcagctgcgttcttgaattcacggcatgtctcatccaatctcacaatggttcgaactatcagaccttccgggacatctgtcagttcacatatctctgcaaatggagtcccctgcaaaaatcaagcatatatgatcaaaaagatgtctgaatcgtgaagtgttaagaaagattgctctctggttacaacaaacctttgcccactcatagacgacttcgaccagaccaaatttgagattctcctgagcatattcttcagggtctatttgtaaattgtactgagcttgaagttcaccaagtctgattgctgtatcatagagtctatgcaaaagaggatcaattattagattgatcaggtcagatcaattactgttagtaattatgagaagggacagagagtgatcgaaacaaacctttgtttagccttagccagcttaggagttagtgtaggcgctgaagtgtttttctgttggaagacaaaggcagacattatagccactgcttcttctggttctaattcttcgaattgattctcgaacagacacactgtgcaaatcaattcttccccagaattcatctcgcaagcgacacgacctttgatttggacgacgaggtcatcatctatacacccaatgttcttcagaacatcgatctgcaaaaaagagattagagctctacatgttactctaaattatcattcataaagagtaaacaaagatgcatgtggactttctcatttgaacgtacccggccctgaaaggcaggcatttgtaatagggcttcatcagacatttgaaattcaagatctttgagatccgtcttatgcttcttaatctccctagctaacttcatgtgctcttccaatttgacacaaccgtggcacttattcatggacatcttttgcaataggttggtccatttatagtatgtctccacaagctcagcatctttcagcttcaaatctgaaatagaaccatgaaatgaatatcagagggaaatgaacttaaagccggaaaaactaatacagagctataatttagttaattaaccttttactgggtctagagcaggaggaaatttgtttccgtctgatttcagatccagaagctgttgaaccgtctgagaaaaagctgccttgttcccatcctcgagtaggcgcacctgatcaatctttatcttgctatcgcatatgcacaaaaattctttgttatcaaaccctttaacctcgtaacctacaccagcagcaaccccatggtacgggagctctatctttattacaacgggacctttacgagagctcggctttgtataaaattcttcttcaaaaccacgttttgatttaggcgcaataaaataaccttgagaaggatctgaacttttcttgccaatgctgaccatatttttctccggtggcggtatttcagattttatcaccaaaacaacatattgtctgttagtgttggaaggtcccttcagaacgattccgagtaaattgtctatgccctgtaaaaattacacgcatgagcaaccaatttatgaaccagataaaagagtggtagagacagggtctcaccattccagatttcatgaccactactcttccttgtacaagaaaactctgggcataaggagactgcatgaccgcttccgacatcttgttgttatattcatttgcttccatgtacatgtcatagtaatcttcaattgccggttcacctttaatacatctggatgaataaatcaatagatcaattctacagagaagttgaatacagaggtgacacaaacgagacaatagaataggagttctttataattctactgagactacaaaaagcttggcgatccatcagaggataaaaattcagtagattttcagtctttcaagtatccgtaagatgaggctttgtccttactcaatatgtttagttggtagagaacgttttatcatgagaagctgttgtttctcgggtagtttcttctgggcatgaaattcagcaaaacttcttttcagcatgtcctccacctaacaataacaaccatttgaaaactggcgagtcagaaaaagccaagagaaaggcttggtagcaaaacgcataacagatcaacggtccggacattgagatacctttaattcttcaacacgtaaaagatggaggatcattatgtaggttagtcgaaactgagattctagtcttgttgcgcttccaacaattacacgcctcagatcactctcatctggaacttcatcgcgacacatgacaacaactgtgcccgttttgtcaagtcctcttctgccagcacgtcctgccatttgagtgtactctccaggaagcaattgtctaaattccttgccatcaaacttcctcaaagcatcaaaaacgacctgtagcgaatatcgtcgagaagttatttatatgaataatatgcttttcagaatacccacacttgttcccccacatgatatgaagatacttatgtgtaaagaataacccacttaacattgtagcaccagattaacattaataataaaaatcaaaatagcctcaccgttctagctggagcattaacccccatggcaaatgtctccgttgaaaatagcacctgcaggaagattaacaaaaatagatcacctgaagcatttcagattacgaaaacatggcaattagatttcctaaaagcagcaaccataagcatagataactattaactccagcattgtattaatggggtaggctcatataataacacaagtccctgagtttctaagcctaccttaataacaccacggcaaaaaagcatttcaacaacttcctttacaattggaagcagcccagcatgatgaacaccaattcctctatgaagtaagctttggagtctgagaacctataaaatgtgttaccccaacagttaatgagtaggaaatcaaggtacttctctatatttaatatgtgagaagacaggaaagtcttaagataaccaacctgaggtaaattccgatcagaccctttcaatcttgaaaacgctttatcgcaaaagacacggatttcacttttctcagagctactggtgaggtcggtcccagtcaaggcgtcggcacacctatcacaataattcttcgagaaacagaagacaaccacctaacgggaaaggaaatattaaaagttagacataacggaccagaacggacaagactaaaattgaaaatataagaaacagaacagaagctacatctaacatacaggtaatagggacatttttgaaagcttgttgataagcagtaaccaatttgaagctgctgatcgtctaaatgccccattgttctgactgttaccactgtaagaggattttcccacatcttttacacttgagtgtttattctgcttgccacgagaatgagcttcatgtttctgagatttgctcccatcttgatgagctgaagatcccatttgttgtttaggtgcaacactaactgcatttgaattcttcttcttttgtgaatctttagcatcctttatcccttttgaaagaaaaacttcgttctcacaaactttgtagagttctccagagtaaaaaagacaatgctctaggggaactggtctttttgtcgtgctgataacaaaacccataaaattatgaaattagtaacttccatatcaatcactgaattatattaacaattatttaatcaaaatacattaaatctcacccagtaacacgtatctccttttgttttgttcggccaatccaatcagcaaattcaaatgtgtttggcaccttaagaaattataaatgttataagttcagaggcacatgggtataaaatagaatggagaataatgactgaaccatgaagctatgcctatatatatcttcatagatgctagaaactgaacggttagttcatttggatcgtgactaacaaagacccaaagcaaaaaaatcacctattcttttcaaactcatcttatgagaaaattcatagccaaagattagttccatggcaagcaaaacaacacctcaaaagaactaagattttctacatgcatgcacataatagcattaagaagtaccgttgcagaaaggaggacaaaatttatatgccttggcaacatgatgatgacttcttcccaaacaacccctctctctacgtcattgacatagtgaacttcatcaaatataacctgccagtcataggaacggtaacaaggaaacgtgattgaagtttcacacagaactacaaaggctgcttagaaatggagcgatttgagaacaatatcaaactttgaagaagtaaaacatcagaaagctcttttacccattctatatcacgtatgatatcagcaccacgataaagcattgaccttaatatttcagttgtcatgatcagacaagatgcctctggccttatgctaacatcacctgtgagaagtcctacatcaaacttcccacaaaaatctctgtatttttggttgctgatggttttaattggagcagtataaaccgctcgtgtacagtgctgaaaaaatgggaaaaattgatcagcaaacaggacaaagaatctaaaaatacgaatgtgatggatgttcatcagaattctctaccttggtggccaaagcgaatgcatattctgcaacaactgtcttccccgccgatgtatgtgctgctacaaaaacagactctcccttttctaaacaacagatagcctgtaggcataagacatttatttatttactaataactcacacataaaagacaaccaggcacgttcctcaaatgtccgcaaatttaaaaagttgagggaaatacctccttctgaaagttgtccaattcgaaagggaattcaatcgccatgtcaggaacaagctcataaaaccggtctgcaatgtcttggctatctcctttagtggcccatccctaaaaagaacacaccccaaatcacgtttatgagagggaaattcaaatctcaaaatgtagaatccacgttcttacctctttccgtagttgtttatcgctgctcccagtaactgcctcttcagacattattgctgtttttgctgatgacaaaatctcatccagcacagtgacgtcagtctctagtcctttgctgacttcattgcttatgctcgctttagcatcgggttcagcttccgcctttggagactcagatccagctgtatgatcttcataacagttttgattatcagaaaaaaaaaaaaaaaaaaaaaaaaaaaaaaaatcaaatgtatgtgacgattatagaaattgaacacaccatctccctcaagttcagagaaagtatcttcttcccatgccttcttgaacagatcgtcaaactgaatagacaacttgctctggacgtattcacaatgcgaggccagtaaaaaagagtttattaccacaattaaatgtaaaataatttatgtacaccagtgacattgatctacagaccgaattttcatctgaagcattgccatgtgaactatgatcctcataaacgctccatgtttggggatatggctagagagtataaaagaaaagaggaagaaacaatcaacactgaatcgtaaataaatttatgaaattacagaattagatagtgatatcataggatagcataccatcagatctccaagatctaaactctgcttaaaactaggaggaacagtttgagcaggacccccattgagcaattcctgtacccattggccactagagacaccctctggaaggactctctctgaagactgtgaatcctccaagccacctggacggaaagggcgattgttgacacttcctctcagaaaatccttcggaggtcctaccattcgtggaaaaaatccagaatcttgatccccatacatttgttctgacaaatccacctaacataatatgacaatccatttctccaactagagtcagaaacagaaagctaatagcaggtcatttttctaccaaacatgttccagattctaggagaatatcactgtctaaatgaactagtttatttaagataattcacgatttgaaaagaaagaaatgagttacctccactgattttggctcccatgctccgttctcagtatcctctttttgacgcctgaatggcaactcccaagtcggaaccacaacggaccttggcaaagagggttgaaggggcatcttcaccctggaaaaccaatcaaaatcccactgattctcagctttttcagcagaaaactgatccggttccagtctcgggatgagatacttctcctcaatatgtttctttattgattcttttgtttccttggcaaatgcaggaggctgagaaacacgcatatacgcaaccataaataagcatttgcaaaaccataaaactttattaataaccaaaacacatcagtgcacaaatctgaacatgtaagagcatccaccactggatacatttatatgtaaaagtaatctggagtgtctcatgtcactgataactaccattgaacaagattttctactgatataaacctctcaccacatgaaatttcagaaaacgagcaacctttgattcctttcttcaccacataatacctgataacaactctaaaagtaactcctccctaatcaagtaaccagatagtccaatattaaccccatacgttcctaattccattacgattgttgagggaaataccaagtatactaaaatcacactaagacctagtaactacaatacagaaacgcacagctattaacatttcaaacgcaacaaattgcatcataaatcagtgcctaagcgaacacagttttgaagacgtaatcaagttcttgctgctaaatcagaaaactcacggatacaaaatcgggaagtgagttcagtgcgtcgtctctctcggccgtgtaaaaaggctcgacgcggaggtgaccaccatgaccggagaatccgacccggaagccgagctcattgcctgcttcgactttgttcatagtgccttttctctataccgttatcttcttcgcattcccttttctcgccgtctcttgttccgaactattctgactttatcagcgatcggtctgtgaaaggaaggaacacaacaattagatttccctccggttgagttcagcggattcgcaacgccttgtcgttttaaaactacaaatcagcaatgtgttctgtcttattatactttatgggctcaaatttaggcccacttgccaacaaataattattttaattaatattatcttttctatataaaaataataattaaatgatagggattcatatctcttcgaataaaatatttaagttatagaatttcactttgtttgagtcggctttataaaatttgattctactttcttcagtttggataattaagcatcaatcattttttagataaattattatacttggcttttagtttaaacttttaaaaattttggtatggcttttagagtcacctctacataaacttcataatcccttaattaagaaatattttgtagcttagtagtgttgtactagcgtcatctaggtctggggtttcctgtacccgttcgggtttggatcaggtatttcgaatttttaggttttcggatttagaaatatacaattcgttcgggtattgtaagatttcggatttggattcggaatacccgaatttccaaaaatcaaatttttttataaccaaatctatccaaactactcgaaaatacacaaaatatctaaatattttgaaaatgttttactcaaatttactcaaaagtagattaaatacgtaaaaataatttaaatatccaaaaaattgcatattttgacaattatattattacaaatgtaaatattaataatatattattattatatagttaaattatggatatgtttggatacccggtcgaacctgttcgggtattttgagatttcggattcggattgggtgctcggattcggatattatgcccagccctaatcgttagtgtcattaagacttccataatgcataatgcatttagttcacaaagagagaaaaagaaagttctgtaatcccaagtaaaagcaaactagattttaacccgcggtataccgcgggatgatttattttttaaaagtaatatatattaaaacttgcaaattttatttttataaaatatttctatttttacagtttataattattattaagtatttatatatattaattgttattaaaaataataaattaaagatttaacccgtattgaaacggtggattaattatattttactttttattaatgttgattcaaaaacccgtccttccaaatccgtcttgccaaaaagccatttattttattaatattaattttatttatgatatgactttgaattataatctaaacattttagctaataacataggagtgcaccatatttatttaataggggaatgtaccatatgacccgaatgcacttttacccaaatccaccaaaaaagtcttgcaaaactactttagacccgaatgtaccatattttttttgtgcgaatttttatgtgattaagatttaattgattttgtatataaaatattaaattgttttacgaacttatttgtttataatttggtaacagatagatatttgaatattcagtatattttgcttcagtttaggaaatctttgatgacccgtctttaaatccaataagccctataattaaaagatgaatattgtcgttaaatgattttggtaatcttaatgatgtcattaaaagattttgtttttgattaaatttttctaatggcattatcatgtaattaattacaaaaattaaggttacatttaaaatgtacttcccaaataatatagtaggacgatatgcacttttatacaaatccaccaaaaaagtcttgcaaatatattatagagataagaaacgatagtcggttttgataggtataagattagcaaatatattagttcgcttaaattagttaaagaatacaaattgaaaaggtatattacactttattcgaatatagtatcaaaagttatatagagatttgataattttttaattgttgaatactttttttttgtgctaattttatgtgattaagatttagttgatttcgtatataaaatattaaattgttttacgaacttatttgtttataattaggtaacagatagatatttgaatattcagtatattttgcttcagtttaggaaatctttgatgacttgtctttagatccaataagccctgtaatctaaatattaacctgcagtataccgcaggtaggcttatattttagttaaactaaaaacttttattgtaaagatgatttaaaaatatatgatattattttatttgattttaaatgtatagtaaactgtgagttgtatatgttttgttgatattatctatattatttagtgtttaagattatacacttgtagtttgattattaatttaagagtttcacctgtagtataccatcttgtattaatatcgatctaaacccgtcaattctaggattttccagcttgtattaaaaattaaatcacatctactatgttattaattattgtagtatataagattataaattttcaatataatatgtatgaaattgaatataaatatttcaaattatgacatgttactcagtagaaagttttcttaaatctatttttcacccgttataatattttttcatgtattgaacagtttatattcgtttttaaaaattcaaattatggcatatgcgaaaaaactctaattatttttctataatgatgatattatttttcggcaaaaatggaatcatataaagatgagaagtgaactataataattaataaaaaattaatatgataatttagatatcaaatctaatttgttgattttaattggttacttttttgggaattaataatgtatttcgtttatctaattaaattaaattaataaaaatttagatatcaaatcttatatgttgattttgattggttattatttttggaaattaataatgtatttcgtttttaattaaatttaattaattaaattagtatttgactttttaatcctcaaagagataaattaatttactctttaaatttttatttctaatggcatacctatgcaattacttacaaaaattaaggttacatttaaaatgtacttcccaaataatatagtaggatattcaaatgtgtaacacaaattcacctaatcaaactgtgtaataagaaaatgaaaatcacaatacacaaaaagaaagtttgaatgagctgagtgaatttgatcgggacaaagagaaatcactaacccaaattcattcattcatatagcattttacataacgttttctttgaacaaaatcaaaatattgcatacatcaaaaacatatacatacgaaaaggtttatcatttattttattttggttatattcttatgagatctatatgatatatatcgactttggagctgcgtggatgtggagatgcctttataaaggcaggtagcgtctatgcgaacggtataaggacttagggaacaggacaagcctcaatgttccaaatctctttggcatactgagctattgtacggtcactgctgaactttcctgacccggctgtgctcaatatcgacattttcagccaccccttccggtccctgtcacaacatattatgactcacattaaagaacttgagtattcatttcagttcagtttttgtataaactaaaaaagaaacttatgaatggataagttgggtttaagagatggacttacttataagcttcgtcaactttggcctgagcgtccatgtagctggggaagtcatacccaaccaggaagtaatcaccacgtccaaaacctgtgttaccctcaagagaatcaaggagtggaccataatcgtagctcccaaacactccacttttgacaaactgctttgcctcttcgaaccgaggatcgggtttgaactaatcagtttttacaggcacaaaaacgtttcatgtcagataaagtccagaagcataggtgattcattataaggcctttcatggtatggtggctcgcatttgttccacagagacaaaaatttatgtaagggagaaaaggagagagtgacataccagtccgtcttctcgttctttacgcagtcgagggacctgatcggccgttgcaccaaaaagaaagaaattttcttcgccaacctcctctcttatctcaacattagccccatcaagggttcctataataagacaaccgttgagagcgaatttcatattgctggtaccacttgcctccatgcctgctgtgctgatgtgttgagatagctcacttccgggtattagcatctccgctacagtgacattgtagtttggaacaaataccacctggagaagcaaatgcgttagaaccagttaaaacttcttcaagctatgttcggaaaataaaaggagaacagtgatttattgcatttgcatcaggcttggctcaataagaaagcttcgctctcggaaaggaggcttgagtagcataagacttcacgaaaagaaacctagttcatcttgagagatgcatacatgtgtaatattgacagtttctgatcaaaaacaatctcaggtgagcaagcatcacgcttagccacctctaagttacctttaggtattcgttgacctctggatcgctgttaacaacatcaccaacatcattcaccagcttcactatccgttttgcatttgtataggtggcaaatgctttacccccaatcatgacagtacgaggaactgttttcttcctctcctcaggcttcatctcctgtaacattcagatgcacaagagaatgtcacacaagaaatacatgcattgccgcctaatattagaattgtggtggtttaaggcccttttccttggttaaggtataaaaactcaagataaaatttagccggaggaaaggaatacgctgaagtatctaaacttttttacaggtctaccataacatttaacgcaaggggaaacatagaaaaactactaggaatccacatggatgggttagccaagtatacctttagtttcttgaatctgtatactactccaagaatgttcatcagctgcctcttgtattcgtggatacgcttaacttgtatgtcaaataagcttgttggatcgatactcacaccagtcacacgctctatatattgagccaaacgtttcttattggctgtctttgcagaagcccattcagattggagttcttcattgtccgcaaactagaagaagaaaagataacatcagaataacaagataaaaacccattgcagatctggttatcagataaataaaaaatcagacctggcgaagaccggtaagtaggtcaagatcggtaatccatttgtcagtctttaaccactttgtgattatatcactgagctcagggctgcagaaacgtaaccaccttcgaggtgtgatgccattagtcttgttttgaaacttgtttggccatatagagacatagtctgcgaataactcagccttcaagatatcactgtgtaactgagcaacgccattcacctgcaaaaaggccctcataatgagtacttgaaaccaagactacatgggaagaaacaatataacataactttgacagtgggaccacttaccgtatgcgaggatacaacacataagttagccattctcaccacaggcttttgtggattgttatctaagatgctcaaacttgaaatcttatcctccagatcaactcttgtatcgcgaatggtttgaacaaactgcagaatggtatatattttattattgcaccatatgataaaaacaaatccttagaatgatcagcaaaataccctcttgtcaatctcttctattatttccatatgacgaggaagaagcttccacatcaaagattgtgaccatttctccaacgcttcaggaaggacagtgtgattggtgtaagcaacggtcctgtaaaccatataaataagtcccaacagaaaagtgtgaaaactttgttgggaaatattgaaaggttcatgcataaatattttactttgatgtcacatcccaagcctcatcccatccaagtccattgtcatccattagcaatcgcatgagctcaggtattgcaagagttgggtgtgtgtcattcatttgaacagcaactttacttggaaactctgaccatttccggctgccttcagtggtgctcctctcgtgaaatcttgatataatatcctgcaatggatttccatattgtgaagaggaaatataaaaaattatgactcaatcgaaggtaaatttacttgtagtagtttttttggattctctttctaattaacatgccaatttgaaatttttcttatttttattttccagctatttaaatttacagtccatgacatccatcagagagtcctaagttaatcaatacattatggcttaagaaaaatgaagaacatgaaaggaacctaaaaccaatttgacaaacctgaagcgaagcactgcagagaaagaactgctgttttaaccgtaataacttcccattctcggtagcatctcctggatataaaacagtgcaaatctgcacatatatatagctacattgttagagagaaacaaaaagccacaaagcaaaagaagatggagcagtaggtaaagatgacgtgtcataacctgttgagctcgagaatgaagctgtgcagccaattcatattctccttcgttgaactgaaaaagatcaagatcctcagctctagcttttgcttcccagagacggagactgattgtgttctttgtgccatatcccgggattggcacgtcataagcaagagcttgtacaacatcaccatctacccatttccttctgcaaaatagtcaattgatccactacaatgcttaatagcaaggtcgatgaaaagtcagagaacaacgtagcaaaactcactagtgtatatatgcacagaaatttcaagtacagacgtatgttaagtcatgtaagttccaacaataatacttacgatccatccggatttacttgcaccttgccgaaaaatctgacagggaataccacgtcgtgcctcacaatttcccatgggctgaatttctgcaaattcccattaatagaggatgagttacagttctcagaaaaccataagttgaaatcaccacactgacaatcatcacctcaagccagtcctctggaatctcttcttgacctttctttgtgattatttgcttaaacaacccatgtctgtacctcaaaccataaccccaagcaggcagatttagggtggccatcgaatccaagaaacacgaggcaagtctccctaacccaccatttcctagagctgcatctttctcctacaagcaaacatggagagatcaaaaaataatttatttaggtcccaagtcttcaaagagaaaaatggtaacttaaaatgtacctgctcagctatctcctcaagctcataacccagcgtacgcagtgcatcagcatatggaccttgaaggttcaaattcccaatggcattggtcaaagcacgaccttggagatactccattgacaagtaataagtttgttttggatcaactttgttaaaatgaacataagtctcattccacagctgcaacacaacccaaattttatatcactctcacataaacacaaagaacacattcacacacacatatagattagctcctacaactgcaaattgagatggatataaccacggaaaaccataaatttctataccagcatatcttcatcaaacggaacttatgaaacagtccagaaattacttggttacctgaatgagacgatcgcgaagactctctgcggtagcgtagagagcttgctcaggcccgaacttcaatggagagaaatgtggactgtacttggcgtggtagacgatattcccagcgatctccgtagcatcatcggcctccggattcgccttagccgagattttctccggtaaactagtcgcagcttttccattggcgtttgccatcgcttatctccctaaaacaaccacagtattcaaaaattgcttaaacacgaataaaatcaaaatcatagtgaaactcgaatacaatttcaccaaggtagtgccgaagattatggagcaattaccaaatttcgaagccggaatctggaaagagatgagccaacacttcagagcttaataagggagaagatactacggagaatcagtatatactaaaaaagaagcgtaagatatttttcagaaggtgaatgacagaaacgtaattttcattgttttatatttgattttctgtttttgttttggcgatttgatttagtgattgaaaatgtgaggatcacaagaaaagagagagtgaagtgaagtttttgtgtgtcagaggaagctccgaagaacatttttgtattttttgttgaaaatatctaacaagcagcccccacatctatttgttttttagttagcaacacccttaatattattttcaatgtaaaaagaacaccattgttttcgtattttgggaccattgatcattttctaagaatttaattagaaataaatattggtaaccgcaatgtggacattcatcaaaagaaaataagtaatttgtaaggaatttaattgaacttttggcaacgaaaggaattaaaaaggtaaccaatttgagtaaaaagccaaacgtagtggctcgcttacgtatcaatacggtaatgagaggactagagtgggaaattattaccaggactgaggtgcacgaacacgtgtgtatgcaaatcacgaggtagagaagtgcgagaacctcaaggtcccaaatcacggatctgcacctgtaacttcacttttctctgcttctgtgcccgcccttaatctgtttttcagtctaaaactattacaatatttgatgaaagtcttcgtgtctctataccattgaaccgtataacaaacaaatactacgtcaacattgttttcattatcttctctaaggcgattcacgacattgaacatagataacttgctacattttttcatttatttatcaaggagagaaccatcgagacgaagaaattctagtttctgtacaaagccgaggtcttgttcctggtatttacttggagagcaaaagctgattctatatagagttgcaacttctttactagctgatccacctattaagtgactttgtggtcaccttcaagctgctaagaagaccagcatatatataccattagaattatgcaaaacattgattcaaaatgaatgaaactgaacaggtaaagcaaacaacataacccaagaaaagagaagggacggacctgttgtgtcaaaatctactctttctccagttgcgtatatgttgtaaaagagagcagaaaggagatacaatattgctgtaagaaggatgaatccctggaaggagcccaatagttctacaaagaaaccagctccaactgtgccaactatcgcagctaatgtcccagcagtaagacacattcctaaaacagcgcagaaacggttagagatttttggaaaaatgtttccagattcccaacaaaaatttgattgagtctaaggcttattccttctcagatggtacaaattagctatatgtgtttgataaaacaataggaaactctggaaaccaatgtctattaaaggagaattagaaagcataccatgtagaacaccggaatattcgggagcaatttcctgaaacaagtgggaataaatgttaaagatactcatcatttgtattgggttaggtatgaatcacacgcttgggtacctgaagattaataagaaaccccaaatggctgaatgatttaagcccaacggctaaactaagccaggctgatgccactaaaggttgttttgccgtcgttagaccaatgagagcaattccaggaccaatgaaaccaatggactgccaaacaagaaatgaaatcccccagtcagcaaaagaaaaagaatgctgaatgcaccagatttcattgcatcaggcttcaacatctttcggatatgtttacagaactcttcagtctgagagagctcttgattgaatgaaatcttgtgacacatcacgcacctgcatgatttttcgcgttaaggtgatgcttgtaccacgccgtatcaacaaatccgaccaaaaaccagcaatgtatcctgtgaaagccatcatactccatggaacggcactaaaccaagcagcttgtttgaggttcacatgatatacctgcggtacaatattcttataaatttcttaagagaactaaaacgaacaagattatattaagaacatgttggtactagggccttactgaattgaagtatatgggcatccatgaaagaatcacaaagaaaccctggaaataagtcattaagtcagttcaaagaattccaacaaataggataacacctgatcataactgtaagtcacagtagttggtactaacaatttcccttccacaagaaatcctcatagtaacaagaatgaaagagttgtattgagaggaatctgtatacatacccagctatgcatggaatttgcaactataacagcccaagtcggcatcttggagagaaggcgtccaaaaggaggtattccacttgtgctaattcgtttgttctccatagtagatatttgcttcttttgctttatatactcaagttcagactttgtaatctgaggatgtcgatctggtgcacttgacgttgcagagagccacacgagcaaccaaaggaaccccgatagtccaaaaattacaaatgggccatatatacctccttgagacataagaataggagacaacatgagtcctacaacattcccaagctgaaaccctgccattgcaataccaaccgccctagaacgttctgttgggggaaaccatctacatcaaaagtactatcactaagaacccaataaacttcagtaaccagatcatgtgtgtgtctctttatcacatttgaagcagtaataaaatacaaagcatcactacctcgcaaccatgttgttcatacaaggaagagccactccttcagcaaccccaaccatcgctcttgcagcaagaagagcccacaaagaactatcagccgcccaaggggtaagaaaagttgccaacgaccacaaagccacaccccacgccatgactactttaccaccataacggtccaccaaagttccaccagcaattggagaaattaagtatccccatagaaacgatgactaccaaagaaacattcaagaaactatgagacgaacgagaacaatgattaatgatatacagtagaacgacttaatactaaaattccccaaacgatcaatgagaaagaataacctgaacgataccggaaaatgatttgctccatccacgagaaagcgaaagaggaacaatcgcaacggacatcacaacacgatccgcattgcatagcgccaaagcaagcgcgagcatcgcaaccactttgactctctccgacgttataaattctgaaaaattgggttgcgccgtcaactccgccgccgtttcttccggtgtacggcgagcatcgctgcaagaaactcttaatcgatgacgaggaataccacatagatcgacggaagtgtttccggtgaatttcaatgagtttacgactctcccggtacagaggaccaactttctccggcgatctcgctccggcaaaaacggaatcctcctgagtgtaggtaagttcgaagtcaaaattgctcgatctccatggatttttagagcgtttcgattatggaagtcaattgaagattgtatagagagagagtaacacattttcaccagtcgaagctgcttacgattactccggttagcgaagaagaagaagaagatgctcgctcggtggtgtctatggattgcaacagccaaatcgcatgatccgacatccgtctcgtcttgggccactaataacaggcccataagtggtaaaagtggctcgtcctccatatgatttgggcttcctaattagcacgatttgaagtgtataatgcagtttatttatttttagctaaacaaattaatcaaaaccttgtttggtttctcttttgtgagagaaaatagaaagttaggagctaaattggaaataaagccaatattatatgtaaaacaacttttttttttcaaaatttagatgtcataaataattaaataaaaatgtttagactttaataccgtgttgttgtgccaaatatacaagtattagtgcatatttatccaaaaaatctttgttgtttgaacagaaattcttaggagcattccttatcttttctaatatcttactctcattatgccttggaaaaaataaaataaaataattgtcagtcactgtatctggggtaaacacgtggaagattccaatctttatcagaaaatgaaaataatcacagtaaatctgtatatatcgacaaaaagagaaaagtataaaatggtaaacagtaaatataataaacactgtcttggcttcgggacttactaatgttttttgaagaacacagtttcttctcttgggaacttgtcgtagatccgaatctctatgttactcgtgttggtcactttaactgtagtcgtattctccatagattccttttaaaattcgcaattattcaaattatgcatatcatacacgaattattaaaacaaaatcatccaattattaaaccaagatttcatttgctgataaacatattcaatcaatgaaatagaaaaagttgactttgacctatctatttagaatggaatccaaagagttgacacatagaaacggccaaatattgacggtgggctatgttaagtgttaacttatttgttgattgacagttatacaaaattaacacattttctattgttacgataattaagtaagaaaaggtaatggatgtgattggtaactataagttgtacgagttttttagctattagttttatcggaataatgcaaagctgttaaaataagctgtataataaatctaaatctgtataaaaaaactgagagtaaaactttttgtaacgcttttgataaagttattgtgattggtaactgttaaagttgtaccgctattataatagctaccattcaatccaatacaaaaacaaaaaacaacacattttctttaacgaaaaatggctagatatacggtacttatacttttcatataaaaaaacttaagtaaattctacgaatatttgcttcaatatgatgttattatattaaaattatgatacgcatgtaaattgtaattaaaccataatttttgagtattcatataagattatttttgtaaataatattttttacgaacttttttactaactatagagtgttatggataatttacattagatctttgacaaaaatacccaaaagaatgatgtgacctagaaaaataaaggaaaaatgacaacaatagcactcaaatattttgtggacaaaaatttttttttcgaaaaaatattgtcggaaatatttggcgatgaatttgtgtattttataattttttaattttaataatttaaaataaaataattgtttaggtattatttatgtccaaaataattttgaatattacttttgtgaagaaaacttaaaattgtactatttataaaaattaatacaagagaaaaatactgaacaaatagaaaattgaagaaagggtttaagtgaaatttccataattgaccctacaaacaacacttacactatcatcaagacactctcacacacactctctcttaagtcaccgccgcacgcaagcaaatcaaacgaactattcgtcagccatggctaacgtcaaacaaaccaatcgccgtcgttcctcctcctcatgccaccgtcacccttccgctaaaccaaccagcggtttctgcgcttcctgtcttcgtgaacgtctcgtaacaatagaagctcagtcttcttctctcgccgccgttcagactcccgagctccgtcgtattcgatcatactccgttcgtaacgcatcagtctccgtttcggatcagccgcgacggagatcatgtgacgttaggtcaagcgcaagctctctcctggacttgtttgtcgatgatgacgaagaacgggtggatagttcgattcgaaagcctctggttccagatttaaaagaggaggaagaagaggaagaagaagaagaagattactacgatggagaagatataaaaggttttgatgaaggcaagccgaggaagatcgtcgaagagaacaagacgatgaaggagttcatagatctagattggagaaaccagattaagaagaacaatggcaaagatttgaaggaaatagcatcggttttgagcaggagattgaagaattttacattgaataagagaaatgacgaaaaatcagattccagattcgccggaattgtgaatggtcgtcactcttctgatgtggatcctagattgtcttttgatggaggtaggatctcgtttgagaaacctaggtcttcatgggatggttgcttgattgaaaaatcatatcacaagcttacgacattgtctactgtgacggaagatgctaaagctaaatgtggtgttgaagaagaagaagtagaggagaaggagaagagtccaggtgggacggttcaaacgaagaactattactcggattctcgtcggagaaggagttttgatcggtcggtttcgattaagagacaaggattgcttgaggttgatgaattgagaggtatatcgaatgcaaaggtatcacctgaaactgtaggtttgtttcatggtgctaagttattggttacagagaaggaacttagggattcgaattggtattcgattaaaaatgtcaaaccagagagtaaagaattagtttctaaaggaaagatttgtattgctgctggtggtgaggggaagaagcaggatagtgttgagttaaagaaacctagaaagaaatggccaaagggatggaacatttggggattgatacagaggaaaaacgaggcgaagaacgagataaagactgagcaaattttgaaacttgaaggaaatgcggttgagggttctttggctgaatctctgttaaagcttaggagagtaggtaaaggagaaaccaatgttggtgttagtgagaagcttttgaaaagctatagtgtaagtgcgagaaagtcttgcgatggcgtgcgtagtggtgctaacattgtcagtggctttgaaggtggaagaagctcttgtgatggtctgtttcatggatctattaacagtgttgaggctggaagaaactcttgtgatggattggttaatggcattgaaggcaaacaaaatcatcatcttctccagagaaacgcaaatgttggtacgtgcagccaagaaaaccttgagaagagtatgtttagattctatctgagtccggtaaagagccataagactagcaaatccgggaagagtaggctgaagaattagtttgatctgacatttgtgttaactcatgaatattatgttgtaattagcaaattagcaactaatgtatttgttacttcagtctatagataagtccgtatatcacatcaacaccaatgtttgttttccttctcatatattttcctcataaaagcacatcaacaatacattgtttttgcatggtttgcttatacaaatacgacattgcgtgtaatatatgtcataacataattccccgatgttcctgtacatcaatcagaccagtgaagttacactggttttgaattgagaccgaaaccaaacgggaacaatgggtcataagaattggcatgagcatctagtggcaaatgctcaacgtgtttgaaccagctcactggcaacttccccttgaagtcataatctccaaaaacaacgtcagccaccccttgcccttctgttccaggcagccaagcagcaaccagagcctctgtcttttcaagaaccgtcggctccaaaaccacaggtcgtcctgagatcaatatcaccagagtcgggattatctctgcaactgcggtgacaatgtcagtaccattaaaaggtattctgagttccgagttatcccccatcgtctctgcatagggcggttccccgactgcaacaatggcgtaagagaatccttcacttgaggctaaggtttcctttgatggagttttctcatagattacttcggtttcgtctccaactgcttcttttatggcgtccaaaagtgtagtgcctacatttgcagacaaagatggattcatactgattaacttttcaacagcatctattagcctctgctagcaatcgttttaattaccaattgtgatcctgccgcttagaccgaaccatgtctttgtccatcctccgcactgatatccaagatcatctgcgtgagttccagtgactagaatcctcttagcgttgcgatctagtggcagaaacggtttatcagcatttttgccactctttagcagaactaacgactttctaactgcttcctgcgccaattctctatgttcctgcacacatgaaaaaatcttagaataggggtagcactctggtctaatggccttcagtacaagagagctcaccttgcaaccaacagtaggcaacaaagatcgatctgtgagaggatgtccaaaaagaccagcgacaaatttcactctgagtattctttcaacagcatcattgatccgagccattggtatttcccctgactctaccagatctgtcatgtcctgtatgaactgttcgtacttaaatggtaccataacctgcaacatggattatataatcttcgcttcttcaatcatccgagatgatgaaaatcatttactaagctgaaatattttgtgtacggggttcacactctaccatgtcaatgccagcattaaccgcagttttaatgcagtagcggtagtttgatccctgaggctcactaagccggtccaaaccttcccagtctgagactagaaatccctagtaacatatacaagcaaactagcttaatgcatacacctctagcttatttttctttctattcaattaaatttacacgaaccttgaaaccaagtttttcctttagaatttctgtcaagagaaaacggtcggcgtgcagtctagttccattccaactggagtaagacgccataaccgtggaaactccctgagcaagacacttcagataaggaggaatatgtatcttctctaattcttcatatgaagcgatggtgttcccttcatttatgcccttgtcagtaccaccatctccaacaaagtgtttgacacacgcgacgacgttgtttctataaccccaataaacaaatccatgagaaatgacatcaaacctattaatgtcccaaataagtttacagtgtactgattcatatgataccttcctgcaacaaaaggataaccatttgggtgttcttctggtggcacaccttgtaggcccgagacaagagaagtcatctcacagacaagttcaggatcttctccataactctcatagcatcttccccacctcggatctctcaaaacctgcacaaagacaaaacaacaactttcacattcaatatttacaaatcatttcgttcaatttcagttgttaaattataaaaaggaacgaacttacggccacgcaaggagaaaatgcccaatgaaccccgctcgctcttacttcaagtgcagttgctgctccaattcttctgaccaaatctgcgtctctacagagttaccacaataactactactgttttcacattaatagcggccaaacacagcatggctgcaatagaagcaccaatcttgaacacaaacagattctactcatccatagccactgcaatactacttctactttgttttaagaagcaagctcagaaatttaaactagacctgaatcaactaagtagcttcggtaaggtaagtttccatcagatagaccagtaacagaacaaagctttaagagcacacttctagtttgcttatggtaaatcgagaataaacctggtggctccgaggccaatgttgtgagggaagacagtggcgccgtagacattattgttgccgtggacagcgtcagtgccatagataattggaattcccaaacgcgacgctaacgctgatcgctgaaaaccatcaatcatatcagcccaatccgatgacttagcgtcctcgaacggtacactacctccagcgtttagtacacttcctgcaaacaccaaatccataaagttactaattttagtaaattgcaaatgcatttttcaaaattgaaagttcaaaaaaaaaaaaaaaaaatgtgtgtaccgatgaagaaatctgtaaaggcggagggagaagcgactctgcgttcgatttgagtcatctgaccgatcttctccggcaaagtcatgcgagagagaaggtccttcacacgcgcctccactggcgcgtctccgttcttgtaaacgcatgatgactcctcgacgaccattttctttactcttcttcttcgttgtagttgttgtacgactttctctttatctataacaagatgagacgtgacacattgattttgactcaaaatgcttaattaatgattattgctttatgtaaaaaattcatcaatttgattaacttattaaattaaacgtgtggttcatatggtaatcgcatatttttaatacaagttaaccggtgaagttaaaccagttaaccgaaattggaagtgagaccgaaaccaagaggaaacaatgggtcatacgaatttgcttcagcgtttaacggcaactggtcaacgcgtttgaaccagctcactggtaacttccctttgaagtcataatctccgaaaatcacatcactcatcccttgcccttcagttccagggaaccaagcagcgaccaaagcttcagtcttttcaagaaccgttggctctaaaaccattggacgtcctgagaacaaaatcactagagtcgggattttctctgcaaccgcggttataatgttgttaccattgaaaggtatagtgagttccgagttatctcccttcatttctgcgtatggaggttcccccactgcaacaatggcgtatgagaagccatcacttgatgctaaggtttcctttgttggagttttctcgaagatgacttcagttttgtctccaactgctgcttttattgaatccaaaagcgtcgtgcctgcatttcaaaacaaacaagtatataagtgtccacatcattttttctgatatcttctaattcgattcaactaccaattgtgattctgccgctttgaccggattttatctttgtccatcctccacactgatttccaagatcgtttgcatgcattccaaccactagaatcctcttggcattgcggtctagtggtagaaatggtgtatcagcatttttaccattcttcagcaacactaatgactttctaaccgcttcacgtgccacttctctatgttcctgcagttgtggaaaacatagtcaatcatgctctcgtacatcttacaatagtggcctcagctatagatacctcaccttgcagccaacagttcccaacaaagatcggtccgcaagaggatgttcaaagagaccagcaacaaacttcactcttagtattctttcaacagcatcattgacccgagccattggtatttcccctgactccaccaaatctgtcatgtcctgtatgaactgttcgtacttgaaaggcaccatcacctgaaatatcattcattaacaatcttcgtcttctataaatcattcgaaacatatgaaaatcattcgttaccatgtcgattccagcattaatcccgagtttgacgcagttacggtagttggaaccttctggctcgcttatcgtctccaaaccatcccagtctgaaactagaaatccctggtaacaaaatgacaaagtacattaaacgagctcaatgcatacacctctagcttataaagattcttttccatattcaataaaccttgaaaccgagtttctgtttaagaacttcagtcaaaaggaaatagtcggagtggagtctacttccattccaactggaaaatgaggccataacggtcgacactccctgagcaatacaattaagatagggagcaacatgtattttctccaagtcttcatatgatgttatagtgttcccttcgcttaagcctttctcagtaccaccatctccaacaaagtgtttagcacacgcgatcacgttgtttctatcaccaagtaaacaaatccatgaaaaatgacaacaagcctattcaagtctactgcattttaatgtttatatgtacatctataccttcctgcaagaaaagggtaaccgtaagggtgttcttcaggtggctcgccttgtaggcccgagataagcaaactcatctcacatacaattttagcagcttcactataactttcatagcatcgtccccacctcggatctcccaaaacctgtgagtaacaacaatttcatttcaatatttacaaattagtatcccaatataccaacaatctacaagggacttacggccacacaaggagcaaacgtccagtgaacgccactagcccttatttcaagtgctgttgcagcaccaattcttttgaccaaatctgcgtctctatcgagataccacacaaaactacgattgttatcacatcaacaacaaccaaacacagtacatggacagatcttaaacacaatcagattctaatcatagctagtactactactgtgtgatcaaaagctaattgaagcaaaatcatcagaaactccaaattcttgtggaacatgaattaaaacaatccgacattgcttgtaacttaacaaaatgattcaaactttttaatcaaaattcaaaagctttaaatccatagacttcctaaaaccccattatatgcaaaactctctcattctctgactctcttttgcagaaactaaagtttgcttaaagtggaagagaatgtttaagaacctggtggcgccgagtccaatgttgtgggggaagacggtggcgccgtagacgttattgttgccgtgaacggcgtcagtgccgtagattattggaattcccaaacgcgacgctaacgctgaacgctgaaaaccgtcgatcatatcagcccaatccgacgacttagcatcctccaacggccaacttccggcgccgctctgtacactgcctgtaaaaccaaagttgtgatttttattttcgaaaggaaagtagaaaagtttggttcgttgaccaaaacaaaaacaaaaaccgttcagtggtgttattgtatcactattaccgatgaaagaattagtaatgacttgaggagaagcgacggagcgttctatctgagtcatctgaccaatcttctccggcaaagtcatgcgagagagaaggtccttcacacgcgcctccaccggcgcgtctcggttcttgtaaacccatgaagactcctcagtctctgccatactcttcttttgtctttttctctaaccgaatctagtcactccacttctctttatctagccaagctggaggacacgtcacgtcacacttaattacgccactacactcaaaattcttaattaattggttaataattgaagaacaaactcactaaacacatgtgctatctcttgggcttttgtttatttccttctttttttaggtcttattataaacctcgtaggcctactatatatagtacattgtattccataattttaaatgaaacaaaattttaagactttctctgtccaaaactctgaaaagtttctgtcgaagtttaggattctagggtttagcagcgctatggaaaaatcgcagaagcaagtcacccgcccaagcaactcccgaagagaatactcgaaggagataccaattgatctgttgattgagattttttcaagattgtctacgggagacattgctaggtgtcgttgcgtgtctaagatctggtcttccgtaccgcgtctgcgagatttcactgaactattcctgaaaatatcttcggctcggccgcgtatattatttaccttcctacataacggtaagcgtatgttctactccatatctcagcatctacattcagacccgagttcatctcctttggttccctactatcatatgtctttttccaaaggtatggttccttcctatgacaatgagattcatgcccctgtacgtgggtttctttgtagcaaagctagtgtctataaccctagcacaggagagtgtgcatacccttacctagagcttctagtaagaggattgagagaacctattttgggtatgatcctatcgacaaactattcaaggtgtagaaaaggggctttgggacattctccccgtagatgctgagaatcttgcaaagaaagtgtgcgtgcccaaggtattgttggcgtccgaggattttgcatgtcgagtttcaacattaggaacggaagaagtttgctggagaatgatccaatgctcgctaccccataggccttttcgtgatgagatatgcattgatggagttttgtactatttagctaagtgcattggaaattaaactcgagaaccttatatggtagtttgctttgatgttaggtctgaaaagttcaagtttttagttgtggaaaatataatttggtgttcaagtctcataagttgcaaaggtaaattaggcatactatggccagtgccctctggagatcagagtcatgaagtcacaagaagttttgtgttgcggattctggaagatgccaataaactgatatggtcgaggactgtctacacattgtcttttaattggaagaaacttgtgaataaatctctatacattgttgggatgactagtggaggtgaaattgtgttatctacacgccatctaaactatcctttctacattgtctactataatccggtgaacaacactgcggcaaaaaatgaaatccagtttgggaatatcgctaataagaaggctgaaaactcaaggatttatacgtttatagaccatgtagagaatgtagagcatatggattaaaactctacaagagtaatagtttgggcatccctttaaactttgtactcttaaatactgttattatatgactatttttatgtgttactttaacaaagttcattcatctttttacggaaactgtgtccataaaaccatgtacatcgcttatatttttagagtatcaatagcccatttataattttttaatagaccaaatacagaaaattgggctgagtcgtatcagcccattgatacttttgatactcaatttcatcttacgtggtaggcactgattggtcgctcatttgtttttttcggaaaaaaggaaaaaaaaaataaattccttttgtttctctcaaaatttttctctctgggcgatttcgccgatcaattttcttctatttcgattccttttgaatctcttcccttttctcgaaaatccttcttagatcatcatccatggcactgacgccgttcacggcaactgccgtagacgttgttgttgccgtgaacggcgtgagtgccgtagattattggcttatcaatttaacttacaccatagataattaatatgtagattggcttataagataactgattatatatttaaataataaataacattttaaaaagattactttccatgatatagcatgaattagaacctaatgaacaacacacaaattggaaaatcaaaatactccatccttttgataaaaaaaatatggtttcagatatctttcatgtgaattaaatttcttatttaaatttaataaaatgtctctatttagtaaactagcaattaatattatgaatgaaaaaattaaagatatatttgaccatatatagttaagtttgataacatagtcataatggtgaaaaaaaataagggttttacctgggtgtttccatatattatagcctgatatgaattatttacactaggattgaacttgaaaaatgaaaacaacgtggaagttaatggaattgacgtgtgtccatctttcagaccaccagttttccttaacaaatagataaaagatcttaaaactgtcttctgtcttaatcttcttaatcccaaaaaaaaaaaaaaaaaaaaacacaagtcgctgtcatgtctgggatgttagggttaagcgccgtcatgggaaaacggccgaagcagcaagtcaccgcccgtccaaggaagtgtccaatagaaaaaccggaggagataccagatgatctcttgattgatgttttctcaagattgtccattgaagacgttgcaaggtgtcgttgcctgtcgaggttttggtcttccatactacgtcgtcgatatttcacggaactgttccacaaaatgtcatcgacccggcctcgtatactattcaccttcctttactatggtaagcgactcttttactccatgcctcaagatctagaccccagcaaccactactcgcctctaccttatttttcgatatcatactctcctatatctgcccattaccagatgcatttccctaaagttctgggtgcttcagcaaaggtgtgtccccctatacttggcttgatctgttgcaaatctagtaagacgatgatttttaaccctagcacaagagagtcaaagttcatttcaacaacgaagagggttggcgtgaagagtacttcatttgggtatgatcctatcgacaagctattcaaggtattgtccatgtccgatgattttgtgtgtcgagtttcaacattaggaacggaagtagtgacttggagaacggtcgaatgttcggtaccccatcaccctttacatagtgagatatgcatggatggggtattgtattatttagctaggcgtgtgggcgatgaaactccaaaaccttatatggtagcagcctttgaagttagattggagagattcaagtttctaccaatggatctcagatgtaaacacattggttgttcagcagtcatagattacaaaggtaagttggccgtagtatggctaaatgtggatcgtgacaatcaacgacacatagaaagttttgagctgcgtgttctaaatgatgttgatgaagtgaaatggtctcaaattatttacgaattgccaaattattggaataatctacctgcggatatcgacgtatccattgttgggatgactagtgcaggtgaaattgtgttggcgacaagccatatacggcatcctttctacatcttctactacagtaccgtgactcttgctatagtacaacttcgaatcgatttcggaattgaagctccggaggctaatcactgctcaacgatgtcgacatttgtaaaccatgtggagaatgtagagctagcttgtggattaggtctttctagcatagccatgtagcttgccttctaaggttgcatccatcttgttcggttattgtttgaatgttctatttatgattgtttgttgtaagctatgttttagctatttgaacttttcttgttataagctactttaaagctatttgaacttttcttgttgtaagctactctaaagctatttgaacttttatattcttgagcaaccaactttgtcttcgtgaattttactgttagttttatagatagttagatacaattaaaaatagattttgatccatagcttgttgaatcggtctttaaacactatccaacctctagatttctctaaaagaaggaatttggtaacaaagatacagtcaatcaatgatcattctcatcattcatttcttctcagttctcaccatcaatcaattatccaaacaggtacaaggttgtcgagtcgtcaaatcaactgtccaaccgaatttcatttatagtaaccaatagtaaagaattgtacattaccaaattagagtttcacaaatcaagctacaagtaaacccattcaaggaaacataaaaaaagaatttcaaatttggatcagtttcattttatttctactttccacttactgcaagaaaaaaaaaacccaagaaaatacgtagtctgtaaaatagtttcttgtcggacaagaaagcaagataatgatagaaacaaacagacttgtgagcaaatgatgttattagattttggttttctttgagtttttttttttaattatgaagacacaagaccaagtacttattcatatgcacactagtccaagcgttactctgaatatcaaatatcacactttcacacattctcactggaattgtagttgagaccaaaaccaagaggaaacaatggatcatatgaattagcatcagcggttaacggcaactggtcaacgcgtttgaaccagctcactggtaacttcccctcaaagtcataatctccaaatatgacatcagtcatcccttgcccttccgttccaggaagccaagcagcgaccagagcctcagccttttcaagaaccagcggctcaagaaccaaaggccgtcctgagaacaagaccactagagtcgggattttctctgctaatgcagttacaatgtcgttaccgtttaatggtattgtgagttccgagttatctcccaatgtctctgcgtagggagtttcccccactgcaacaatggcgtaggagaagcgttgtaacgaggctaaagtttcttctgaaggagtcttctcgtagatcacttcggtcttgtctccaactgcttctttaatggcgtccaaaagcgttgtccctgcaagttcagaccaacacagatacgttttgataataatttactaacaacatctactagtctctttgattggagtcgctttaattaccgattgtgatcctgccgcttagaccaaaccatgcctttgtccatcccccgcactgatatccaagatcgtctgcgtgtgtcccagtgactagaattctcttgacattgcgatctagtggcagaaatggcttctcagaatttgtcccgttctttagcagaactaacgactttctaaccgattcacgcgctagttctctatgctcctgaagccatggaaaaacagagtcaatcatgtgcttgtcccaacactttggtctaatgacattatgtacaagtgacctcaccttgcagccaacggtacccaataaagaccggtccgtgagaggatgttcgaaaagacccgcaacaaacttcaccctgagtattctctcaacagcatcatcaatccgagacatagttacttcccctgactccaccaaatctgtgaggtcctttataaactgttcatacttgaaaggcaccatcacctggagtaacattgattaataatcttctctccattattaatctaaaagatcaaaaatcattgactaggggtttcagactttaccatgtcaactccagcattaactgagattttgacgcagttgcggtagtttgaaccgaatggctcgcttagccgttccaaagcttcccagtctgaaatgacaaatccctaataacagaagcaaaggcaactacctaaaaccacacacctgtagcttatttagctaaattcaaatcagattttaggcaaaccttaaaaccgagtttctgtttgagaagttcggttaagaggaaatagtcagaatggagtttacttccgttccaactggagtaagaggccataactgtagagactccttgagcaagacaattcagatatggtgcaagatgtattttctccaactcttcgtatgacacaatagtgttcccttcgtttatgcccttatcggtaccaccatctccaacaaaatgcttagcacatgcgaccacgttgtttctatcacatagtgaacaaaaccatgagaaatgacatcaaacctattaatgacatcaaatctagctagaggtgtatatatatataccttcctgcaagaaaagggtaaccattaggatgttctttaggtggctcgccttgtaggcccgagacaagcgaactcaactcacaaataatgtcaggatcttcactgtaactctcataggatctcccccatctcggatctctcaaagcctatcaaaaagatttataaaaaataaaaataaaaatctctttcaccatttcaattccttcctcatatatattttcttgattttcttgttaggaattcttccttgtatagacgtctaaggattaagaaaattctcatgtattgaacacatctcatacttaatggacaacaacacacatatttggcattaggatgggtgagatgccaaataaaacgtatatattctcaataaacactcaaagatatcccaccaaaggctctattcaattgactaagctataaggaacttacggccacgcatggagcaaacgcccaatgagcgccacaagctcttacttcaagtgctgttgctgccccgactcttcttatcaaatctgcgtctctatcacatttaacaaccactttgttacgacctaaagatttaggttccaaatctatatggagcaacattacaagactcaaataatcgaatacttatgttacgacctaaagttacattttcagccaattatatgcaaatgtctctcttttgtccaaattttctagtcagttcaacgtgaaagagaatggtaagaaaacctggtggctccgaggccgatgttgtggggaaagatagtggctccgtagacgttgttgttaccgtggacggcgtcaatgccatagatgatcgggattcccaaacgcgacgctaacgctgcgttttggtaaccgtcgatcatatcagcccaatccgacgtcttagcgtcctcgaacggccaacttcctccaccgttcaatacactacctgtaacccccaaaaatccattaacacaattacatttgtatcttgttatcatcaaaatggacttgggaaactacaaagtttggtcgttgaccaaaaaaaaaaagaaacaaaagtggtcagtgtttgtgaataccgatgaagttatctgtaatgacaggaggagtagtgacgacgcgttcgatctgagtcatctggccgatcttttccggcagagtcatgcgagagagaaggtcctttacacgcgcctccactggcgcgtctttgttcttgtaaacgcatgtttcattgcttccttccatacacaatatttgttgtttcttccttttgttcttatttttttatccttctgttacaagtttgcaacttaacctttatatattgccaaggttgaggatacgtggcatgataaagtcatacgaagttctgccgtagccgactagatatgcaaatttagcttagagtggattagttcaatgataaagaattatagatttaagtgaaaaatagtaatgatctgaatttttctccagttctacatttttttttttttcgattactaagggaaaagcctaagtaaatttgaatgatcaagtcaaatctagtatataaatcacacaacctaaataaatgatagagcaaagaaccataataaccatcgtttaaacatcctaatctagtctaatacatgatttcaacaaaaagactacccattaacatgaaatatgatgaagaacaaagaaaaaaacagtaacacatatttcatatccaatatttccacaactatgttctttaaggaagactttgccccaaaaaaaaaaaaaaagacttgtctaattttttttgaaaggtcgtctaaatataaaactacgactcaaaacataaaaatgttggtcaatgattaattgaatacaaaaacccaactactggaacaattcgtaccgtgggaattaaaaaacaaagacttgaaaatagtttatttgagaaaatgctttgatgcatgagtctaaataggaggaaccaaatgttgtgttgacgacataatatagagataatcaaggctagatagacgtatgtaactgatatgctaattaacatgtcttttcaagattgacgaacatatttgagagaccaatcttaagctgttagcatatgaagcatgagagtgacctttttgtgcatataatcctccaaacttattccaatgtatgaaccgattttaacaaaatcatttttaaaacagaaaagtagtcccttgaaattttgttaaagatattcaacaacaaatttaaaccgtgtcagagttctccacggaatcaccattgagaccaaaaccaagaggaaacaatggcaaatacccatttgattcgatgtcaagaggtaactggtctacacgtttgaaccatgttgctggtaacttccctcggaagtcataatctccgaatattacatcagcaatcccttgcccttctgtaccaggcagccaagcagcgaccagcgcctctgccttttcaagaacttgcggctcaagaaacataggccgtcctgagaacaagatcactagagtcggtattttctctgcaaccgtggttataatctcgctaccattgaaaggtattacgagttctgaattatcccccatagtctctgcatagggcgattctcccaccgcaacaattgcataagaaaatctatatcctgaggctaaggtttcctctgatggacttttctcatagatcacttcggtttcgtctccaactgccgcttttatggcatctaaaagcgttgtgcctacattttcaaacaatatagttagaaattcgacgagaccatttagcatttcctaccaaaggtgtttttcaaaccatattgcagtagctctagttaccatctgtgatccttccgctttgaccatacattgtctttgtccatccaccgcattgatatccaagatcatctgcatgcgttccaaccactagaattctctcggcattgcaatttaatggcagaaattctccatatctgccgttctttagcagaactaacgactttctaaccgcttcacgcgccaactctctatgttcctaaacctcgtaaaacagagtgaaatcatcttttatatggtcttcaataatcttagcactccagtttaatagcatttcagaacaagagagctcaccttgcaaccaacagtaggtaacaaagatcgatctgtaagaggaaattcgaagagtcctgcaacaaactttactctaagtattctttcaacagcgtcattaacacgagccatcgatacttcccctgactccactagatctatcaagtcatttctaaactgttcatacttgaaaggtaccatcacctacaataacattaattggtttaattatatattctcttgtatcatccgagacaatgaaaaaaagttcactaccatatcgattccagcattaatccctattttgacgcagttgcggtagtttgaacctggtgggtcgctaagccggtccaaaccttcccagtccgaaactacataaccctaataaccaaacaaaaaatatgaaatcaaatgaatacaatgaatacatctctagctttatttagattgttttcaaactgaaccaaccttgaaaccaagtttttgtttgagaatttccgttaagaggaagtagtgtgagtgaagtttatctccgttccaactggagtaagaggccataacggtagagactccttgagaaatacacttcttatagggagcaatgtgttttctctccaagtcttcgtaccgcaaaatggtgtttccttcatttatggccttattggtaccaccatctccaacaaagtgcttggcacacgcaaccacgttttttctatcatcaagtgaccagagtccatgagatatgaaattaagcatactaaagacacaaattaagccacaatgttaatatatataaacataccttcctgcaagaaaagggtaaccatttgtgtggtctttggatggctccccttgtagacccgagacaagtgaagtcatctcagaaacaatttgagcaacttcaccatagctctcatagcatcttccccatctcggatctttcaccacctttagtaagaacaccatccctttcagttgactaataaaaccaaaacatattcgatcttgttgctaaaatctaggtatgcaggagacttactgcgacgcaaggagcaaacgcccagtgagcaccgcacgcccttacttcaagtgctgttgcagctccaattcttttgaccaaatccgcgtctctacaaagttaacacatgaagtaccaatgttatcacaagccaaacacaacatggccacaataaatgcaactaattatttaatactaatagctagcattaaaaagttagtaagtgtaacatgattatatcttcaaataagactcaaatgaatcagtgaaggcaagtctcatcagatcaaatcaatccctttatatgcaagtctctctctagtctcttctactaaatttgtactttgcttaaaagaaaaccagacctagtggcgccgagaccaatattgtggggaaagatggtggcgccgtagacgtcattgttgccatgaacagcgtcaatgccgtaaattatcggaattcccaaacgcgactctaacgctgatcgctggaagccgtcgatcatatccgcccaattcgacgactttgcatcctcaaatggccaacctcctgcgcggttcaatacactacctgtaacaatatgacaacttgctttgtatcttttagtatgttcaattttcataagagaacaaaaaaagaattagagaaaatctaacaaaggtttggtcgttgaccaaaacaaaatttagaaatggtctgtggttgtgtataccgatggagaaatctcttatcacggcctcagaagcgacgctacgttcgatcaaagtcatctggccgattttttcagccagagtcatccgagagagaaggtcctttacacgcgcctccactggcgcttcccggttcttgtaaacatatgacttctcattgtcaaccattttcttcctctttctcttcttcttcttacaatgtcacttctcctctttagtctttaatatatatatagccaagctagggacacatgggatgggacgttgacttggaaacacactcggattaaggaaggacaaaatatcaactagaattcatttcatatgtatgtaaggtgtgaagtcttgagaacatggctaaaacaccaaaaacataaattaatttttttttttgggtgggaaaaaaacgttataattaaaatgttgtattgtaagattaaaatcaattggaattttaggtatgaattcttaccaaataaaaaataacgagaaaaatgtttaacattgtgcataaatattattacatgattttcaaagttactaaacacaaactaaggtagtctaggcatgcttgtattgggtgaagtcacataaatatttttgattaataatatgagtaaacatataaaaacatttggttggtatacttaaaagctcttcaaacatttggatcggaggaggtgctggggttctacggacgtttattagcggctgcacagaaagaccaacaccgatcggcggtgtcaacaacgacagttccagcaaaacctgtgcatttaaactgttttccatatggatagcacggtggttctttaactttttcatttgtgataggatttcttaacgggtcatctttgaaaggatttcttaaagaatctacaaaagcaaataaatgaacctttttcagactatggttatgattataatggtaatgatgctaaatgacgatctgaaccaaacctaaagtacttataacattaactcaccacattcatgaagacttgctagaaaaataagaacgatacaaaagatactaaaattagatgacgacattgtaattttcacactaagaagttttgttgttttatcatagaaaaacttatatatagacaagtctttgattactgctaaatttttgtgaggtgatccgacaaaactgtcattagatttgtttggctagatttatttcttttctattctaaacttataattaattactttgttttcgaaagtccctaaagtttcgaatgttgatcaataaaagaaaacatagtaaccagaaaataggaccacgattaagagtgaagcatatggtggatggagctaacaatctatttttctttttcataccaactaccacacattaatcatatacttttcttgaattaggtctagagcaataaagtcagttatttaattagtatttacttgaataaatgaatcttgattcttgaccgtttcgataatcatggtcttttcatttttatcattttgtgcagattgattgtaccatgtttatttctgtttctaaccaacattcagaaacatttttattcgtaagaagaagatgcaagaaatgggttacaaggttggaggtagagggagactcggagattgtggtggggttccttaagtcgggaatcacaaactcacatccattctctttcttaatacgtttgtgctatgactttttgtcgcgtggctggatagtccgcgttttttcacgtgcatagagaaactaaccgcctaacggatgtgttaactaactatgctttttctcttcccttagatttttatttgttcgagggtagaccggatgtggttgtctctattgtctttgatgatgcgaacgggtctgcatacccacataatgttcgtatttgatttagttttaatttttttaattaataaaatgtggggacattgtcccccaaccctaccaaaaaaaagaaagaagatgcaagaaatttggaaagaaaagaaaagagtatgattgagtgatttgtcttttaggccgattttgggcctctttcggcccaataaactctatattaattcttccaattatatgtccacgtgtcctcttgcaccattcggttccgtacgccgtgtcacacttgattactcagctttgccgatgagataattaaccgtcctccgttgtatcgacggtcgaattttaatatctttgatccaacggtcacaattcgaagtcgtatttcccagcaaacatcgtcttcattgaaaattagacagatcgatataaatgtgttacctttgatttccccaatttctagggtttcgaaataatgactactacattcgaatttctgcaaccaagaatccacggatttgcaacttgttgtagtagtaatagtctattgtactcgaaagcttcgagatttttcaacgatcgttgtagggtttatcgccaaaatccgaatcggtttgtctccaattcaatcacgcttcctctgcagaagaaacaagttacagtgttgagaaatcacgaaaggtttaatctttgggatgggttttcaagaaagaagagtagattagttgtgaattgtcaagaagatgatcagaacgagagttctagtgaggaggaagaaagcagtcagagtactccggcgaagtcggagaggaaaagagagaagaaagaagataaggtgtggtggtcaaagggcaagaaatggcagtggcagccaataatccaagcgcaagggattggagttttgttgttgcaattgagtgttgttatgtttgtgatgcgattgcttcgacctggtatacctttacctggatcggagcctcgaattcagacgacttttgtgagtgtaccgtatagtgagttcttaagtaaagttaacagtaaccaggtgcagaaagtggaggttgatggggttcaagttttgtttaagttaagagatgatgggaagtggcaagagagtgaaactagtaggttgtctcagtcgtctgaatcgttgttaagaactgtggctcctacgaaaagggttgtgtattccactactaggccgggtgatatcaaaacaccgtatgagaagatgcttgggaataatgtggaatttggatcgcctgagaagcgttctggtggcttcttcaactctgcattggtatagtttcatttttactatttgtcctactccttgatgatgatgctttatagttttgcaatgaatggtgattgtgctataaaataggttgggtcttttcaaaagtttctatttttgtttgttgcagatagctcttttctacatagcggtacttgctgggcttattcgattccctgttagcttctccacggtttgcatctctactatactttaatgtggttgtttaaaattttgaatttcctaaaagaactatgggtgtacacagagttcaaccggccagcttaggacccgaaaggctggtggtcctgatgggggaaaagtctctggtggaggtgaaacaatcacttttgcggatgttgcaggtgttgatgaagcaaaggaagagctagaagaaatcgtggtaggtttttcagtccttaaagacgctgcacatgcttattgatgatcagattgtttttcatagctttattctcggtttggtaattgtcttttacacatcggttaatcaatgcaggaatttcttaggaatcctgaaaagtatgtccgtctaggtgcacgtcctccgcgtggtgtcctattggtgagttttatcatttgatttcactttattcttatattacgtatatatcatggtttaacgtttggttacaagagctctcctttagaatgatatgcctttgactcctttcttttccaggttggtcttcccggaacagggaaaacccttcttgcaaaggctgttgctggggaagctgaagtccccttcataagttgctctgcaagtgagtttgtagagctgtatgtcggtatgggtgcctcacgtgtaagggatctttttgcacgggccaagaaggaagctccatcgattatatttattgatgaggttagaataggtagtcgatgtcagattacctccggtatattaaacctctgggcatcttaaacaagattttctatttgcctctcatgctccagatagatgctgtggcaaaaagccgtgatggtaaattccgaatggggagcaacgatgaaagggagcaaactttaaatcagttgctcactgtaagtctgctgtcaagcacctttcctgtgtaagtagcattcttgatctttccatgacccattcacatgttggaaacttttctgcaggagatggatggttttgacagcaattctgcggttatcgttcttggagctacaaatcgtgccgatgtcttagatccggccctgcgtcgtcctgggagatttgatcgtgttgttacggttggtagaatggatcagctctgcctatttgtaaatgtttaatatggttttttcaaaggcactgatgcatttttcaggtggaaacgccagacaaaattggaagagaatccattttgagagtacatgtgtcaaagaaagagcttcctttgggagatgatgtcaacctcggtagtattgcctcaatgaccactggtttcacggggtacgcttttgtatattatcaatgatttgaagtttattcagttatacgtttttgggtgtatatctcataaactcttttgtcctatttgcagggcagatcttgcaaacttggtaaatgaggctgccttgctagctggaagaaagaacaagacgaacgttgagaaaattgacttcattcaagctgtggagcgatcaatagcggtatctctataacctcgctgttttattgattacgtaaggcaattgtcaaaatgtgttttcttacaaagacctgtttcagggcatagagaagaaatctgcaagattaaaaggcaatgagaaggcagtggtcgcaaggcatgaagctgggcatgcagtggttggtaccgctgttgcaaatcttcttactggacagccacgtgttgaggtaaaatgcaaaaactttgtctacatttacgctcattgtttatgttgtttagtacgtgcaaatgattcaagttttgctcatctttgtggtgttgtcagaaattaagcatattgccaagaacaggaggggcattgggatttacatacattcctcctactagtgaagacagatatttactcttcattgatgagctgcttgggcgtttagttacccttcttggaggtcgtgcagctgaagaagttgtttactcagggcgtatatcaacaggtgcatttgatgatataaggcgggcaactgatatggcatacaaggcagtagctgaatacggtcttaaccaaaaaatcggacctgtgtctgtggctacactttctggtggtgggattgacgattctggaggctcgccatggggaagagatcaggtaacttcatgttgcaatgcacttgcctaggttgtcttataatttccaattgtccatgcaaaagttaaccttccatgttaatacacaggggaaactagttgatcttgttcaaaaagaagtgacaattttgttacaatctgctctcgatgttgcgctgtctgttgtacgcgctaatccagatgtattggaagggcttggtgctcaacttgaaggtgtagtataagtttatttgttttcatcagaacagtttttgaaaacatgtaggacactaaaggatataactgcttgcgagaaagattatatcccttgtcttgagtttggttcatgtgacaactggctgattttgctgatgaaatatcatgttttggtgcagagaaagagaaagtagaaggtgaagaactgcagaagtggttaagcatggtggttgcaccagaagaactcgcagtctttgtcgaaggaaagcaagagcttttgctcccagcacaagctagctccagttaacaactactctgttctatcatcaattatagctataaagacagtatctaacacggatcatcagctctttccttgctgccttctgtatctccaggtcagatctggttatcaccattgccctttagcatccatggttccagcatgcatagaacacttgaatcaaacttgaagaaccatattgggatatgacttttggtgataactcatagattttggtggatgtgttttaagatttggtattcttgctagatacagtctctttaacttggcaaaaaagtgtataattgattcatatgtataaaaagccagactgatatgtgtaaagatcttaaagacccccacaaaaggttgcaacagcatcactcattgtactccagaaaaagttgcattagcattactcatattagtctattattctcagatttctcgaagtagtggagttaatcttgaaaatgttcagaaaaataaataactagatcatgtgatgtcaaataagattaagaaagagtagcttatatataagtgaaatccgaagaattatagagaatgaaaacagaggcatgaataatgcaaattactatacatttttttcttctatttcttgaagaggcttcctaagccaccaaatccaccctcgctcttcttcggcacaggcgtcggagctgagtttttaccaccgcgaacggttcctcggcctccggtggtggtgccttctttctcatccaccttctttagaagtggattagtctcatagaactgatcttgttttgtcataaacccaagaacaaagtcgatgggattcttctcctcctttgggccgcctgaacctccctttgtgcttgtggcgtaaaccctcacggtggccggagcaaatgacataagaagcgaagaaaccattgttgttatctctctctcttctctggtttttctttatcggtagtgtgtgtatgtgtgtcttcgtgtggcatttgttacgaagggattataacgaggttggttgaatctgagccgttggatttttttggcacaagctctccacaagtgtcttatcctctttcttttttcccttcacacatttttctttgaatcacttggatacattttttttggtttaattgtttttagatatatcttggcacaatttatgtatattcttctcaagttcttaaacggaaatttgcacagagagtcaaagtcttcaatttcagatttataatttatttgtcaaatgaaatgtatgaatgcggaagagacacgacttgattttttttaagtgtgtgatcttgtccctgaccatgttggttgttagctgctgcaacttgagactctgatcaaaactaaaaaccttttttctgttattgggccgacgaggcccatttctttaaaaggaactgtgacaagatgggatataaagctctagagtagactcctacgagtagcgccacaacactgatgaacgaagctcgaagaaagttacaagataaattccattaaacgattcaaatatgcgcacttattatttcaccaaaagcaatgctcagtgtttattattcgtgtaatagtgttggatctacacatgttcttattcgatggaatctgcgaccgtatatactactgagtgaaaaattaggcaaaagcaaaaagaaaaaagaaccaaagagaagcaatgtttcatcagccgcaatggttcactcaaaaacactacttacacttttcctcttgcttctatcgtgtacctaagttccgtgtcgctgtctcttcactccaaacaaaccaacatccattcactgccattcgctccttctcaaaccatttcctgagtagaatcttctaaagggaaacacgtctcttcaccaccggtattccagaggaaattggcgtagttggcggcgtagaaggagttggtagggtctgcagatatagcttctagaaagttctcctcagcagcccagagatcattccgaactttccacaggaagatggcgtatttgctgtacgtttctgcgtctacatcttctgactctattgctttcttgaagcagttctccgctctaatacataaccaaaagcaaacatcatttgtcaagttccagagttacatagaatcataaccaatcttttgatactcaatgtgtcaagtgcaagcatatacttctcaaagtacaggtaataaagtcttgaatgttagatgcaagaataggttaaaaggatatctcacctctcatggtcttgagtaacgaggtaaaggaactgagcgtagttagctaggagcagatgattgtcaggctcttgagccaaacctatcttatataaaagctcagttctagtgtaattggcataatcatccaattcaatccttgcagtgatcggtgaaacaagtctcaatctcatgtcacgatcaacagaggaatcttgcatttgatctgcttcttccaccatcgaattccacagactcacctcctcttctctcatcccttctcctgaaaccgagtctcgatgtctcggcaagtgggaaaccttgtcaaaattgatcgatcctaaccatttggacccatcaagcttcgtagactcctttaacgaagaaaaatcaatcctttgttgcgtctgatccggacctttattaacaactggaggagatgctgcaataggtaggtttgatgcaactgaatgcacagtgtagttcgccaaaaggatcatcacataaaccatcaaagtaggtgtctgagagaacacacgttggaaaatccacaacaatgaagcgtgcatttccttcttaacctgcttaagaacacccactctagtctgcaacgcaaagctatgaagctcctcaatcatgaaaaccatagaagaaaaagctctattgatagaacagtaagtagtagcactagctttcttaagagcttcttcttgtaacttcctctttattatcctaagtgatagaggtaaatcaacactgtttgctttacgctcaatacttgaatggttaaccatctctgcccatggagcttccaaagaagctaaacctggaacagactcttgtaatagcttcaaagaaccaaatctatgattattgctatcgttatcgttatctactgcttctgatttctgtttgttctcttcttcttcttcatcgcctgcgtttctgaattgtgaagctaattcctgcattttcacagagaatgcttcgtcggaggagaagaaaccggagctcgcactacaaactcttctcaaaggattatgtttcttcttcacatcagttctaatcttcttcgtggtggaattagaaaattgccaaagctcacatgatttagatcggtgaagtttcccagattgtgttccgagaaacgtcgaaggttttaatctcaaagatcctcctccgacggaaacatcaccggctattccacgagaacgacggcgtttagatgaagttagggtttgcgaaaatgacggacattgaggaatcgctgtgtgtcgtcctgaccaatgaaacgacgtcgttgttgctactttcacttccattattccgatgaaacgcaaacaaatctcagaatctgtataaatcgagaaaagctataaagattaagacaaaattgattacgagaaattgaaagataagagagaatgagaatgagaaagagagagagcttacttcttcttggtgattcgaaattcgttcgttgagagagagattttctcgggagaattttttgtatggttgtcaggtcaaatcgaattcagaggcttacgagagctcctgaactttgttagaaacagagaagaagaagaagaagaagacaaaagcccttgtatgtttatataccaagagagaaaaattagtaaattatttaattaatttaccggatataggcggtgaaaaggcgcgtgctattttagagaagagattggttttatttatttattccacgggtagagacggttacaggtgatgaatgataaggattcggctaaactaagcgacgcggtttattcgggaaaattttgctttcatcgcggcttcatcgatcttgatctgacggatgagaatgaatcacgtgttggttgatatagcttcggtttgatctattgccacgtagggggttgaagaatatggagatgggttcacggacctaacgaggacacaaacttgggttttctcgatattgagtgttatgaaatttgtattttctcgatttattcctgaaaacgaaagtatgaaaagaaaatagcttgttttagagtagattatctcattctctaataagatttgttttaacaaaaattagaatcagatttttagaaaaagctttaaaatcttgatatagatatacgttcaagaaaatggattatctttaccaaatacagagataagtctatatgcatgatgcactgtttagtgcaattttatggcataaccatacaattacatataatgaaagacaacaacattaaacagtacttggggccttgacaaaactaaatgggctttatatcttatcacgaatatggacccatcgaccattggacccaagtctttggatttaaagagtctctgtatttggctttacatgacttcccagccaagaaactgcaaactgtagtctagtttccaaaacctaacagcaggaaacaagaagcatcaaaacagtaacgaaaagacaaggatagagatccaagaattgtctggtttagggtttattgaggagcccaattatgcgttttagatttgcagcaacgagaaagagaaacgagggtttagggtttaagacaatgatggaaataagagagcataaacagaggaaaaaaacaaaccacagattacgaaagacagtatgatattatataggcctcaaagtaaggcttttaagtggatggcaaagtttgtagagaaaaccataaacacttcaacgtctggctgttctccgggttttaaagaatctctctctgattgagattaactccttggctgcttcactcgttgccaaccggttcagcggagattcttcacaacatctaagtcccacatccaaaatccctttcaagcactcaagtacagggaaaccaactctgagaccactatgaagaatcgatttgtctgcaatgtccaaaactctttctggcaaggccgccttggtgtagctgttcagggtaaagtttcctccaaataactcattggttggtctttttccagtgaacatttccaaaacgagaaccccaaagctatatacatcaccgtgtattgacggttgtcctcccattccatattctgcaccataattcacacacacaaaaacgacaacaagattgtaatgaaaaaaggaacacataaatattcttcatttaaacgttccatatgtgtaatagttttacctggtgcggcatacccaatggttcctctaacaccagctgagcttagttggttgaagaaagactcctggtcgaatttgaggagaagacgagcgagaccgaagtcgctaacatgggcagttagatcatcgtcgagaagtatgttgcttggcttaagatcgcaatgagctataggctcatgacagtgaacatgaagatagtccaaaacagaagccacgtctatggcaatgttaagcctttcaagaagtgtcaaagttcttgagggcctatgaatctcttcgacttcctctgggtgcagccatttatccaaacttccattcggcatgaactcatagatgagagctctgaattcgttaccttggaaatcaatactagcgcaagctgtcaatagtttcacgagattacgatgccttatatccttcaaagattcacattctgccataaagctcttcatagctccacgtctctgcatgtttagaactttcactgcaacaatcttgttctccgtctggagcaatgccttaaacacagtaccaaaactacctgacccaactatattgctcgaagagaagccatctgtcgcatttcgtagatctccataacttagcttttcatggaaaatctccaatgtaaaaggagctgaattattgatcttctggttgttctttctttttttgaaccagcttagagaaactatgaacaatagcaaaagcaaagctatgcctacgctgaccccaatcgcaactttcttcaaaagagatggatgccttgtctccactggtggtgcttgggcaatgcatggctttagtttcagttccttgatgcttccacaaagatttttgtttccgaatactgaaactaaagtagcattttgaaatattccttctgttgggactcttccctcgaaattgttatcggatagattgagatattccaacttggaaaagttttcaaaatattcagatatacttccagagagattattgtttgacaaatcaacgtttttaacacccatcaacccttttatatctggaatggttccatcaaaatggttttcttgtagataaataacttccatcgaaagacattttcccaaagtttgtgggagatgtcctgataagttattattcccaagtaatagctcaacaagattttgtaatcttccaatatcgtttggtagagagccactcaaagaattagattccatgttgaggtgaacaagggttgggatttgcatgatctccttaggtatagtcccatttaacttattatacccaatctgtaagtcgagcatgtgactacaatcaccaagactcggaggaacgattccttcaaaactattgttggataaatatagttttactaactgagtaaggttgcctataaaagagggtatctctccagaaaacctatttgaaaacaaaattaattccccgagccctacaagatttccaagagaggttgggagtggtcctgttaatagattatctgccaacaaaagtgattgtaggcctatgagatttccaatatcatgaggaatgcttccataaatgaggtttcctttaaggttcaaaacggtgagttccgtggacatattgacaatggatgtaggcaaagcacccccaagcctattgtaactcacagataacccatgcaaatgggagcaattagtcaaagcatcaagaaatgcaagatctccaaaagagtaacttcccaaagaattgttagcaagttctaggtaatgcaaattctctagttttccaaagttgggagagatacttcctgtcatcctgtttttaccaattccaaacatttccagagttgaaatattggcaagtgttgttgggatggctcctgttagaaaatttccatgcaaagataactcatgaatgtttggtagcagattaccaaaatcaggcttcaagttacccgagaaaccattaccaaggaggtataaattctcaagtgaggacaagttgtagaaagcaggaggaaaaacgccagagaagttgttcattgttaatgtaagagacaccatttgactcagcatagctatatcatctggaatttctccttccagatgattatatcccaagttgagcactattagagacgtcaagtttcgtataaatacggggaactttcctttgaggtcgtttagaccaagatatagataaagaagctttctcaatgaccctagttctgaaggaacaccgtctccaagattgtttgaaaataaatcaaggtacaacaatctagagcagttggacaaactggctggaatctctccttccagataattaaagcccacagccaaatatttaagtctaaacaagtttcccatctcttgagggatggttccaccaaaagagttattagagaggtcaagatatatgagaaacgaaagattaccaatagatggtgatatcactcctcccaactgcaatcctccgaggtccaaacgagtaactctcttgtgtttgcggccacatctaacccacttccagctgcagagagggaatgagttattccacgcggacaaggcatcccttttgctttcagaaacttgagacttgatctccaacaacgcttgcctatcactttcatcggtaaaaccatatgcttcgagttgcatgagagcattgaaagcaagtaaaagaaatagtctcatgcttctcttttctttttttgttggttaaaatattgtggttcttctcaaactttgcaggaagtaaatatataagagacgaagcaattgcaaaatgcctacttgtagtgctaacgcaacttgaagccaaataggaatgatcaactaccagatttttccaaaatataagtcaagaagtcaactgcctaaaaagacaaggaaagattaagatgcgcatttaactagtctttctgacttttctataggcatcatgtggtggctggatttatcggtcccatatgtctggaatctgaacaattaattagcttaagcatggaacattactatcacacggcagtcatcttttgtcttaaaccacacaacactactttatgatattgagcaaccatacatgtgacaagccctttcattgcttgcaaactttgtagaggaaaccaaaaaaacacttcagcctcgaaccaatagcttgagcgaaggtgctcgcagttattcttcccagtaactcagatggacaaaaactacagaacacacgttacacttacatgacagaaaatctgaaataacactaaataatcaagcaatttacccaaataattctttgattccatttttgcatagaccaagtcaataagattgaattaaaatgaaaaagaagaaatgcaatttacctcttaaacttgctttctaaagattaagacgagaattgattgatcactgcaatcatgaacacgttcaaagctgctggttcagaaaaaaccacagaaatatatagcaaaaataaatggttgcagctttaaaagtttagcatgatcatcgcagaaaaacacattttcagtttaaaacttgatcagctctaacatcacaatccagagactttttcttactcttcggtaccaaaaaagaagagaaggtaaagaaggtaagcgaatggcttcctttgaaattgctgttaggttcccaagagatgcagggaaattccctgtcaggttgtttacacggagagataaaaggacaagcagaggaagcgaacccagtttagaaggaacctcgtgttcaagattgttggaggatagatcattggtcaaaagggaaaaacagttagatatatatgccaagtggaatcccacctccaagaatgatcttgctcaggttcaagtgttgaagcctgaacagcttccctacctcaagagggatactaccattggaagagttgtacgtgagactaagagatgtgaggaaatagaggttaccgatagagggcgagataacaccggttagtttcattccttcgagatccaaccagtgactctcttgtgattccgactacatgtgaccccagtccatttgcagagagaaaaagagtcattccatgaagccaagacaactcaggtgttctctgataggttagagtttactgaaacttgagcggtgcttgtttatcggtcttatcagtgtatgtggatgcctgacagtagaacacaagagcatgaagagagtaaatgaaagacatatttgtgtaattttgtagtcttcccttcctgagggggtaaagtatattaaaaaatggcagtaattattcaaaagtacctctgccagaagagtgtcgccttcctaatcaattaattggaaaataatcaacatccctgcatcattaagagaagaaatatgttattttaaggaaatacaatatgttgattggaagccatcaacagtattgtaaatagtcaacagaagtgggcggtaattaaaaaatagcgaaagctcgttaatactttttatgttaagactttctttggagtcatcatgaaaatgaaagagtgctcagagtgtgacaaactatataattcaccattgacactttggctgtcgtccttttcaggtaacatctccagcagcaggggtccatagctgtacaaattcctcattaccatactctgatacagatttcttagagacatgagagctatgaaaactgtattttcttatccattcataagagaggataggtgaataagtcttctaaatgtcagtaactccttttgtacctgcaggttgaatcaaatggtcacattatagagttcgtctctttaaagagttagcaagacaaaaagaagaggcatgtgacaagggagctgctgttgaagatgcggaaagactcattcagcaagatacttagaatgttaatagtaaaaaaaattgaaaaaatgaaagaaaaaaaaaattaatctacaatgtgaagatattttattgaataagacagagaatgtttaatagcctgtctcattgcacaagacacattacaaatacacccatgacactggcacaataatttaaaactacaaaccattcagtagaatactcgtacattcataaaaatacagacacatctagtaaagagatatatatacatgcgtacctatatctcgtggctttaatagtagtctctcgtacgacaactcgttaagtctcctcgtctctgaaaaaactttctctgatagagaccagcttgcttatagcctcagccattgatatccggtttaccggtgattcttctgaacaactgactcccacccgaaacacaagggtcaagcattcgaccatattgaaatgctgagcatatgcaccacggagaatagtttcgtctgtgatatctagtgcttgtcgtttctgcaatgctgatttagtaaaactatgtagagttaaaccgtccacgaataacttattggtgggtctttttccagtgaaaatctccaataggacaataccaaaactgtacacgtctcccataattgatggatgacctcccataccatattctacaaagttcagtaataacaacaacaagactaaagaatattaggacgactgtctggtctctgcttgagataattacctaataacgattataaattttaaagtaaaataagcatacctggtgcagcatagccaatggttccacgaacacctgcagagctgaattgaatatggaatgtatcccgatcaaattttagtaggagttgtgccaaaccaaagtcgcttacatgagcagtcaaatctttgtctagtagaatattgcttggcttaatatcacagtgggctatagggttgtgacaataagtatgaagataaaccagagccgaagcaacatctatggcaatgttgagtctcgcaaaaaggcccagggttctcgagggattgccagtttcttctatttcatccgggtgcagccacatgtccaagtttccattaggcatgaactcatacactagagctctaaaatcatttccttcaaaatcagaacttgaacagatagtaaccaacttcacaaggttgcgatgccttatacctcctaatgcttcacattccgctatgaaactctttgcagcaccacgtttgcagagattcaaaactttaatggcaacagccttgttcttggacccaagaaatcctttaaacacagccccaaagttacccgacccaatcaaattgctggaagagaagccaccggttgtcttgtagagctcatcataacttatcttttcataaaacgatttcactggggagaaagaccgatcattctcattattattagctctgacactcttcactctcagtttgtaccagcatagataaaccacacacagacatagaagcaaaagtgctgccataactgcactgacacaaatggtgattatctttctgactgatgaatgccttcttggtaattcaacagagcatggctgaagctgtaatgacgggatgcctccacagaggtttatgttaccaaagaccgacatcgcactggtattacgaaataccccttccgttggcacagctccgtcgaagttgttcaaagagagattcaggttctgcagtttggaaaagttcgccatatattcaggtattgtaccagagagattattcttcgacagatctaggaatctgaggccagtcaaccctcttatatctggaatgggcccaacaaatgaattcccttgcagcaaaaggaattctagtgagagacaattcgccaaggtttgtggaatctgtcctgatagtttattgtatgaaacgtctagagctaatagaaatttaagctttccaatgtcttgtctcaaagggccaaccaacaaattaaatgagacatttaagacgacaagagatggaagttccataagctcatggggtatgctgccattcaacttattagtaccgaggttcaagtctagaaggtagctgcaacttccaagacttgaagggatgcttccttcaaaactgttgttaagcagatacaggtatgttagcccactgatattccccaaggaagatggtatctctccagacagtccatttgaatagagcaagacttttctcaattcagaaagttctcccaatgagggaggaagtttgcctgtcaacagattttcgcccaagtctaatgtttgcaggcttacaagattccctatgccatgaggaatacttccagagatgagatttccaccaagagagagctcagttaattgggtggagagattggctataaagacaggcaactgaccgccgagtttgttgaagccaacattcaaatactgcaactgactgcagttagtcagtgcaccaagaaaatcaagatcaccagaagagtagtttcccagagagttattattaaggcctagcagtaatagattctgaagtcttccgaaactcaatggtatctttccagtaagatggttagacggaatatcaagttgtcgaagacttgagatattggaaagtgtctctggaatggtacccgtgaaactatttatccccatatatagtatttgaaggttagggagaagagaaccaaagtcaggtctaagggtgccagagaaactgttgccggtaatggacaggaatattagtgaagacaggttgtaaattggaggagggaaaaccccattaaacttgtttaatgctattcggaaaaagatcatctgtttcagtctggctatatccccagggatctctccttctatttggttatatataaaatcgagcatctggagtgatgtcaggtttcccaatgaggcaggaaacttccctgttagattgtttctaccaagagagagaaggacaagcttagacagcgaaccaaactccaaaggcacgccttgttcaagatgatttgatgataaatcaagtgttgacaggctagagcagttcgacagaacaaccggaatcacccctccaaataaattattgctcatgttcaaatattgaagcctgaacaagtttccaacctctgaagggatggcaccatggaaaaagttgtctgcaagattcaaagatctaagaaatgagaggttaccaacaaagggagagactacaccggttagttttagtcctccaagatccacaccagttactctcctgtgtttgaggccacacttaacaccggtccagctacagagaggcagggagtcattccacgagcccaacacaactctacttgtttcagaaacttgagacttgaactcaagcaatgcttgtttatcagtctcctccgtcaatctgattgtttgtgcacagaccatatctgaatgttcaagtgacacagagacaagtaaagcagatacaagaatcagtctcataacaatacaaggaacccccatgggttggaaaagctttttttttcctaaacgaaacggagacaaaaaattctttcacaaccaggatgactgttgagattatgagcaaataaaaatctggcggctttggttccctatacaataatgaggaatatgtagtatagtagccttttagaaactcgcaaacaaagtaatgatattccaaaaccacggggcttgcagcctgcggtatgcagattattctcaatcctcgttgactattagggtcaaagtccaatagagcaatgacttattctcatgttgcctcattattcactgcttcatttcgcccaagtcaactatcagacgcttatcaaatactatatactttagttttaccaaggaaaacttgattaattaacactaatagcaacgaccattcttataaaaatgtagctgagggatgtttgtcaagttcttagcagtgaccatgacatcaacgatttcgatatacaccaacttgcttctatatatttctcagcaaaatacaataaaataaataattcgagagtatcttaatcatattcatatctagcagaagaaaaattcaaatctcactatatgatacagtaatttatacacaattctttgttcagttttttatagacaaagtcattaggaattgaaaggaaaatatttacagtttacctctttaatttgcatatgacaagaacagcaagcgttgcactaatccatccatatgacacgtacaaggagagccagagtcactcatccctgtagaacctgagtctgtaaccacaggtcaacacagccactaacaacaaaaggtataatgagatagcaaaaattctgtaaataaacgaaaaaggatataacgacttctttcattccaaacggaaaaatcaacaagtctcaggtgtcacaacaaacatagaatccccgttacagaatgaagcagtttatataaccacaggtaactctcttggaaagaacaaaggtcatttccacagacactagctaaaactgaaaaccattgagtatgcataccactatctacccctttaacgacggcgatcttcccttcttaatgaatccctatctttttcctccctgtcgttacgatctcttctagattctgccttccttttctcccaatcttgtgctctggatcccttgtcctcccttacataatcaatttcatcattgtgccttctagaatacgcattatcataccgtcctgatctcttttgttccttcatatcataagcatctcttgaccttggccccatatcctccctatccactctttctctctctttagggcggccatacgaggcatctccatcaccccttcctctgtaacttttctcttccacatcaggtttgaaatctcctcgattgccaaaacttgtaccaccctttttagcaccatttaacttgtcttgatcccacttggaacttctatcctcttcatgaccccaaccagtagttgcagctctctgtccattaaaaaaggtttcaagaaaataaatgagataaacagtatgttataacttctatcaagtatttattcaaaatcatctctcgaaagaatagattactcgcttacatactttttcatcatgtgaaaatttacaagaatcaccacgagtacactctcctctctgaaaagctctgcaaacaccacgaccctctctattcttgtcatgatcccacttggaacttctatcctcttcatgaccccaaccagtatttgcagctctctgtccataaaaaaaaagggttaacttctatcaagcattcatcaaaatcatctgttgaaaagaataaagtacaaaatcacgcttacttactttttcatcgtgggaaaatttgcaagaatcaccacgagtacactctcctctctgaaaagctctgcatacaccacgagcctctctattctggcgtcgcgtctcttcatcctcctcttcgtgctttttgtatgccccacaatggtccaccttaatggtccgtcccaacacaagagctccattcagattatctacaatcaccaaaaacagaacccaattacaaatcctaacacctaaaaaaaaagtaaatttcacatgtacaagagtcagtttcactaaccaacagcaagaatggtacttctctgatcttcataagcaagaaaagcaaaacctttagatttacccgttcccttgtctcgaataagattgacatcaacaatttcaccatatctgcaattccacaaaacaaaaagacattaaacctataaacccattaaaaaaattgaaactttagaaacgaaacacaacacttactgagagaagacggcgagaagatcaccttcggtgagatcgaacggtatgcctccgacgtagacatatgcagagtttttgtacttagcgtgccatgaagcttcatcagatattcctaaatctgattccctagcgtttatcttctgtagattcttcacctgcgtcaatggattcatcttttcaaatttctctgcgttcgttgccgggaggaaccctaaaactaggaaatgagagattagcctgagcgggtcgggttttaatgacccgtttcctaattagattaaccgacccggattgaggcccatttattctattccctttctagaataaatgtctaatattatttttacatcttctacgtgaattcgggtatccgttcgggttcagttctttttttcggatacccgttcagattcggttcttttttcgggtatcggatctatttgggtaggagattgagaaccattcgggtattcttaaatttcggttcggtttcgattcgggtcggttcggttattttagtaaaaatgtaaaaatgaccaaaaatatccaaaatattttcaggttcgggttaggttcgggttttttctcatatatacccaaatctatccgaaatacccgattacccgtaaatatattggttactttttatccaaatataaccaaatgtaacaaaaatacttaaattatctaaaaaaaactataacattggttacttttatcccaaatatatctaaatgtatatgaattactaaaaatatctagtatattcggatttataattttaatttttggtgtttgaggtattacaaatatatatataactaatatttttaggtttatatttgtattcgggtatctacgggtattagattaggtccgggttcggttcgggttttttcgggtagtgaagtgtaggatccattcaggtaattctaaaattgagttcgggttcagttcgattatttttcgggtttttcggttcgggtatttggttccggttattatggccaggcctagcgaatatgttcaattttgatatataaagaaaaattctaaaactccaattaggttaagttaggtttcgctagaatagcctttgaaacgtttgaagaagacaatgaagttgtgtttacggctattgtgcatccaccaaaagaaatttttggctaagaaaagggaagcgaaaaaggttaaagcgaagaaactcgatcctctatccggcaccgatttacattcctctcgatcttcagatctatacacttttaagattgcctgtgaagtctttattgagattccggtgcgcctccaagctttggtcctctatcaccaccagccaatatttcaaaaaacagcacttgaacattacatcttcctcagctcctccacgtcttctcattgcttttcaggactttcacggtaaaaagcttatgttagtctcgtcgcctaacccatacgtatcttcctcttcctcttcctcttcttcatgttgtgtaccttataaagatctgaacgtctttaaaattaatgggaaactagtgtataatgcggttcggggcttgatctgcataagtagactaagtatggggatttgtaaccctagcacaaggcagcttcagttttttccccaactcaagtacaaagaagatccaaaactttttacatgccccaattattttgttgggtacgattctattgaagatcaatacaaagtgctcgcaattgatcgttttcatttgagaatggagcacaagattctgttattgggaagagaagaagcttggagagaggctccatgtgttgcatgtcctcatgtttctcatacctcggggctctatatgaacggtaccctgtactacggggcgtctaggacggatatcgatccctggaataacaattctgtaattgtgagtttcgatgttaggcttgaaacgttcaaaatcatcaatgtaccaagcaaagttctaccaatgggttatgaaaatatgtggcttgctgagaggtggaggaatcttacagataaaactctgatcaactacaaaggaaaaatcggtgtggttgagaatgctcgtcaaggtagttttcgaatgtgggttgtggaagatgctgagaaagaggaatggtctatgaacactttttatttgccccaatctgctgctggccttgacttcaacatcatggataccttttataccggcgagatttgtcaggttccgaaagaattgtcagatcctttttcgtctattatggtcttatgagaatatgcacaatactaatatgtagatgtgtacgaataaaacttcgatcaactagggagaaaaatttggtggggttgagaatcctcataaggttttcgaaggtgggttgtggaagatgctgagaaagagggatggtccatcaacacttttcatttgcctaaatctgcttttttccttgacttcgacgtcacgtacggatacctttgatgctgcaacagcctcaatggtttttttttgttgacacaatggtttcttcttcagttcttgacacaaatgttaaagaagatgacgatgaaaggataatgaatctgtgaaagatgattagtaattatctgtcatagttctcttaaaagtgttcttaagtcttagtacatctaccttctgtcttttttttttttttaattgaatgtaaaattaattcaaaaccataaaaataaaaaactgtttttacatcaagtgctgcaactaccttctgtcatggttctttttctaattgtatccttgttaagttttcatttgtttccgaatcttgagattgtagttgatgatcatataaattatagaactgaacaaagttagaccaaatctataaatgttatagtcaacagtaaactcgaatccgtgagtgcagttccaagccttttagctctagatttggaggagaattgaatggtctgttctggaatgatcttctgtcatgtttgtttgaatatttatccaagacacacacaaaaaaattgtttgtttgcattcactttttgtttgttgggttgattttttaaaattcaacaatccatgatgatctaatgttctagacctatcattttggtaaatctataccactaaaaaattcatagttttatattttaaattagtacttgataaataaccgtaaaagtaatgaaaaaattatgtttgaaaatataatgattgaatataacttaatatatattgataactaccttgtttttgagttattatttgaaaaatacactttctttattttttaacaaatattacaacttttaatatataaaataacagttttgtccagatttaaaacaaaaactgttttcttaataaattaaaaaaaaaaaaaatttagaaaaaataaaataagataaagtcattagcttgtttatttttcaaatatttttgagataaaaacagtttattatttttatattaaaattttacaaaatgatatctaaaatattgtttagtctatcacttaataaagtttatttatttatttgtttggacgaattttatttaaaaatatttaagataagaattatctttaaaaattttagttgcatcaacttttaatttatggatttctttttattttaagttcaaaatatttttaactattgctaaattttagtgaggctatttaattatttatatattaaaattttaaatttaaaaaaagaaaaaaggatagggtatttttcaaatgaaaactcataaagaagttattttccaaatttactctaaagacaatttcttaaagatgaatttcaccaaatcaacatcataatttaatttaaatttcatgaagaaaagtatatattgtaaaagttctattattttgattccatttataaaaaaaaaacaaaatctgttaaatattgatgatgattttgttttaaattattcttaaataaaatctataaaatcaattctttttgttaacactataaaatcaattcttgtgatatttttcttaagacttttatatttccattgccatttatttcccctttttccttattcatattgtttcttccggaggaaaaaaaaaatagttttagggttttgtagagaaacaaggcttctgtccgattttgacagcaatctagccgatgaaaccgatttacattcctctttatctccagattaatatactcttaagattacctgtgaaatctttattgagattttgatgcgtctccaagctttggtcaactatcatcaccagccaagatttcggaaaacagcactttaatattacttcttcctcagctcctcttcgtctcctcattgcttttgaggacttttacggaggaaatcttctgttagtcttgtcgcctaaccgaaacatattttcctcttcctcttcatgttgtgtaccgtactgagatttgagcctactcaaaattaaaggtaaaatggtgtataatacggatcggggtttgatctgcgttggaggtttttcaaatgttgcgatctgtaatcccagcacgagacaactgcatatttttcccgaattcaaattcaaaaaaagtccaaaagtttttccacgcccccagtacatgccgttgatactcttccttggagattagagcacaaggttattgtattgggaggagaagaagcttggagagagacttcgtgtatcgcctttcctcatattggctatacccaggggatgtgtatgaacggtaccctctactacggagctgcctggaaggacactcattccccggatagtaattctataattgtgagttttgatgttaggcttgaaacgttcaacatcatcaatgtaccaagcaaacttctaccagtggattatgagaatatgtgggtagttaagacgttgattcctacagataaaactctgatcaactacaaaggaaaagttagtgtggttgagcatcctcgtgagggtgcttttcgaatgtgggttgtagaagatgttgagaaagaggaatggtccatgaacacgtttcatttgcatgaatctgttgttggccttgacttcaaggtcatgaataccttttatactggcgagatttgtctggttccaaaagtattgttgacaagtattgttgacgatcacttttgtcttttctattacaatttggagaggaaaagcatgagaagtgtcacaattgaaggactgcctatacccgagcttaagcgactccgtaatgacctgtgactgtttctgatcatcatgagagcttcatgttcttagaaaccgaaagttaattttggcttttctttatatatatggttttttctggtaatcagggtgtgataccgcttttaccacttattagttcttctacggtgagtgtagccatctagtagctcactgaccgggttttctaatgggtagaaagcattgtatcccttcgaataaatcaaagataataatttcattgaacttggtttattatatatgagaacattagggcatctccatcagtcggatactttctgagtttctcaaaaaaaaaaagtattttaataaatattagttttataattaaatttttaattataaaataaaatttaaccaatagttgatatacatttgtttttatggatttcaagtgataaatgagtttctcatagtttctcactttagagactttctccattcacttagactaccagttgtattgacaactttccatcttgttgacttatggtggtgggatgcttgtgtacttaaattcagttcggtctaattcctcactttcgtttgaatcttctcttaagcatgtttgatataaatatttgaaaacatatataaaccaaaaaattatatatttgttctgactttaatacacaagtcagagaagtaaagagaaatacaatatatggaaaatatttctactacaagaacacttccaaattccaatgagggaagggtttgctagggttttcctttgattatttatagggttttgtagagaaacaaatcaatcttaaaaagaagacaatgaaatttggtccgaatacgacacagatttacattcctctcgacctccagattaatatactcttaagattacctgtcaagtctttattgagatttcgatgtgtctccaagctttggtgttctattatcaccagccacgattttcgaaaccgtcactttaatatcacttcttcttcagctcctcctcgtcttctcattgcttttcaggacttttacggagaaaagcttctgctagtttcgtcgcctaacccaaacgtatcttcctcttccacttcttcatgttgtgtaccctataaagatctgagtaaagtcgaaataaatggacgaaaggtttataatgcggtttggggattgacttgctttgaaagtagattaaaggttgggatttgtaaccccagcacgagggagctgcatatgtttccccaaatcaaattcaaaaattatccagacatttttccatgcatcatgtactttcttgggtacgatcgtattgaagatcaatacaaagtgctcgccattgataatttaccttggagattggagtacaaagttgtggtattgggagaagaagaagaagcttggaaagaggctccatgtgttgcatgtcctcatcttgctaatacaatggggcttaatatgaatggaagcctatactacgggcctcgaggaaggacaagggttctccaaatatatctataattgtgagttttgatgttaggtctgaaacgtacaaaaactccaatgtaccaagcaaacttctaccaatggacacttctgataatttttggactgctaattgcaattgttttattggggataaaactctgatcaactacaacggtaaaattggtgtggttgagaaacctcaacatggtagatttcgaatgtgggttgttgaagatgctgagaaagaggaatggtctatgaacactttttatttgccccaatctgcttctggccttgacttcaaggtcatgaataccttttataccggcgagatctgtctagttacagaaaaaatatctgatccgttttgtctcttctattacaatttgaagacaaatagcatgagaagtgtcacgtatgaaggactactacatatggccacgtttaagcaagcgttgcaattcagtgtatcatatcattatgagagcttggtgtccttagaaacttgaattgaattttagggtttttctttatatttattttgggaagcaccaagattcaagcatttccagcttaaaatcatggttttgagtatatttaaggaagttccaagatggcatcatgcatggtcgattagtgggggaagtccttttcagcttaaattcatggtttgagcaaagattttgtatactttaagagaacttttagctgaaacaataacagattgtagatttgtgagtgaaagccatttcttgaagaagaggttattaaattcagacatgaatgtacaacagaaataagagtttttgggaaccaaaagccaaatgcagataaaaagaaaagcaagtagaaatggacttccccaagaaatagttacactatattacttactactactctaaaacattatatacatatacattcagataaaagtttaccagacccggtttcggcttttgccaaagctcttctccgtcttatttacttgacatggcaatcataaggagaagaagcaaacacttgatctggaaccactagaggtagcttctctatatacacaaacaacctcttcttattctcccgctcaattgtatacatattaaccgtatcggatttctccattaacatccataagtcccctgagtttactctcttaagactgtctcggcaaaaagggcatgattctgacctcccgtgcctgcaagaaatcatcggttattactgattcatcgatattatacgaaaaaataatgcagaaatgacttaccaatcgcggtaacacttgatgcataaagaatgcgtacaattagggagaaccaccatgttgttcatctccatacaaatcccgcattcttcttctctctcgatgtcaatctccgagagcttgaccttttcagtctcatctttatttctgtaccgtattttgcagacttctttctgtttacgatcatccaggtctgtgatacctctttctagttgtaacaacgacggaaatatcacagctgtttttcacaacacgggcaaaaccgataaggattaaggataacaacaatcaacttgttaccaaaacacttgaatctgcacattaccatagaaatctttaatacttgtttttctctcataaaccgacattgtggttttcccatccgcataggtctgattccattgaacggattaatcaaacaaacacacaagaaaaagcagtagaagaataaggaagtgagaagttgtaacgtaccatgtaaatcagaactctgagcagaccgagtgtaccagcaagatggcaatcagtccattgtacaagaaaaagtaaaaactgagcagctggagtgtacgatagcctcatttgaacacgcgctccatccttctcccgaggataatctaaagctctgttaattcacagaggagaaacaagtgacaatgttcataagcaccataacaacatcacttgatgaaaaaacacaaacataacaaaattcatcattcaatgtattgaacgaatcacagagattataaacaacagaagcaattgatcaatgcaccattgagatgcatggaagtgaggaacttaaagatagcatcacaagtacacctcttgatcattgcagaaacacattttcagcttcaaagatcaaagtttgatttaatcaagcatcctcatatgtctaaattgattaagaaactcaccaaaacattcaccttttagacatagaacttcctaactcaactagattaccatcagaaatcaaatcaaataaaggttttagctttcaaatatttgatcatttcagacaaacacagtttcctctgagatcatcaagccaaagactttgttcagcttcaagagtcaacactcaaactaggacaagactacctaaaaatgacttcatcacccaattcgttggacaagacctacaatttcagaaaacccacttaaaccaaaaagatagattttttccacccagaaagaaataaaaatcgtaactttagataacaaaaacagagaaaactccaaaatgaacaaagaaaaaaggaatcaaatttgagaggcttacacagtgttagcgtgttgaatatcagcttcaagagctttcagagaatccttaaacgaaacttttgccatttaaaatctaattctcatcaaacgaacagaggaatcaaagagtattaaagcgagaagaagaaagaagaagaagatagaagaagcaaagaaaacaaagtttgatgcttttccttttagcaattagatagaaaagatatttcttcacccaaattcgatgatcagagatgagagagaagaatggtattttcgtaaattcgggtatgagacaatggtattttagtaactttgcatatggagataaacttcagttacgattctcgaagaagctttatcgagaaaagacgcggaagtgggttacaagattgaccattttgccctttgttcggctaatgttagagagagagatataaaaatcttgtcgggagttatcttctgtttatggcgtaggtgtctgatttgtgcattgcaatagtgttttgacacgtggaggataaggattaaatatctgcttgattaggcttaacaatcatttgtcatctctttaattatgaaaagtcaatcacccacttgttgttttgttttgtggtattatcattgaatacattactagaaaacagattctggatagatgacaaatgaaacaaattgatatataagaaaacaataaaggaaaatattatttttaatactgatttcatcaagatattagattttataattcaactagattattaattatacatatttaatatctatattgtacttcttaactgttgacaatataattttaatataaatttgcaaataatatttttgtttactaagaattttctttaaacaatgttaaaagtttggagaaatgtatgatttcataacactattttttcaattatattatatatttttatattatatatattttttttatcagattatatatttattgttaagtttgaaaagtaacagtaaatccctaatttataataagttattttctacgcaaacaaattaaaaaaaggaaaacttatgagaacaagtgaaaaaataaagatagagaaataattgatatcaatttttttgctccaagttttttcaatttaacaatttgcagattttggtatacttttttttttttttttttcgcggattttggtatactaagactgtgaatggtgacatagaccgcacccaaaatcgcaccgcaacagtgctgtaacagtatcaaaatctctacatatatatatatatatatgtatctgttataaccagagaaagagatagaagaaatgagtgtgttttccattgagaaaatggttctataggagtataaggaaaaggtaaaaccctacaaacatctagatgatgggcttagatgatgggtcttataatgggcatccatctttattcataacactcccccttgatgaccattatagtaccataactcgtaaagtatttgaaatgctgcctcattaaaaaccttaccaggaaaacctaatgggaaaaaccttggttaagggaaaaagagtgcaacatacaattactcccccttatgagtatattcgtcgagatctttgagacggcgtaatccgatacgatagactaacttcttgaaagtagcagtaggtagcgccttggtgaataagtcagccagattatcattcgaacggatctgtagaactcgtacatcgccgctcttttgtagatcgtgtgtgtagaagaattttggtaggatgtgctttgttctatcgcctttgatgtatccgtctttgagttgtgcgatgcatgctgcattgtcttcgtacataattgttggagtttttttccctgcatacataccacagtcttcttgtatatggtgaactatggatcttagccatacacactcgcggctagcttcatgaattagtaaaatctctgcatgattagaagatgtggcagagaataaacagtatttgagaataagtctgccaaatcttctcttgaacaaatttctaataaagtacaacgccattcttctgctcatgaatcttttagatgattcatcttaaccatcttatttatttctctaaatatcattagtgtataatattcatttggatgattgatagaatttcttaatattcatcaagtgtattatttgcgtgttctttaatgtctcgttaaaaatcttgtcatagaaaaatcatgtgggataaaaactatgataaggaaaaagggtacatccacgcatatcattcaatctccccctcggaaacatcttcttcaggagatgattttcaatcaaatacaatatctcgttgaaattaataaccataatcttaatgatcaaaattatatggttttcatatagacttataaatatcattatctactgatattttatcatagattattgtcatcgtattacttatataactctgtacgagttttaatgattttcaaaacaaatattagtttgatcaatatattttgacaaactcaacataaatatacatttatatgattatatgtcatgttacatatttctttttattcgatcgagtagagttgtagagaacataattctcatataattaatccttcagagattatatctttcaagaatttcatataaatgtcatatccagtgttccatctcttattgtcagactttagatacttaaaaatattacatccaccacaagagaatatatttcttcataatacatttcttatctttgtgaaaatctcattaatttcactattctttcacataaagactcatttattttccactggttttacacatcatgtgcatagactactagtccaaatatctctactagagattataattatatgtctatttcttcttttccatttttggctaatcattactttgtgtccacttttcaatagactttctttcatgatcctcctttttgtccataatatcaactgctcatagcatgcaattatattacgacgttgatttgcttttgattccattatattttgacatgacatagctagctagatctcttcattgtcaagtacttgaatgtttcatttgtcatgtttatgtctcttttagagatcattcactctcttcaagatatcatcaaaatatttatttcctcaatttggtcatttttaattttgtgctccttcacttttacgaggatgtttatatttggaaccaaggctattacgcttcatgcgatcttaagactcaatagcagtttgaaattggtccttacaggacattcattatattctggagcatttaatttacaactggtataggtgacttcatcactttatttgggtcagcaaatgcctctggcaattacaacgctaaattctgtaattgaattatcttttggactcttaatatacattctttactccgaggatcattgataattcatttctttttatctttttttcaccagctgtatacattctcccccttatgttggaatatctgactatataatatgatagtcttcaaaacgagcggtatataaatccttctaggatggcttagttatcattcatatccaacatgtatccttatcctcctttgagggttcatctcagcgtgccgtggtggagcacttttcacattcaaagattttagatgaaaactatttggtttctgacccaaaaccaataatgatggggaaaactattaattattcattgacttgatgcatatcgatattactaaactattttgtgtatgaaaatgaatttcaaaatgttaaacacttatcccaacggatatccaataatggttacaataaataaacactgaaatactcttgtattttaatcaagaaagtaacctcgcaaactctatattgcgggtttataacaaggataaatatgaccttctagtcgatgcaacaatcgagtcaatgtgtccattgaatcgatgcatcttttatagccattaggtatctaaatgtcatatagtgggtgattaacccataatcatctccttgtatatacttacgaatagataaagtccaaattattttgactggtaaaaatcacattatcatattgctttctgagcaagtaacaattgataaatcattagggagaatcttctggtttttcacctaatgtccacataattctcaatactttcgcatcatcaataaaccaggatgaccaatccggttaagccaaatatactcttgaaatttctaggttttttttgtttttttttttttaacttcggatttacttttcattgcttatcagttactctcttaatgagatcttataatcaaaattacttccatgtattttaataatcaatcatatgttaataaagcaataaacgagacaataattaaaattttatattctaatataaacgatattaaatgtaatttgactagctatataagatcttatattcacttaagaatatgagtattacttatcatcaataactcatatattttcttagcctttgaaaaacactcgatttaagttcataatagttcttaaatttctttcaaaatattgtgtttacaagacaacaatacttgcgtaaaagtttaagcgtctgttttaccatctccgcatcagagatattctcttaacaatgtgagttatattcacaaagagacttcaagtcttgaagttttagtaataactaattataacttattttatctaataacacattcatataagaattgctttatacaacttttagatctttagtagtcaaagattgaacataatcttctcgatatgtcacttattatctattcattacttctcctcctcgaaatgatgaaacttcaagttcatccatctcgtattgaattccactctagaagcaaatgtattttatatctcatcatattaactttgagatttggagaactataccgcatcgatgatcttaattttgtattcccatagaaaacaatgtatatgctcttctagagtcttttaataagattttatactacttgatatactagattatttcatcgttatatttattttttacttttggtgataatttaagttcttgaaaaaactttgaccatcaaaattatgatgtcttcttaagatacattaaactagtcattcataaaaatttctataagtgattatacctttaaattaagttatttatcaatcaatttatttcataaaataatcaagtattatataacaatacaattttaatgcaatattgtaaaaccaatcagaataaaactattttgtgaaaaatccggattttacatatatcttgataaaacttttatttagggtaatatgaattcgtgcaagatttgggtaaaatgatttcgtgcaaaattagggtaaaaccatgaacaattttgtttttttttttttgtttttttttagataccacaaagatttagaaaaaagaatcttataaaaaaaaaattatcttgcaacgtttttagtaaaaataataataacacaatcaaatatatggaaatcttataaaaagatttagataataataacacaaagatttagatatatggaatcttataaaaagaaaaattattttgcaacgattttagtaaaaataataataacacaatcaaatatatggaaatcaaatatttaatatggaaaagtcaatatctaaaagtgataagatatgtataacgttttaatcaaaggagttaaataagggatatcatatcaatcataaatggattttagacaatataatatttataaaatgatattgaatatagatgcaactattcaaaactggaatgctaaaacattaatacatgcttgcatcacccaccaccgggctatgaatagttacaaaattagttatataattataaaattggtaatttatatattcaatattgtaatagtaaatcacaaaaattaacaattaacaagcatgattctcttctttaacgattttctttgtagaatcattgaatcatgcgatagtaattatagaaacaaatgataagcatgattctcttctttattgaatcattgaaaacatgcttttaccgatctatactataatcatcgatcggttcatattgttttgtttcaataatagaaaataagtactatgaaccatgagtcgataagtaaacatggttcttaaaaaaatgtaagaatctctatatctatcttttagagcgtgctgataacgtgttataaccagagaaagagatagaagaaatgagtgtgttattccattgagaaaagggttctttatataggagtacaaggaaaaggtaaaaccctacaaacatctagatggacttagatgatgggtcttataatgggcatccatctttattcataacagtatctatgtatttttgttactatttgaaccgcaccgcacttctcccgcaccgcaaaacgcagtcaccattcggaccctaaaccttcaaaatctgcattgtttagagcgttaatttttgacaaaaaaaaattgctaaacttaatttgttaattaagtctaatgaacaagagttttgtggtcgatctatttaattcatgtgaaataaatgtacgcaatgaactaacccacaatctctattttttggatctctagtctaatcttgagagagtggttgctcaattcgcagattttcggatattatccctaacaaacaaatggttgacaaaaaaaaaaaaagtgaatttctttcaatctctttgaacacaaaagagtcaattgttacaaaataaatgcaaaaaccaaattgttttcttcttaaatccaaaataagccaagcatatcatggaaccaatgataataatacaagctagaatcatattcttatgagcttggaatcatgaactagcatcgtttcacggatggagtactgcatctatctcttccttgaacttggccatcgcgtccctaggtagtgttgtcagcacccgaacaccaccgctcttccccggaaccgcttttgacgctggtaacaaaacacacaaaaagggcagtgtcagaggaaccaaaggtataatgttcactaaacctccccaaacgtcttgatccaacccaagatgacgccaatcagtcagcatcatgaaaactcctccgtggatctccttggaagctaacttcagcttcattgtattctccatctctctaagttgctcacacacgtatccattatcaagcgccgctctcttcgcgtcttttatgagcctcacaaggcgagatatcggtgttttgcttagctctttcgctgtcaatgccacggaagcatgagtgaaggcatttccatagtagccttcaggtaatggaggctcgatagagctgcggatgctgacggatataaccaaatccgtaatcgtgtcgggatttagcttcatggctcgacatcttgctctccaaacgtaggccgcaagaacctccacggtcgtgatcttcatgttcttctccttctcattggtaaggttctcatcttcgataattatgttcttgagtttagtgatgtcttcggatgtaatgttcagaatttcacggaccatgtcttccgttggtgtatcgggcgaagaacaatctttctccacatcaacgagttttggattatttttgtcgttcccgagcttgcctaaaatcacgacgtgttaaaattttcacatggataaacgtaatatagatccattttcataatatatactgtattgatcaatgatctcattattcaaaattggaccaaactaaaatcaaatatttaagaaaacaaacaaaaaacgatcccacacatagaacgaacaaatattcgcaaataattatatattttctgatatgctgaaaaagattttgtagaaattatatgtgtatgataaaatggaaattgcatgtatatatgtaaattatgtgtatactagattaggacccacccaaagggggttttaaaatttttaaattaaattaacgatacttttgaaaactatattttatataataaaaaattaaccctaacgtgtaaaagaattaagtgagatagttgtgttaatttcttacatagagtactaatttggttagaagtgatcatgtgtctgtcccagacggggatgaccgtgggttgggctcttccggcggccagttcaagtatggcttgagaaaactgagccatgccaataccatcacaaacggtgtgagaatgaacagagccaatagtcattcctccacatgtgaacttagtgatctgtagagcaagaggcctatacccaagattacaacctttcaaagtgtcgtgtgaaggaacaagttggtatgttgcttccaagtgattaccactctccaagtaattgagagaagagagagtgcacgaggccgttgcctttatcaaggggactccatcgccttgcgtacaatctaattggagtgtctggtcgctcgtccgtcggtgaagttttccggcgagagggtaataatatacaagggcattagagagggcgagttgaataaaagaagccggatggtagttggtgtgatctcgaacgtatgggtttggggagaagacgcataggatgtccaggattacttcgttgttaggatcgttgtcaatggtagagagagacaaagtgacatcaggtgttggctttgagggtttcacaagaaccacttctgacttctcaacgacaaagggacatgaattgtcgcttcttggcattgtgtgttgtgtgtgtaaatgagtagtgctcttatcatagcttattcttatataatcatttcgaaaattctcccattttccgagtgggtttatttaacgaaagtagagtgaagatttataatcaatattgctaagtaatactaatatttattagtaagccgcttgatgtttagtgctctccctatcattacccgagcaagacttaatcagtatttggtgagtttatttaacgatggttgtaacatttaataacaaaattgctaagtaagactcatattagtaagccacttggtgcctaatgctctgccactaattcatttctcttcacgagcacgacctaatcagtatttactgggctccaaattttcctttctcttgattcggggtggttcttttttattttgccatgttggcttcgtggctttaaaatgagacggttttataatacaaacatttggcaagatatatataaactagaaaaagactcacccgatgcatggaaataatagaaaaatattgaaaaggggcgcctataaaggttggcctctgaatatcgtttataaaaatctatgttataagagaaaattgttctaaaaatttgattgctacaactgcatttttataagagaaaataatagttttccgataaggtgagattttcaagcatttaattgacgtctaatctaataatccgagattttgaaccatttttacgcaatgttcatgcacaaccgacttgtaatatatgtagacaatgttcattccgattgtctcatttgatccaaccttttcatgtaaaaaattttggtaaaaaaccgatcgtctgttagtataagtgatgatttaaatgcattaaaagaatcatagatagaataaaagggaggtttagagaaaaaatcattctaaagcaatgatccaatatatattcgtattattttattcttaaataataaaaggtcatctaaaatccatcaaatcacggggtatatccttcaaataacccctcacattgtttgtggttctgcaagccccttttaaaagcttttacagcaggcgtgggtttgatcttaaataatgcaatttcttgcaaattaatgacagaacttattggaagtttagagtcccacatacagaatcatttattgtggtctcgtgtgttgcggagagaacatgtccatcatagaaatatcatacatgcataaccattcttcgtattgcatggaaaagtgcatcgtggaatcattatttgtgggaattattagttgcaatctgattgaacatcatcaaagtggaataattgttttttttcctgtgaagaaagatataatatacttttgtgcgtacagaaagatccttcaaatcagaaaatgtactcgtgaaccatcaaattggcgaaataggtctccctacaaaattctacgacctttgtggcgtgttggttgtatgccctataactcctgaaattcctaatcaaaatatacaatttgagatatatattcttacacttttgcatagaaaatttctgattttaagagactaactctttcttttttttttaagtgtgaaagatgacaaggttgctataattttaactgaagactctaaagagccaacagtaacaatgtgcgtctccttcgatttgtctttgcttcattaagttggccggtgaaaatatgttttcaagtctttatctatatgtcgctcactaccctttcattatgtgtaacaaataaaataaaatccttaacggatatccatttatatctgtcaaaaatcgatttcatcaatggcattagagacttttcaagtctgggtgggtattcttgtgcatatttacttcgcatatcttatcttgtgaatttctaattcaatattttatattattcatttaaatttctttgttgtgttaaaaaatatgtgagatatgtatttacttttttttttatttcttaattaaatttctttgttgttaatatttcttaattaaactgtagtattctaagatcttttattttaatttatataattagttctggattatgtaagattcatatatcaccgtgcctcttgttttacgtatatatctttgattccttaaacttaataaataaaaatatgtaatgtttataaccaaaatgtaagtttattttctaaattcttcaattttcttttctggttaatttgttataagaatgagtatatttactaagtctcaatagctcaactagtaaaataccccatgcaaaacctagaggtcgtaggtttaatcccccaaaaaagttaataaactaattaatgataattaaaatatttataccattacatttcaactgacagatggttcagaacaacaaatgggacaaatcttctttgtctcaagccatttggttatacactcagagtggtatggatggtcacaaggtcggagaacgaccaaagattctctttcttcaaactccatttggcaaactacacaacgatcaatctcgtttttgttatgtgaaaatacgtatgtagatgcgttcaaacacgtagagatttcaataggagttagcccacggttttcgactccgatgaaatctccaagcgcaatcagttcctcgtaagacaattggtcgggatcaatctcatcttcttcctccaagaaatcatcctcctcctcaaggttggaattgctttcttgatcttcaagaaactcattgatttcgtcttcatctactccaaatccattgctatcgaaatactcgtagtagttctcattgatttcttcttcatcttcagattcttcgtcactttctatcattgaaatcattgagggagacgaatcatgcatagcatgggcaaaatgggaattagcttgggaggcagcaagagcaacttcagaatttgcttgctcaaagagggctagatcgggaagtttgtttggaggttgcttaggctcttcttcttggttatccattagagaagaataagtagattgtgttatggttaggaagccgagctccggaattttatatgaaaatggctttcatgtcagagaggttacttaagcaacaagaaatgaatattgtggacagcttccgtacaaagtaatacaaaagaaacatgcggaagttagggtatcctttttcgctattataagcaaatattgcataagttttaaatttgccaatcaggtatgcattttcccttaactttgggtttgcgaagaaagaaaagtcatatcttggacgatatgctgcatctacctaaaaagcatttctgagaatgcatgacatattcctctatatatatagaaattcacttgtgtataaccagcctaatagacaatcacattaaacttttgttctgactaaatcgcttgtactatatattattatttatttttgtgcaaaatactatatattacttataatctataaagattaaaacaatataatttggttttggtggtatcgaacaagattattagaggaaaaagtatatattcagtttattcttctcctccttagtaattttatgtggaaagcttttttctttatataaatttcatctcttctaactaatgcaaaactagctgatcacaaaccaaaaaataataataatgtaaaactagcttagaattgtattttacattttcaacctatttcgtaaaaattgagaagtattttttttttttgtgaatttgttcatcttaagatttaaccacttgtttgttgcctaggttgatggaagtttttttttttggttgtggggataagctttgaacttatttccatggctgagaaatggtgcaaatgtttgaggatccaaagtctaatgttagagcttattttcgtcttcttttaaggcactaagtttctttgtatttatcatttaacttgtatataaaagtttaatacacaaataaaccttgcaaatacaaaagttttgccatgcaaatataagtattttttaggatacaaagaaaaagcaaattgtaaatatacatattcggagaaaataagagaatacaagactaggggttgctcaggaacctagaaaggccgactttgctaccatgggtctcaacatcaagcttaacttgagcttcaaactccgagaatttgaatggcttatagcgagtagagttaaacatacagtctttgtccgggaacacaaagttaactatcgagtatctctctttcttcctcatcctctttcctactttatgcaacacactcttgtattcctcatcacttatcacctgtatcatatgattttttattgatttatctcatatgaaatatatcttaacatgcatggaacgttagttacttaattacctgcatcatatccccaagaccgacgacaaaagaactggcaagaggtttgacattgaaccattccccatctttcatgaactctagcccaccaacatcgtcttggtttatgatcgatatcaccgaactgtccgtatgagcttcgagtccgggggattcggtacactgaggataccgttgaacacgtatcacacctgttgactctgataagtagcccattttttggtcaccggataattcaagggacaaggtttctattatagcttcaaatagggtcacaataatcctagttacgtgcttcccatattcctccatcaccactctgcgtaactcatcacacaatgataattgataatattgtgagctatgagaccaaaagacaaaagaaatgaataatgggcgcaataacataatttatcctaaaactttactcattaatattcatgaaacgtcatttgtaaaactagtggtatatgtgctttcgacattaaattaagtttttatcgtctaatgattttgtagttttgtcactttttttcttcttcacattcgtagattatacgtaaaactcgtgactttacgtcggtgttatcatagatctagtcaccggccatctttaatcggagaagtgtagattaaaacaactttaagctataaaatttgaagctatctaatctgtgcaaaactagaatttcgatttgattaaattctttaaacccaccaatgaagtaagagttaagaattcagttaaacgacgccgtacgtaccggaaagactcaagcttgggatcagtacaagaaagtgcaagaagccgagagagagatgcaagaggaatattgatgccttcgaacaagtgaccactagattcttgtggggctctcgttacggcttttcccgatggacttaccgtatgtgttccccagtaatacgataacggagagttaacgccgaacaacgtccgtttctcttcaaacggcagactcaacactgactccgttatctctttcacctgtgacataaacgttaagggtatcccagtattctccaaatggaagatcccccagtctttgcatgcttctctcagtttctccatgtccaaatgctccatatcgataaccgggatatcgatatctttgctccggtctagacccgtttcagtggatttttcgctcattagaggtcgaaactctggtggataagactccgagttgctcatgttctcctttgaagtgcacccgttgtttctgatatctctctatctctcttgtgaataaggggtaatgcaaattgatattatctttctatagaaaatgaagcgttacaaacgaaaaatattgcatgtgtcaggtttatttagtaactgacgaccgagtactgttctgtaattttaggtttaattaaattttgttgtttatgtaagtgtttgataaattattcttttcatttttaggtcaattaatttcttttcatattttttttattgtgattaaattaaatttagaaatatatggtatgactttttcggatcataagtttggtaaagctattaagcatacatttagaggctagtgaactagcaacgaggatgcacatagcaactttgatggatagagagaggtagtgggatagctattgcttattgggcctctactggttgttgtcgcgacttctattattaggtcgaaactctggtggctaagcctaagactatgagttgctcatgctctcctttgaaatggactcattgtttctgctatctctctcttttgtgaataagaggtaatgcatctataaaaccatgatataaatttaaacaaaacgaagcgttactaaagagaaatatttatgagagttatttagttattgacgaccgagtcatcgttgtgtttgtgtatagtagtttcattttgaattaatttttctctctctccctctctctctctagaagtcatctatactattatttgagcaatgttaaaaataactttaacctggattgatgtgttagagattacatagaaggaaaaatcctactctgggtcaagttacccgacatagcttcgtttatcgacccatcccattcccagcccgcacggatctttccacctgtgaccaagccaccaaatataaggcccttgtatcacctgtgtaaaaggccaataactgaacaagcccaagcaatctttctaattaacttccataagtatagatgcaagtaatatttgattcaggtaagtcatggctataaatgtattgcttaatattgggatgtacatttgatatcattgtttatccttgaaaattcaactaatataactctttgtcacatgtcattggctttgtttgatagtcatggtctttcaaaaagagaagataaattaaaggataatatttttgaaatactcacttgacacgtttctaaatatgattggttagtttttcccttataatttcatatttaaataaatagttaaaagtaataaattaatatatttaagagatatccggacaacataacttttgccgatgaagatgctcttaccttttgtcgggtcaggcgtttacattttataaaggttaaattttttgatgatgatttctatttctagagagagttcatcaaaggaaaagatatcaacaagataatttctgcaaagtaacgataacatgcaaatatatgaaaaattcataaaaccatataggtagcaataacacaagataaactaaaagtcaatagacaacataatacaagaagtgaacctcaagctgatggtaaaacatatagatgcagaaacaatgaggtgtgtagaagagaagactgctcacatcttttgattttccctaaggaagacccaatggaggaggagctgcgtttccattacctttcttgtcgttcaggtaggaaagaatggcaacagttgactgtagcatggtaagaagaataacgaaaagaacagcacacgatgacagaaaagtccatggtgattcaaagtgtgtgtgcctaaagccagcccataatccattgtaccattttttggtgtactcgttcacgcccttaaacacattgtttaggtaacttgtatctacttcaaacacaacatctttactgatagttttgaagaactctgagacctcattattgctaccaaaatgattctctatgatgagcttgtcgtttctcaagaaagttacatcttcctcgttatttagaaggcatcccatgaagactatgtaggttgttatttcgttggaactgtcagtgtaaaactgttcaaaggcaacacagttgaggaagaatgagctgatgaacccatcaaatcttaactgtggtatctgaagcttgttcttctttaatcttacatttaatatggaatcttctttactccttcttagcctgaactttatcccttggaggcgaagtcttttggccgacaatatcaacggcaccgctttagaatctacggatggtacgtttccagatttaccctcatggagttgaacttgaacatgtggggatgatgctttgtcagattcactcgtgttaggtaagaaggtctcacggatgaggtcaagaagatgttttgccttgtagtttctgtgtttctcccaataactgccttctttatctattggatttttaaagaagtgaaacgctatcctgtttagatcactagagacaccaatcttggatccaacatacaaagtttgaagaacaaaaaaagggacctgattttccaacagtagaagatcactctgaatagacgagagaagccaggggatcgaaaagattggatcctcactcaattctatgtttcccgacatgatcagaaaaaccatgaggatgaagcacccatccaaaaccatcataaacattaagtcatgtcctgtcttaagttcctcagaataagatttccttatcttatcttccaaatcaactacagccttaaccaagacattttcctccacgtccttcttttttgcctcgtctaggaaaagctgtagaagccgaggcttgtgctgttgaatcatttggaggtgcttttcaccgtaatggtaaggaccaatggaaacaactttgggcttataggctttgggattcaatgctacgaagctctcagggactctaaagatgcaacaagattccttaccagctgattccaagagaagcactggttccttacttcctgaggataagtagtttctgaaagcagatggtggtggtggagaagctttatcggaagatgatgaaattatatccgtcttgtctgccatgattttgttccactacgatcctcctttcctaggttcaaagaaaaggtcgtcggattcaagttataaaaataaatcgagatattgattcgagaaaaatagagcgaaaatcttactgttgttgtgagtgttagttgaaccgtgagttcttcttctgccttactcttgcctcttagaggcaggtgagggttcattctccttttttttctttgtttttatttttttgtcttattttttctaatgggtaatttaattagtagtctaattagaatggtaatagatataatgtttaggaatttttttgttcgtgggtcttaccactgaggcaggtcttcttaaataagtaaaccaatacacgttataaaactcggaaaatatgaaggttttgatgtttttcaacgactttccaaagtgcaaagtatttataaaaaaccatcgttatgatatatggcgtggaaaatttagagagagtaagaaaaaaaaaacatgagaaaataaagtattgtgacaaaagttcgggaaaagatatctgcgatgtatttgggaatttatgaaacaagttaaagtggaagaaatagaaaatggctgttttaaaagaaacatgagtcgaagtagtcggcaaagtaactagaaaatggtcggactaggaagttgtcgcaaaggttttgagacaaaaaagtctcgagaacaaagattagcttttacaaatcacatgtgttaatttaagaaatttacgagttaaccaatgaatagaatttagctatatgttagaagaacatctaaattaacgttatttactgggttaaagctttaacattcttttatcggtattctactttccgatgaatattagaaaaaagttaatcgatcaacgtcaaggcttaatgtttaaaccgataaccgataaaagaatgttaaagctaataattatatttttccaaagacggatttcaatttgagaatattttttcaggtagcaaaaacgtaattggattctatttctccaaagacggatttcaatttgagaatatttttttttttgaatattgttgaattttgatgaagcgattggaagtagatttagactagttaatcctaaaatgtgctctgtttttggatttaatgttgagaatatttatggaacatgtttaagagattaaaccctataaacaaaatcatcgaaaatttaggtattaaacgacattttaatcatgtttacatactttgtctcttagtttaacatcgacctttgttccaaaaaaaaaaaaaaaaaaaaaaaaagtttaacatcgaccttaatataatataataagaataagttaactatttaattataaagttaacaaaaacttaaatatttaaacgatatatcaaaaagttgagaatttaacgtctataatttaaaaatataagcttttatagacattcccaaattttagcacataaaaaatatatatctattcaaagttttgtcagaattaaaaaaacatacaagtttatcatacacatgcagagccgtatttacatggagaaaaaagggcatttgcgccacacaaaattgaaaaaaaaaataagctacatctaaaaaagaataggtttagtacttacttttaaaatagtgtttaaggaatttttactttgaaaaacaaaacataacatcacatctaaaaaatatttatttgcattttataacattaactcactaaatctcgtttttaatgaaaatttattgtaaaaatgtagctttcctttttcacatataccatgaataaaaaatttatctgagaaaaaagaatataaaaggcaacatttataaaatttgccttaaacttttattgaccttggcacgatactgtacacatgtaaaccagtctcaaaatttttttttttttttttttttttttttgtcatccagtctcaaactttgtaggtaaacgtattaaatttcaaattacagggtcactgatgtcgagattcacatgattatccttaaataaaggacctatatattatttataaatatcaatttgccatgagcctgtaaggctgttacccacgatcaggtataggtaagtaggtaactaattagatgttttgtcttctaatcggctaatgaatacgaattaaataagcgacgtcgattaacgaattagctgtattgtcttaaccttgatcgccacggctcaaccggataaacataaaacatattttatttacagatacgagccaaccgtgtcttccaaccaactccaccaaccggcctttttaacccattaaccaaccattttattattatttttttgtcatttgtagtgattgataaaacaaagaaataatacattgtggaactatatgtgttgccgaaccgacaaaaaaaaatatgttgccgaaagaaatatttttttctgcaaactaagcccaaacgagaagaacataacctaaactatatgaaaactaaaggtccaaacgatataaatgtttacagcaaaatcaccaaacgaaagataaaaaggactttggtataccaactccaaacagaagagatcatcaagcaaaacgagagagcgtacttcaaaataagatgtctctatgttttttgggtctatttgttctcttaagatataaggttggttgcatatgtttctagtttaaggtttctttaaaatatatgttttgtattttttggtgtttcatcctttttttgtagaacctaatgctcgaaaatactttttcgactatatttccgaagatttttgttttgtctaccaacttaaatttcttttgtttgagaattgtatttctcttcggttttacaattacagtagaaactctataaattaataatattgggaccatgaaattttgttaatttatagtaatattaatttattctatttacgtaaaatataataccatatttttcttaaaatgttaatttatagtgatatgaaatatttacgtaaaatataatactatatttttcttaaaatgtttttaatttaattttccatatgttttgttgtttacatatataattatgttagatttttatttttatttgacttctttaatttatttttctttaaaatattgtgtcggtatatctacgatattaacgtcaagtaaacgtaaacgtgaggcttaatctaatttttctttatacaaatcttagcaataccttctcaaatacaagattttacaaaatcaactatgacggattaaatacgcaaaaagttatgtgaatacgatagagattataccaattgtattttaaaaagagttataattaaagtttgaacaaaaatttcatataagaattagtcttaaaatgtatatttcagatctaggggtgtcaaaatggttcaaaattcatgggtcaactcaactcaactcaactcaatccatgaaccctaatgagttgaaaattttgattcaaatgagttgatgggtcaaatgagttgatgagtcaattggtttgatgagtaaaatgagttgggttgtaatggttaatggtttcaatggtttacccaattaacccatcaagttttgtaaaattgaattaaaccaactaaaatctctaaaccaatgccaatttaagtttaaccaacacatctaaaccaatttaataaaattaatatttttccaaatttcttaaatatacaagcgatgaaattgagaaaaagtaaactcgtaattttttcaaaaaaaaacataaacccgtgattttcccgccaaaaacgtaaacccgttattttcccgtcaaaaacgtaaatccgagattttcccgccaataacgtaaatccataatttttccgctaaaaacgtaaacccgtaattttcccgcaaaaaatgtaaacccataattttcccgccaaaaacgtaaacccgtgattttcctgccaaaaacgaaaacccgtgatttttccgccaaaaacgtaaacccgtgattttcccgccaaaaacgtaaacccgtgattttcccgccaaaaacgtaaacccgtaattttcctgccaaaaacataaacccatgatttccccgccaaaaacattaatccgtaattttcccgccaaaaacgtaaacccgtaattttcctgccaaaaacataaacccatgatttcccgccaaaaacgtaaacccgatattttcccgcccaaaacgtaaactcgtaattttcccgccaaaaaacgtaaatccgtgattttcccgccaaaaacgtaaaccttagattttcccgccaaaaacgtaagcccgtaaatttcttgccaaaaacatcaacccgtaattttcccgccaaaaacgtaaacctttaattttcccgccaaaaacgtaaatccgtgattttcccgctgaaaacgtagacccgtaaaaagtggaatccgtaaataacctaagtttgataataatgaattactaatgataattatttattattgtattataataataatgaataaaattatttcttaaaatgggttaatccatttaacaactcaactcatcaaattaaataagttatgggttgacccaacccttttaacaaaatgggttgagttgagttgggttacccattttgacacccctataataagatctataattattaatttataatattaagactaatttttatagagatttcaaaaaagttattatcttattatcttatcaatttttgttaatttttatattgatctgacttagaaccgacaaaatttattaatttattgtatttattcatttatcaaatattaatttatagaatttttactgtaattgcattaataaaatttcaaagataaaaagaaaagtaaagtaaacttgtttcttgttatacaatcgaactcccatgttactatcaaacatatttgtcaggatccttcgcctttttagttatataaaaaaacggaatatttgtcaggaattttgaggaatcttcgtcatgtgataggcgacaaatttgtggaaaaaataatatataattatcgacaactagactgtcagtcaatgagatcgatgaccattacaggctgtcttagaaaaactattgaagtaaaataaattcaatattgtttagataagattgatgttatacaaagaatacatgaaatgtacttttgggaattaaaaaaaaaaacacgaaaggacgttacagaacctgcatacacacaaagagtccaaggacagtaggacacttcattcaatagggatatttttagttcgtgtgtctcggtttaatctgtctgagtagctatcaaaagcaagaaaagtacataaagtcatcaagacacttgagccctccataccaacccaaccaaaataatctctatccataatgttctctaacaatttggcattgatagagattatcttcataccccactgggagggctccatccatttgcaatcttttacaggaagtgtttgagctttggggaggtttttacttgccacacattggtgcctgttgagagtgcacaagatgcttcttgatcagtttataacctgatttagaggaataatttttagattttttccggcaaccaaactaaagcatgcatcctgagttgtcgtgtgtctcatacttaaatatcccagtgtatctcaggtcatggcaatcctcatacccatggttcaactcatctcgattatgacgaccttcaaacatgtggttagacatatatcaattataacgacctatcgtttagcacatcatggtcacaatgaccatgaacctttatcatgtcacttatcatattcataattcatgagtacaatctgaaatcagttattgttacataaatttttacacaaagcgtggaaaatcatctggttatttgtcatacaatttcaccttgtggattagtatcactaatttaaatactcattgtatagaaaaaaaaaaaaaagatgaagtgatttgagtttaattaggagtatagtagttgaaatgtccacatctacggcttaaccactaaaatataaaatttaaaaacaaaagaaagttgctgtcaaagaaaaaaaagaaaaacttatataattgctctcgactatagttagagcatcttcgttggttaaaatacttttgtataatcataaacttttgtattcctctttagagatacattaatagattctttaacaagaacccttatatatcacttttttttttcctactcttttctttgttgtaattttaataaaggtatcgaaaccattagtggagactacacgtttccctctcacctttctagagtcaagagtgtcaccccttacacgtttaccttcatctcaagagtcaaggggggagaactcacggttcaactactatccatccctcacagtaagattttagctttcttattctcgaatcaaaatctcgatttatatatatctgaaatttgaatccgaccttgtctctagctaaattcaggaaagcaagattcaagtggaactaagtcatggcagagaagaccgagatattttcatcaccttcctcacctccaccatcattttacatggtagataagaccgggaaactttcatcaccttccttaccttcctcacctccaccatcatattacatgggagaaaagaccgagaaatattcatcaccttcctcacctccaccatcattttacagaaaatatatcatatcttacatcaatgagcaggtagagttagactcaagaagtgagaaacgagtgcttctcttggaatcagctggtaaggaatcttgttgcatcttcagagtccctaaaagcttcgcagaaatgaatcctgaagcttataagcccaaagttgtttccattggtccttaccatcacgggagaaaacacctcgaaatgattcaacagcacaagcttcggtttctacaccttttcttacgcacggcaagcgtggatagagatgtcttgtttaacgctgtagtggattgggaagatgagataaggaaatcttattctgagggtcttgagggaagtccacatgaactagtgtatatgatgattcttgatgggtgcttcattctcatgttgttacttatcgtgtcaagaaagatagaattgtatgagagtgaggatccaattctcaccatcccatggattcttccgtctattcagagtgatctcctcctcttggaaaaccaggtccctttctttgttcttcaaactttatttgacaaatcagagataggtgtacctggtgatctaaacaggatggcttttagcttcttcaacctctcaatggataaaccagaaagatattgggtcaaacacagaaacttcaacgcaaaacatcttcttgacctcattcgtatgagcttcttacctatggatggatacgaagatttccaactcactaagggtaaatctagaaagaaatcatcctccggtcttacattgctattgtcggctacaagactttctctccaaggaatagatttcagtttaaggagtggtgcagattcgatgttagatataaggttaaagaagaacaggcttcaaataccagtgttaagattggatgggttcattatctcaatcttgctcaattgcgtcgcctttgaacaattttacgcaaagagtaccaaccacataacaagctatgtggttttcatgggatgccttctaaacggcaaggaagatgccacattcttaagtcgtcgccggatcatagagaactactttggcagcgagaaggaggtatcaaagttcttcaaaactatatgtaaagatgtagtgtttgacatacatgcaagttatttacggaatgtgtttgtggaaattaacgagaacacctcaaaatggtactcaatatgtcgaagttttttactgtcaccaagaaattttgtggcattgcgctttcgtccaatttatcgattctaaataccattcttctaccttagcaacagcaacagcaaaaccgcatgatggaacgtcctccaggcaaagcaaacatgctcgagcttatgtagaaacaatggaattaaagtcgtttttatcttctacagaaacatcattgttccctgttttttatcagttgtgtaacttgtgttattgctatctttttcgttttatgatgttatcctatatatgtatttaagtattttgttactcttgttaatttgcatgaaataaagcttttctactttcctttgatgaaataaatttgactttgctttgtcttctcgattatcttgcgctatgagaagtcttgaacttgtcatgcagctgccctgacttagggtgaacgggatataacttcatgctaattttcagtgaagtccaaaactttatcgaagtcgagtctctatttttcttatatcaaaattcatcattttcattttataaagagagagttgttgcatttgatttgaatataggacaaaaaaactcatttttttagtgaaatggatttgaacgataacctttttaatttaacttaattttaatcgataattattattaatatataatcataaaacatatacacaaaagaaaataaaagtaaaagtggtaaacaagccaactaggatgttgatgattactatgtaataaaatggtaaagtatgatacatgttgatatttactaaacaaaattattgattacatattgaattaatagatagataaaagaaaagattaggtgaagtgttaaaaaaataaaatcatagtacatagtctaaaacaactggcacattattaaaaaaactacgtacaaaccaatcaaaacaaaaagttaataatacacatcatgttcccacggtgacgttccaacagaaacacatgagcccaacgcataaacaaaacaaaaaaaaagacaaaccaatgaaaccaattttaactatttaaatttcaaaaagaaaagaaaaaacacttgagggtcaatgatgtaaggagaaaatgggttagcaattatccattggatctatgcttgcttgtacctcacaaaccgcaaaatctttcttgaagtcgtcttaggttgaccaactaaaaaaagcgagggatactttggtttcgtccatttttcacaatatggtgaatttaagaaagaagtttgagatgaaacaggcgaatcagccgggtcgcgtcccaaattatttcaggaataaatatcatggatatgatgacgatatgccgaatttgctacctacgttcatcaaattgttggatactgagaaggacgaagacggtgccggcttgaacgctgcagagcaaatcgatagggagttaaaaagccgaaaatgtgatattcttaagttccgcaacttgacgattctcgagcttcctcacttgaacgagtttctgttttctacggagctcaatcccccgatcagtgaccaggtgatatttctttcttttttttctgttccaaaattaaccaaagaaataggttggtcgttacttctggtttgtttttggaaataagaacacattttgtaagagttaggtttctgttcttcaggttcgtcatcgtgacatgaatgctccactatcgcattacttcattcacactagcctcaaatcctactttacgggaaataatgtctttgggagattatacagcattgagcccatcattgatgcacttaaacaaggtgtgagagtggttgaactagatcttttgccttttggtaaagacggcatatgcgttaggccaaaatggtatattctgttctgcctctttacttcatgaaaacttatacagcttgctttgagcttctggtttaattatgaacttgataggaactttgaaaagcctctagaattgcaagagtgtttggatgctatcaaacagcatgcctttacccccacgaggagttatcccgtgataattacgatcaaggacagcttgaaaccggatcttcaatccaaagttactcaggtttataatgttctttttctcctcgtttttctcatattattacgtattctaattcttttggtatgatatattgttgcatatgtagatgatagatcagacatttggtgatatggtataccacgaagacccccaacaaagcttggaggaatttccttcaccagcagaactacaaaataagatattaatatcacgaagaccaccaacaaaattgttatatgctaaagccgttgagaatggggttgagcttgagatacaagaggggtcaacagataagaattaccagagtgttgttggctttcatgcagtggaaccaagaggcatgctacaaaaagcattaacagacgacgtccaacaaccaggatggtacgaaagagatgttataaggtattgttgagttaaataagtttatactacataccaaaacccttactcaacatgttgagagtagttgcctctcaaatactaaaatataactgattaggaaattcttgacaataaacagcttcacccaaaataaattcttgcggacacgtccaaaaaaacgcaacttgttgagcaaccccccttataaacctcagagagcttggatgcacggtgcacaaatgattgcactaagcaggcaggtgtgactctaaacgtttctttctctctctctctctctctctctctttatctggtttctcttgctcataaccagtactggttgcacaagcatgtacgcattgtgtggagagcttacctattggaatcagtttcatgaatacattatgttgtactacaggacgacaaagaaaaactttggttgatgcaagggatgtttagagcaaatggagggtgcggttacgtcaagaagccgaatttccttttgaatgcaggttctagtggagttttctatccaacagagaatccagtggtggtgaagacattaaaggtttgtttgtcatcctacaacaattatactatggttctatttctcacttaggatgggtgatgacattatatcttgcaggtcaaaatctacatgggagatggatggattgtggacttcaagaagcggataggtcgactgtctaagccggacttatacgttagggtacaaaaatctaaatcaggagatgatactttaatttcttgggtatggaaatgagtttgattttggttctttaatcgcaaatgcacagatcagtattgccggtgtaccccatgatgagaagattatgaacacgacagtgaaaaacaacgaatggaaacctacttggggagaagaattcacatttcccttgacctatcctgaccttgctttgattagttttgaagtttatgactacgaagtatcaactccagattatttttgtggtcagacttgtctaccggtttctgaactaatagaaggaattcgtgctgttccgctctatgatgagcgaggtaaggcatgcagctcgacaatgctgctcacacgttttaagtggtcttagcgtacaagtttctttctcattaccaagtggcggctcttgatctagtggtgtttcttaaaacctttcaaagttacgctttctaggacccctagttcaagttccacctggaagggggaaagggtttaggcaagcttagattgtgatacggaaataaggtatttggtccagaaaaacttggcattggcattttactttggagacgaaaataaagttttctctttttcctgttatttgttgtcacttcaagtttctttcacttttatttttgaatttcttttactgaattactgtctttttatttcaaaaactatttttcattcttctgcaagttcttctcgagcttggttcaaaacatatacatttttttggggggcatactttcttaggttcagccgttcagggtaacaacttttgatggaactgaaacttagtgatgaagtaaattagtcattcttcattttgtggtcatgttaaaaatatatttgtaaaagtaaaaataaaagcggatctagttccgagtactccagcctccaggtatcctatttttcatagcagatcttatttggtctattggttttggatttttttcatagtggatctagttccaacattgacaaatgtggtgacaatgctaggccacatgtcactatttgcttggtcatcttctgaccgttaagttttcatcatctagtgactttctcgttttatgtcacattgttttccattttcctagattatacgtaaaactcgtgactttacctcggtcttatcattcatcagagtttaaaaatagtcaccggcgatctttaatcggagaaatgtagattaaataaactttaagctataagattttgcattgtcaatgcaaactagaatattgatataattaaattctttagaccaacaaaaaccaccaatgaagtaagagtaatgatccaataaaatgatgtcgtacctgaaagactcaaagcttgggataagaacaagaaagtgcaagaagatgagagagagaagcaagaggataagtaaagagtcaacgttggaaaaggcttagacaggaagacgactaagaagacatcgtctagctcatttcaatgaaattgaaaaggagaaccaaaaggaggctgatgacatagccatgtggaaaggtaaaaaataatgcgtacaaagcaacgttctctaccaagaatacgtggaaccacatcagagctctctctcccacagttccctggcgtctggttcaatcatggcaaacctaagtattcgttttgtatttggcttgcggtgcaagatagactatcaaccggggagcatatgttttatatggaacagaagagcctcaaggcactgtgtgttatgtacgaacactatggaaactcgggatcatttgttcttttcatgcaattatgtctcgataatatgggctgcggtagctaagaagttaatgaagtccagatacacgatggaatggtcacaaattttggctcacgtctccgataaatctttctaccgagtggatggtttcctaatccggtatgtagtccaagctacggtacacatagtttggagagagagaaattgacgacgtcacggagaaacaccgaattccccaacacaactgataggttggatagataagcaagtccgaaaccagctcaccaccaatcgacgtacgggagatcgacaatacgaaaaggggactggttcaaaaccagaaactcaccattttcaattctacttaagaacatttaaatccaaattttttctcagctattccctttaatacacgttgcacaagttgcaaaaaagttaacttagtttatctctttcacctgagtacatcaacgttaattaacggtatcccagtcaaatgggagatcccccagtctttgtatgcttctctcagtttctccatgtccagatgctccatatcgataatcgggatatccttatcttcgatccgatctagacccagttcaatggatgtttctagtcggttggttcgctcattaaatgaaaaggcgaaactctggtagatacggctctggactcgatgtttctgttctctctcttaattttgttaataaagggtaagagtattgtaacgaccgcgtcccgcgttcataaagaggccaggttgttttaggagaaaactagaccatggtcaagaaatggactaaaatacttagtcggaagaacgagaaagttcaacctgaaccagctaggtgagctggacaaactaggatgaactagctagctaagctaggtgagctaaaccagctggaagactagctaactcagctaggtgagctgaccaacagctcgactgagctcggtgagctgatcaagtactgacccagctggttggtccggtcatctgacactcgagttggttgactgtggtagctcacgggtgaagagatgtctcggccaaaaggtgtaaggtcgagcgggtaccaacgaacggttgcatcaccaaaggatacaaggaacggatgtgacctttcgaaagaatgcaaggaacggatgtgacctttcggaagggtgccaagaagggatgtgatgctttgagaagcatccattcgccccctatataagggaggacgcccaaggcctttggaatcatctcacaacattcaaaacaccacaaaacattcttaaaagagtcccaacacatcctgaagttgttggtcggaaagggggtgcggctcggcgagtataactcgaccgaactgatgcgcatactacctcccggtccaacggttcgatggagtgtagaggatggagagggtagaccgttcgtcttagagacgaatcggatctggtagaccgatcgtcggatcggatcggccagaccgatcgtcggacggatcggatcggccagaccgatcgtcggacggatcggatcggccagacggtcaattccctaacgtgtaccttaactaataagttagatcgttacataccttggccaatatgcggatttgactccttagcccatttgtcgccttattccatttgtttaacgattctaatccgatcgtgtattgatggaccaatctatatcgttacttagccatataaccaaccaaccccactgatctaagtacaacgatagagattggggatcgtacgattcccttgtttcacgatggccgaattaaactattggctcattggtccatccgttctccagacgtacgtccctccggctacatggtgaacgattgagcgctcggcttatcgaactatccatgtttccgatccggtcgtttaacactacgaccgcccacggtttactaaccgtttacccgtccggtccatggtggtcgataaagctttcggcttaatgatccatccatgcggtccgaacgatatccttatcacacccaagggtccgtggattcatccatcggatcatcgtaggctagcccatgaaatccttcctccgtcggcgttaggtttgctcacgggtccaacatccgttttgtccatcggttcccaccgtggactttcccgttggttatccgtcgagtcaccctttggtcttaccgatctccgatcggtttcaccatggctaaggagatagatacatgaaggcagccgcgatattgatcccatatggtgaatcacgttccttacccattcttggtgctttctccctttaccggtaagattgcatccatgggcgacccttgggtgtgtccggatgcacttatccttgtgcttcctcgaacacttttctcgatccatcccatccgacgatcagtctatctgacccttccgtctgacgatcggcctgtcccatccgatccgtccgacgattggtctgtgcgatccaatccgtctggccgatccgatccgatccgacgatcggtctaccagatctgattcgtctctaagacgaacggtctaccctctccatcctctacactccatcgaaccgttggaccgggaggtagtatgcgcatcagttcggtcgagttatactcgccgagccgcacccctttccgaccaacaacttcaggatgtgttgggactcttttaagaatgttttgtggtgttttgaatgttgtgagatgattccaaaggccttgggcgtcctcccttatatagggggcgaatggatgcttcccgaagcatcacatcccttcctggcatccttccgaaaggtcacatccgttccttgcatccttccgaaaggtcacatccgttctttgtatcctttggtgatgcaactgttcgttggtacccgctcgaccttacaccttttggccgagacacctcttcacccgtgagctaccacagtcaactagctcgagtgtcagatgaccggaccacccaactgggtcagtactcgatcagctcaccgagctcagtcgagctgttggtcagctcacctagctgagctagctagtcttccatctggtttagctcacctagcttagctagctagttcatcctagtttgtccagctcacctagctggttcagcttgaactttctcgttcttccgactaagtattttagtccatttcttgaccatggtctagttttttcctaaaacaacctggcctctttatgaacgcgggacgcggtcgttacaagtctacccccttaaactgaattcgtcctcgaattcggcgtgtgtaagatcttgcttactccctaactcgggacacggacgttacaagtatcttcattgcacaactctattttttcctttattttatagtaaaaataggttatttttctccattgtatgtctttaaaatagagttacttcaaaaatagagacaaaatctagaaattactctatatatagagtaaaaaagaaaactattctatattttttctattttagaagaaaatctattttacagacatgaaataaagcaaaatcaacaatattttctgtagcacagaaaaaaaaataaagttgaacattggagataatcgatgcatatatccaaccatcatattatatttatataccaaatgaaacgttactaagatagtcaatgcatgtatccaaccatcacatgcccaactcaagaccaacgtaggtccgcccctgcatgtgattatgttgcgtaatttatgcatagattatatgtatggcacacatgcatttgtttggacttaagtttgcagatcatcaataataatttatttttttctctagaggttgttcaatatacgaattagaaggcttcatcatgtctacatataaagagaaatggcgagacaaagtttcacccgaagctcggttaaaaaaaactctttgtactaaaactaacacatcgtaaaaacatttttgttattttagtgacttttcaagactttggattgtcatttatcttatgtgaggtctaatagccacctaaggtaaagctttccatcaaccaatttttttagataatcgccgaaaattctcgataaatagatatatactagtgatgactccactatgtgtgtatattcatggtttaaaaatgagaatatatatgtataaatcccaatttaaatctcactaactagatcataacccgtgctatacagcacgggcattaatattttgtataaattaaattgtatactttatttgaattacataagaaatagtataatataaaagtgatactataatatttttcaatgtttttactatttggatataatattgcattggattgactttgtttaaaaatgttatttttataataaatacaacatatgtagttttaagtaaatatgtaaaatttgtatacaaattgttttggtaagaaacatgtttcctttgtattagaggatctaatttttggcctaacttaaaattagtctgtgtatagtattttggttatatttgtgaacctaattgggccctatattagattatatttgtatagtattttggttatatttgtgaacctaattgagtcctacataagattatctttgatagggctcacgaaaaaacggacccgataaccaatccaatatccgaacaaaaaaaccgggttagggcgagttagaattttaggaaatttccttactgggtagagttttaatacccgtggatatccgattggtccaaaaattacccgttacgcaaaaagggtattcaaaaacccaaacattaatttaatatccaaaatattaattatctttaatcgtaatataatctaattatctaagattataattataaatctaaatatgtcaattaattaattttggacctaaatatccaaaacaactaaactattcaaaaattatttattatgtttgtcaaaatttagtaaaatatattcaaatataattaaatttattaaaacttaacaaatttaaaagttttttttgtttggagacccgctatctacatacaaaatacccgtttctatttttttaggaatttttagggcctaaaactttttatccaaactgatccaaacccaaatggacccgacccgaaccagaaccaaatatttagaattattctattgggtagtaaatcatatacccattaatcccaaacccgaacgggttctacccgaactcgaatgggttactcatataaatatgagaagtgaactataataattaataaaaattaatatgataatttagatatcaaatctaatttgttgattttaattggttacttttttggaaattaataatgtatttcgttttttaatttaatttaattaattaaattagtttttgactttttaatttttaaagagatgaattaatttactctttaaaattttaattttaatggcatacctatgtaattacttacaaaatataaggttacatttaaaatgtacttcccaaataatatagtaggatttatgttgtttagaagtcatttcattaaatgcttctctttgatattttatttcaccatcaaaaggttttaaacaaatacatatgtaatttacaatttatatttcaaaaacaaattattaagcccacgcattgcgtgagtttcctagtgacaataatacaaacaacaaaaatgaatgttttttaggaatatatcccatgaaaatacaaataaaacatatggaacaaatatataataaaacatctatactattaattgggaatcattgaaaactaaacatattacaaagaatgccattagaatttttgaattctaagaataaatgaatggtttcgtagaagggtaaaatgaacatttagtattacaaaacgcgcggatcctcggtatatagatcgggtctagactggatagcacgcggatgttacgaatcatttaattttggttgcgtaataacccaattgggcttattgggcttaaccaattagggcatttatgatgcatttgaatttaagcttgatatctgcactgattaaaacttattacagatttggttcagttacattaaaaaatatttccataacaaacaaatattctataacaatatgacaaaacggatatttatataccaacctaattccatattttccgttgattaaaacataacttctctccttatattccttatattcaattttcagttaatgtatttctataacaaacaaagctataaatttgaattagaaaaagcataattcaaaatttatcctacaccaaactaatcccatatattccgatgattatggaaaacttatctttttatatttcaaaaaaaaaaatcaattatattcatactggaacaaatcaagcatattccatattaatcctaattcaaaaatcttctctttggtgttaattttctaaaccctaaaacaatctagccgaccattttaactataaatatagatgcataattccattgaagatacacacaaaaattttcaccacgaaaaattgctattggtactccttataataaaatggctgcaaatcttggcaacaatggagatgattatggcgtttacatttgtatgtatagattcgattttcactagatcttttactctttacagtcttacaataatcattaacagatcctattattaatacgactttattcttttctatatagggtgctttgattcatgctaatattttgattcatgctaatattaagaaacatcaagtgaacaagctttaaagattcatcagatctgagagtgtagaattatggaaaattttacacttacatggggtaaaaataactaaaaaacacacaccaaccaacaaaaaaaggcacatcaacagctttcttcttggtcatagcatccatagatgaagaaaaggttttcatctcttactatatcttataaatccttcgttcttggtctttgattttggcgtctctcttcatcggagattagaagagaaaccacatcaagaaaataaataagagataatgtctgatgagcattctgtgaaagagaaacgaaaacgatgacttgatgagggtgaagttggagagagaataaaaagaaagttgcttcctttcagttttgtttttctaattcactcatttattcatttttctatgtgtcacaaagtattaaagtgttctattttatactttcgattggtatcatatttcattttttcatggtgcgtcgttatgtacaattttgtcaaacaaatatcaatgcaccgaaaaacaaagtatctacaattagcgtggacgatgtttaagtgtcatattaggactaagatcaaacgttacataatattactaaataatcttaaatgcatggtctaagtctaaactaaagctcataattcatttcagtgtgatttactatgttttgtggtttacctgtcaattctctccgatttgttttcattagtaaatttccaaatgaggcacatcgatataattaatccattgaaaatttggaatgtcaatcctttagtaatatactaaattgttttggcaagaaacttaaatttggagagtgcatatatgataccaaagattttgctgattttatgaatatatttttagccaaacatgggttttaaaaaaaatatttgcaataagacaagaattgttctaaacacaattagctgtccaaaaaagaatcagtaatatacttaatacaaaataaaatcgaatagagaaaatgtgttaaagaatcttgcaaattgggtctgtatgtatttcagcctaaacaaagtttatatctaattcagttattggccagtagtcagtagattaaaattttagaatgttttttatccattaccaaatataagtttgtaaacaataatgttgcattactaaaaaaaaatgttgcacatcttaaaatcaaatatctaagaataacaaaatttctattataggccttaactttacaactgtaaaatggtgtaaataaaacattaaatctattcaaattttataactaatcaaactgaattttttttgcaccattgtttatgttaaacacataatataacaattaattttctaatatctatactattatgatatatctcattcactacaaaccaaaaaaataaataaattaaatactactttagaaaaaactaaattgaatataaatttaatacaccatatttttaaaaatatgaaatcctgcacgtatgtgcgggtctaattaaagcgcgaatgacatttgtagcggataaaacagaacaagtagttcacgtgattttcccgaaggaagcccctatggagaagctgagtttccatctcactctgtatcgtgatagtaggaacgaatcgcataagcggcttgcgtcatggtaagaagaataacgaaaacaacagcaaaggatgacagagcagtccatggtgactcaaagtgcgtgtgcctaaagccagcccatactccattgtacgttttggaggtgtactcgttaactccctcaaacacattccgtaagtaacttctacgtgtgtcaaatacaacatctttacatatagttttgaaaaactgtgatacctcattctcgttgccaaagtagttctctatgatccgcttgtcgttgttcaagaaagtagcatcttcctgatcgtttagaagacatcccatgaaaaccacgtagcttgttatgtcgttggtactctctgtgtaaaactgttcaaaggcaacacagttgaggaagattgagctgatgaaaccatccaatcttaacagtggtatctgaagcttgttcttctttaattttatatctaatattgattcagcatcactccttaacctgaactttatcccttggaggcgaagtcttttggccgacagtatcaacggaaatgtagactctgacgatgatacttctccggatttacccttagagtgttgaaatttcgaggatggtgttgtttctgattcacccatagatctcatgctaggtatgaaggtcttacggttgaggtcaagaagatgtttagccccgcggtctctgtgtttcgcccaatatgtatctggtttatctattgagaggttgaagaagctaaacgccatcctgtttagatcaccaggtgaccctattcctgatttatcaaatatagttcgaagaacaaagaaagggacctgattttccaagaggagaagatcactctgaatagatgccaaaatccaggggatcgtgaagattggatccttattcatatccaaatctatctttcttgacacgataagtaacaacatgagaatgaagcacccatccaaaatcatcatagacaccagttctgatttttctatcctaagttcctcagaataagaagctcttatcttgtgttgcaaagcacctactgccgcatacaagacgttttcgtccattcctttctttgttgccctgtctacgaaaagctccagaaaccgaaacttgtgctgctgaatcatttggaggtgattttctccgtaatgataaggaccaatggaaacaactttgggcttataggctttaggattcacctctgcgaggctatcagggattctgaagatgcagcaggacgccttaccagctgattccaaaagaatcagtggtttccccgatgactgtaagttgcgtttgatatgagatacaacacttctttcactacgttgtcgtaatggagaaagaggaccttcgtcgataatactaatagctatatcggaaagtgatgacgttgatctcgtctcatcctccataattcaaccccacttggatcctgttttcctggattcagatcatctatatttgattatcaaatttcaaattcaattcaaattcaataaaagagtttggttggagaaccgttgatgaaatcttaccaagggcgggagtagttgtaccgtgcgttctgcgctcttatcttcattcctgctgtagtatctttaagtcttttgtttacgttttttttgcttttttctttttcagaagtcttttgtttttgttttattcttgactcttgcgaggaaggtaattataatttgtaagcgactagtcagtctcgtcggcccaccactggtccattcaagtggggatcaaatccattcacgccagagaagacgcatttttggtagaattgtcaaaatatgtaaaccaacacaatacactaatgttgctgtcaaagaagaaaacaactagattttaacccgcggtacaccgcggaaacaatttattttttaaagttaatatacataaaagtttgcaaattgtatctatctataaaatatttttattttgtagtttacaactgttattaagtaacatcctgccaaacccgtcccgcccacccgtcccgtaaaaaaatcatttattttattaatgttaatcttatttatgatatgtttatgaattattgtctaaatattttgtaattttgtagtaattaaacgttatcaaatatctctgcggtttgatgattataatcgaattgttatagtcatggagaaaatcaatatcaaaaatgataattttgaagtaattaaatgatagtaaatattttggaagttttattttaataactaatgtggagagatttagggaagattgttaaatgtcaaatatttatttcgaagatgttttttttaattatcaaaaacaaacattaaaattcagtggcagtcattgtaaataagtcccaactacaggatttatttcacaaaataactgcaaaaatgtatatatagatgtcaaaaaaaaaacaagggagatttgcaaaactacacttattctaataaccttttgtaaaagtgtctttttctgaaggccatttttaaaactacctcttctaatatgccaaatgactgtcttaccctctgaatgattaggtttcacgttggtttcctctccgattttcctcttcttcattttggcacaaacttcttcgttttcctctttgattttcctctccgatttcactcaaaatcgccggcgaatttcctctccgatttcactcaaaatcaccgacgaattccctctccgatttcactcaaaatcgccaacgaatttcctctccgatttcactcaaaatcgccgacgaattttttttctgagaaaccccaaaatcgccgacaaatttcctctccgataaacctgttcttcgctgaaggattcagatcatttctctacgacgcaaacaatccccagagatatcgatagatccgacggtaaccgtttttataatcgattttataatcgattttatagtcgattttatagtcaattttatagtagatctgacgctgtttcataacatgttttgcagatggattcagagagtgaaatccttacattgcctgaacaaatctacagagaaggtgaggaatctattgcactgggaaccgttcaacaatactcggattggaatttagttagtaaagtagaggaagctttaggcgagtgtttatttcagaagattagaagttcgtttcttggtcctctagttgaattgggaccaaaaatgaaggctaagaagggaatcagattttctggaaaaatctttcactatctcatgcagcagagagtgaaaacaaaaggatcaactctttggtttagagttgattctcaacctatccgtttctccttgagagagttctatctcacaacaggtaataaagttttacaatcgtttttaaagcttaattaactgtcgtagaatgatttacaaggcatttgcataactgtttgcgtagtttacaatcgtttttaaaacataagtaagtgtcatagataatttacaagggattttaaaagcttttaaaaggggtttacttcattaacaatcgtttaagaagcataagttagtggcagataatgatttacaagggattttaaaaagggtatgcatggtttacaaccgtttttaggcataagtaactagcatagaataatttacaagggattttaaaagcttaaagaagtgttaaacacgtttacaagggattttaaaagcataagtaagtgtcttaaaacgatttacaagggattttagaagtgtttgcatagtttacaatcgattttaaaaacataagtaagtggcatagaatatttacaagggattttaaaaccttttctaagggttaaacatgattagcaatcgttttttaagcataagtaagttgaatagaatgatttacaagagattttaaaagcttttagaagggttaaacatgatttacaatcgtttttaaagcataagtaagtgccatataatgatttacaagggattttaaaagtgtctgcatggtttacaatcgtttttaaaaccataagttaatggcattgaatgatttataagggattttaaaagcttttaaaagcttttaaaagtgttaaacatgatttacaatcgtttttaaagtatttactataaaacctgtaataatagtctctacactgtcttttgttcatacaggaattcaatgtgaacctgttcatagggaacttcgacgaaaggggaaagatcctgtaaaagaaccatacttttgggctaataaagaatcctatactcttggtgatctcgaagatcgattgtttttaaaacctaaggaaggtgaacctgctgttgaagatgaagaaaagttgtgtcttgctgcagtagtgttgactgaaggaattcttttgacaccatatggaaaagagaagatacctttgccaagattgcagcatgcttctgattttgagatgtacacagcccaaccgtggggtaaagaagcattcagtgttctatcaaattcaattctgagaatggacgagaaaacttgggcaaaagagaaatatgatttgagaggatttggactagcgctaacaatatgggtgttgagcgcagttccagcatttggtgcagcatatggagttaaagataaggaattccaatctgaatatccattgatattgaagtggaaaagcactactactccagagtttttcaagatcgtaaaccttgtaaatgatgtttctgaggtaagcttttgtctatttacagaattctttaaatggttttgagatttgaagttctgctttctcaagatttgtaatgttattgtaacttcgcagattgaggtgaatacaattattggaaacccagaagacttcaagtctttagttcctgatttccacacagacgacgtagaattccaacaggttttggaacttgttaagatgggctacagattgaagaaaactgaatggaatacaagatgcgttgatgtttgtgttgcccttgaagaagtaggtcaaaacaaaatcaataacaaaatatctgatagcgagaagcttgacaggattttgacaatccttgaagatcttaacaagagagtcgagctgattgagaggattttggacattagaatggaggaaaagaataatcagagatctgaggaagatgaagaaagaaaacaagaagatgaaggagtagaaagacaaccagaggtaattgtaaatgtttctttaaaagctatttgaaaggaaatgttttacaatgtattttaaaggttaaatacgtagtaaacctttacaatgtactcttttttttcgcaggctgaagaagaaggaggactagaaagaaaagcagaggtaattgaaaatctttacaagctattttatagtctactaattatgttttaccatcacgttgggtgttttgattgacttattgtttttattttgttacagaatgacaatgaatcatttgaagattcaatccgagagccaaacacacagtatgggagctatccgggtgatgatgaaaacatccaacgtgatgttggtgatgaattagttgaagaatcatcaaaagtacagtaatttatatctctaaaagtcttacaaaaatgattagtatccttttttataattttacattctgttatcttttcaaggatatgtctcctactccacgatcctctacactaaatttcaatattttgtctgaagaaagtctggatgttcaaaaggataagaagagagttagcagaggaagaaatgaggttagcatttaaaaaaatttgtattatctaaccaagtgtttataatatttttttcaaatctttaaaagtttatctttcatgcaacttcagaacaagagagttaaaccaagtgttcatgctgaggataattttaaaacaagaaaacaggttagtatttgcaacagtactgtttttaaaaattgtcaattgtcttgttatgatatttacaagggattttaaaaatacttttaattggtgttttttactattctagatgccgagaaagaggcagaaacaagttgatagtgctgatgttgatattccaacaaggaaagaggttagtatctaatttattatgattttgaaaattttgtttacaaggtattttaaacatctattttttttattatttttgataggcacaaagtaagaaaaggaaaattattggcaatgatggtgataacgctgataatgatggcgacaatgatgattttcagcccgctccgcaaagaaagagtaagcggggtacggttccttccattcatacccaagcacctttcacagctgagaagaagaagcatccaattttgcatccatttgcgaaagttgatgccacaagacttgagaaattggctgaatggaagaagtcaaggaaaaacaagtgagttttgttagtaagatagtgagttttttttaataatggaagaagcatcattgttgactgttttgttgttgtaggccactatcaatcgcgggaaataatgtagatacaaagtggtttacaaccctagagacgccagggaaagcaatcacagcaacggtatgtctaaaaatccttgtaaaattggtaacccatgaattacatatagtttttaaagcatcattaagttatttacaaaagtgattttaaaaagggttacgtggtttataaacaattttaaaagattagaaagtggtaaagaatgatttacaaggtattttaaaaaggatttacatgacttgcaatcgtttttaacggattagaaagtggtaagaattgatttacaaggaattttaaaagctattaaaaagggtttaattgattaacaatcgttttagaagcagaacttagtggcatagaatgatttataagggattttaaaagcttttaaaagtatttaacttgatttacaatcgttaaaaagcataagtatgtggcgtagaatgatttacaaggtattttaaaaagggtttacattttttacaatcgtttttaaaggggttttctaatatgataatttttatttttgttgtgtttagcatgttgatgcagctttggagttgatgaaaacgaggaaggaaagcaatccagaattattcaaaaacaaatcagttgtatttgttggatcgtctttcttaaatgtgattgatgagtcatacatggagtttttggataacaaagagggatttcagtttcagtctgaagaaatcagtaagctgataatagaggaagaaaccaagtgcatattggctcatttctgtatcaaaggaaaatgctgggttgccttgctcatccacttggaacagaagacagtttgtatatgggaatgtgcagcttcttatttaacagaagaagtcaagaaaaaatatgttgctgcctactctatagctatgccatacattgttcggaacatcctcaaaaaagaagacatggatgtctctccatttagcatcaaagtcctgaccacttttcctcaggtaacttctttaaatatatcatagtcttagaaatgaatattccgtaagtcctgacttctataacttctttgcttaagtaattcttttggtttttggttgtaggctcctagaaatgaagagtctggtatctatatgctgaagtttatggaatgctactcaatgtataccagccattcaaaccttgaagggaacataattcaaaacgttaggaataaattggctgctgacatcttcaccgaattagggtcagtcactttgtaaaagtagtagacttctaatcaaaaagtagtggagtataagatagatttatcagcttttgtttcttatttcataaaactttgtcatttgaatattttatgaacatctgtatggaacaagatttatgaagtttatttagttcaactccagttttacaaaattactgtataatggttgtttgggttaacaggtgctttgatttgaatggaaaaagactttaaacatgcttttaaacagggtttttaaacgatttacaagctgctttataaggaatttgatagtgttgaaaaagctgcaattgcggttattatgaaaaaaaattacaatcgtttttaaaatgatttacaatcgtttttaaaaaagatttacaatcgtttttaaaagagatttacaaacgatttataagctgttttaaaagcgttttaaaagtgttgaaaaagctgcagtaactgttattatgaaaagctttacaaccgtttttaaaatgatttacaaacgtttttaaatgagaatttcaaccgttgaaaaagttacagtaatgttaaatactgtatctgttactaattgggcctaggcctgttatttagaaaaacaaactgttttagtttaaaaaaaactaaaagcccaaaaaacactaaagccctaaaattcagtataacctaaaaacaaattaaacagggattggctgctgacatcttcaccgaattagggtcagtcactttgaaaagatttacaaccgtttttaaaatgatttacaaccgtttttaaattgatttacaaccgtttttaaaatgatttacaaccgtttttaaaagagaatatcaaccgttaaaaaagttacagtaatgttaaacactgtatctgttactaatttggcctaggcctattatttagaaaaaagaaactgttttagtaaaaaaacactaaaagcccaaaaaacactaaagcccaaaaattcactataacccaaaaacaaaaaaggaagggaaccgtgaaaagacaacaaaaaagtaacaaaaaaaaaaaaaaaagaatacaaactgtcgtcttcgtcttcttcctttcaacaatctgaaaaaaatctgattatccagcaaaaaggaagcaattgaaggtaactaatttacgaaactgaagtttaacatttgggtttgttcgatttttgccgaatctcttttttgttctagcatttctaggtttttcggttgaaaacgaaacaagtaaaataaattgatatttgggattttgaaggagtgttgaaaattgttatataaatttgacagatttatgttttaaagtttgatatttgggtttcaaaaaccttcaaagaagatttcaaatgccgattaacttctctgttgtagcaatttcaaagttttttcgttttgaaactttaacagtaaatagattgatgtttgggtttgtattttaatttatagatcctcacttaatttatgggttaccagttgattggagttggtttggaaaagggttttttgtttctattttcagcggttgtgttctttgaaaaggattaaaattttgtctttggaatggtttcaaaacggtctttaaaaaggattatggggtaatgactgtgttttacaagggtttttaaagtcttaaaacgacttgtaatgactttaaaaaatggttttacaagggtttttaaagttttttaaacgacttgtaatgactatgtttatgtttcgaaaacaacaaatgcataatagatttacaaaaatggtttttaaaaccattaaaaaaaactgtgttaatttaatgactgtgttaatgtattaaatcaggttttgagaaatatgagtacaaagaaacttttcttccctaaaagactgttccaaccaggcagcgaagtagataatattacaagggtatcaaagcattcatccttcaaaattgtctcgactgtcaggaaagctttagagccgatagagttcaacacattaatgggcacattcttgggtcctatagtggaattcgctgaaatggacttggcattttcaagccatatcgttcatcatttactccagagaagaatactaaccaacaatgacaaattgtggtttgtatttgctgatcaacctatgcgattctccctgagagagtttatcataacaacaggacttccaatggatgatgcatcaggaagcagtccaaatgtgaagagaaagaagaaagaaaagtggtggataaaagataatcagactttgaagggaaagcagaaaaaagatgtgtggattaacaaggaaatgacttttttagatcttacatatgttttggaaaagcgttccaaaaaaatgcagccagaggagagactgagattggcgggttcgttactagtggaaggcatattgctagctcgaaatccgactaccatgctgtcaattgagaatctgaagagacctactgatttcgaaaagttctgtaagtatccatgggcgcagattgtgtactcatatttggtaactgaagagaagagaatcggtaatgactatttgttaaggaaacaatatggtctatttggatttgttcaatcaattcagatatgggcattatcatcgattcagaagttgggagaaaagtttggcactagagatgaatcatctagtggaaatattccattaattctctaatggagatcaacatcgtctccaagtgcaaaagctataacaatgatagcagatggtgacaaggtacattttcttagttgtggctttttttatgttttaaacactgtttataaataaagagtatgttttacaatagtttttacaatcaagttttaaagatttacaaagggttaaaagcaatttaaactatttacaacgaaattttaaaaggttaattaagaattgtgcattatttttacacagtttggaattttatttatttttacaggttgaagtgacaccaatagttggtgttcataatcatgaatacgagcacttggtttcacagaagaatcctgaagacaaggatctgttggatgtttttgatcttgtgatcaaaggatatagaatgagcaagaaggattggtgtcagggatggattcaagtggaacaaggacatcaaggaagaatttatcatgtcttgaaacctgcaattgaaacagttgtgcatcaaagcagaaaaagaaaatcaatgtcctttggtgagaaggtaaaactggtatatgaaaattgtgaggttcttaagaagaaagttggaaggctggagggctatttaggcatccaaagagttcctgccagttatactagagaagaacaaaaagaagaggacgaaaaaaaggagcaggaagaagaaaagcaagaggaagaaggaaaagaagaggaattagaaaaggtatgtgtttttacaagggattttaaaagcttatagatcgtgttttaaagatttttagccgtttttaaaagataggcagtgttagatatgtatttacaagggattttaaagacttcttaatggggttttaaaagattgaaattcgtttttaaaggataggcagtgttcgataagattttacaacggattttaaaagctttttaaaagtgatttacatgagtaacttgtagttataaaacttgtaattttatatacaggttgaatacagaggcgacgaagggacagaaaaacaagaaatccccaaacaaggcgatgaagaaatggaaggggaagaagaaaagcaagaggaagaaggaaaagaagagtaattagaaaaggtatgtgtttttacaagggattttaaaagcttataaatcgtgttttaaagatttttagccgttttaaaaagataagcagtgttagatgtgtttttacaagggattttaaagacttcttaatggggttttaaaagattgaaattcgtttttaaaggataggcagtgttcgataagattttacaacggattttaaaagctttttaaaagtgatttacatggtaacttgtagttataaaacttgtaattttatatacaggttgaatacagaggcgacgaaaggacagaaaaacaagaaatccccaaacaaggcgatgaagaaatggaaggggaagaagaaaagcaaaaggaagaaggaaaagaagaggaagaagaaaaggtatgtgtttttacaagggattttaaaagcttataaatcgtgttttaaagatttttagccgttttaaaaagataagcagtgttagatgtgtttttacaagggattttaaagacttcctaatggggttttaaaagattgaaattcgtttttaaaggataggcagtgttcgataagattttacaacggattttaaaagctttttaaaagtgatttacatgagtaacttgtagttataaaacttgtaattttatatacaggttgaatacagaggcgacgaagggacagaaaaacaagaaatccccaaacaaggcgatgaagaaatggaaggggaagaagaaaagcaagaggaagaaggaaaagaagaggaagaagaaaaggtatgtgtttttacaagggattttaaaagcttataaatcgtgttttaaagatttttagccgttttaaaaagataagcagtgttagatatgtatttataaggggttttaaagacttcttaatggggttttaaaagattgaaattcgtttttaaagggtaggcagtgttcgataagattttacaacggattttaaaagcttttttaaagtgatttacatgactaataactgtgtcctggcttgtatttgggaacttgtaattatttatacaggttgaatacagagatcatcattctacttgcaatgttgaagaaacagaaaaacaagagaatcccaaacaaggcgatgaagaaatggaaagagaagaaggaaaagaagaaaacgtagaagaacatgatgaacatgatgagactgaagatcaaaaagcatatgtaattttgtcagatgatgaagataatgggactgcacccacagagaaagaatcacaacctcaaaaagaagaaacaacagaggtctgcattccttaattgtttaaaaagacatgataaaattgtcaaaaaataaaaatttgttttgatgttttggtttacaggttccaaaagaagaaaacgtagaagaacatgatgaacatgatgagactgaagatcaagaagcatatgtaattttgttagatgatgaagataatgggactgcacccacagagaaagaatcacaacctcaaaaagaagaaataacagaggtctgcattccttaattgtttaaaaagacatgataaaattgtcaaaaaataaaaatttgttttgatgtttttgtttacaggttccaagagagaccaagaaagatgatgaagatgttaatcaaacaccactctctacgcaagaagaagaaatcacccagggacagagcagtcgtaagttctttttacattcacagatgatttgccttgataaacaacttctaaatatttttgtttttgtttttgtatcagttcaaactcctttgacgccggtcatgttgagtaaggaagtaatggaagaaattgacctaaaagttaaaaaatgggcgaaaaacaaattaataagagatctactatcgtcacttgaagaagtaagttaaattacatcattgttttgctgcaaaagattttaattttaatcattttgaaatttttacatttcagattctttggcccgacagtaaatggcaaaaagtcaaaatttgggatatgtggaacgagaagaaatacaaattagcattaaagaaagcaacgttactcattcatcctaacaaactgcctcgagctcatccagaagtgaaatacctagctgaacaaatctgcaagataataatggttagtgttaaactcttcttttgtataacgatatatctttaaaaacttgaatattattgttatgcaaaaaataacttacaggttgaattttatttgcaggtagagaaggacagagctactaaggcaaaaatggatttagttctttagactgacttatttcaaacatgtttattttacttttgttatttggaatctatgattgtacttgtattttaattatgactgtcaaatctaatcaaaatgctttactattgtcaactgtttatggttttataagaattgtcatgatttacaagtaattttaaaggcagaaacagcttacatggtttgctatcggtttttaaggataataaagtggtaaaccatgatttacaagggattttaaaagcttttaaaaggggtttacttgattaacattcgtttaagaataataagttaatgtcagaaaatgatttataagggattttaaaagcttgtaaaagtgtttaacttgatttacaatcgtttaaagtatatgtaagtggcataacgaaagatttacaaggtattttaaaaggatttaaacagacgttttaaacaggattttacaagagattttaaaagataaaatattggaataaccttcaaaattacttgtaaaagtttgatagtaattttaacaaacgagagtaatgacacgacacaatgaagaaaatattaaaaacccaacaatattcaattctttggagataaagatatatctaaattgcagcaacacaagttgatttgttgtgacccgactgaccacacctactgcatttgtgtaattttggttttggctgagaccgtccatgctcccaaacagaaggtatcctctttttcttccgtttgccagtaggtacacgagtagaaggtgggagacaaataacttcactaatagtttctggaatctcccaatattccatatcaccatttgggtgaatgctctctgaatatgcttgacgccacctgtaaattacagcgatgtaaactgagattaaaaccacataaacacagataaaaccataaaaagagatattaaaacattttaaaacgcctgtaaagttgtgaagaatagagataaaacctgtaagtagaatgaaactcatcaacaaacatgttttcgttcagattgatatgtttagcagaagcaattccatgtgcgcaaggaaatttatcaatatcaaacatacaacatgtgcaagtccttttgtccagattaaccaaatgcgttttggtatctccttttacctcaaactcttcttgattaacttgacaaacctcaagccatcgtgttgaagtatcatatgacgctttcattttcttccctacatttatagtaacagcagacggatgttgactactctcttcacgtcgttcattaaaccatcttgtcataatagatctaattgactcaaataggcaaacaaccggatactcgcggttctgtttcaacaaggcattaacagattcagctagattagatgtcatgatgttgtaccgatttgaaggagaataagctcgagaccatttcctaacatctacctcgcaaagatattgtgctaactttttatcactattagtgatttcccagaacaaagaatcaaattctgtcttcgtgtaaattctagaagccgcatagtaaactggaataagtgaagaacctctgaaatgggtttccaagtttttttgcaaatgaaaagtgcaaagtccatgatgagcaagtggataattccctgaaagtctgcttgcaatagaagcagctcggtcagacacaaaaactaaatcattctcatcagggattatattcagcaaacacttcaaaaaccagtcccatgacgcgtcattttcagagtcaactattgcaaaagcaataggatacaaattaaaattcccatcctgagctgaggcaccaagcaaagtccctttaaactttgatgtcagatgggcaccatcaatagatatgacttttctcatcaacttataacctctaattgatgcaccaaaagccagaaacgcatacttaaacttattagcagaatcttttttgaaaaaagtgatagaacctggattcgtcacttgtaccctgtggaaccacctcggtaaaacctcaaaactatcatcaggtaaacccctcgcaagttctgctgcatgtttttgaactctccaagccttcgaataattgattccaactccatgatcttttctaaatatttctatcagctgtttaggtctgaggggaagctttcctccttcaaaatggttacttatcaatcttcctaatgtccttgcagatgcttgacgatgactaacattccttaatgaagagtcacaactgtgatgactaacatacttccgaataacataactctcggatccaccagccctagttgcacgtagtctccaactacagttttcatcaatacaatgaagaacatacctcgtgagatctgatttcaccgtatgaaacttaaagctgtgcttcactgcaaacttccgcaacgtgaataccatttcatctttgtctttgaaaatttttccaataaacaaagaatcagcatcacttagaccagttgaaaacgcagaactagaatactgttgatcaagaatactagatgtttcagatacacacgcctcaataatcctagaggttaacctcggctgccaaaataaaaagcttacctcaaacatcaatctatcttaaataatgattttacaaggatttttaaaaggggtttaaaaacgttaataatgattttacaagattttttaaaaggattattacctgagtagtagatgcagaatgagaagcaaaaggatttgaagtcgtctcagcctgtaataaactcactcactgacttaataatgattttacaaggatttttaaaaggggtttaaaaacgttaataatgattttacaaggatttttaaaacgattagtacctgagcattagggacagaatgagaaacaaaaggatttgaagtagtctcagcctgtaataagcacaatcactgacttaataatgattttacaaggattttttaaattataacacaagaaggttattgaaaaacctgctcaactgtcacagaaatttgctctacaatcaaacataactgaagcaatcctccactctgtgagaatttgtgcataaaagttgcaagctgtctatcgttcctaatataaagaggatgagattgtatggttgtagacgtggagactaacttgtaactaagcttcaaagaattggttgaactatctatttgaaaatcctctacaagaatatcaaccaacgcgtgataggtaatgtgctcatcaatgagcactaaagaagctcccaaatcaatgtctaattcaaattcccaagtcatattgtttgtcaacttccacaagccacaaacagaatacaattctagcattataacctgataagataaataacaacaaaatcaacacccacaaaaacactgtcactacaaagagaagcaaggtttacaaatcgttttaaagcgtaagtaagtagaatagaataatttacaaggattttaaaagctttgaaaagtggttaacatggtttacaaatcgttttaaagcgtaagtaagtagcatagaataatttacaagagattttaaatgctttgaaaagtggttaacatggtttacaaatcgttttaaagcatatgcaaaagaggtaaacactaaatcagaaccaaaatctattacgaaatagtataacgaattcacataagcaaatctatcacgaaacagtataacgaattcaaaaggattttagaacagtataacgaatgtacaaggattttagaaacaaattcaatcatcaaatctcaaacaaaattcaaattcgaagctgaagcaaatgtcaaactgtcgattgaatcaggattcaaataacgagttcacataatcaacaacaaaaatcgaataaaccaattcgaaaacgaagatttaagctaacattataaaatcaaacctgggaaacgcaagagattcgacggcgacacacagctctacttacgacggcgaagatgggttttcacggcgagtaaactcattatttccgacggcatgggattcaacggcattcacaatttccgatggaggaagaagagagagaatgaagaaatgaattaggtctgtggatagctcattaagggtaatttggggagaaaagtattagaaagggtagaaatgaaaatggggaaaaaaagggtagagttgcaaaagggcattgaaaaaagggcattagagtgaattattcaaaaaacaatacactattctcactatcttaatggaaaaatatcgaaaaaactctaaactttcaaattttggatgaaaaacttttaattaacttctcaataattaaaaattaaacgtaactaaataataatagatttaattgcccgttaaaaaccaaaatgacgtcgttttaaagctaaaaattatacgtaaaaaaaagttatccaccatgtactcgaatcaaaaacatgggaaatccttaacaggcttttgaaccatgtagtcacttaaatctgttatcattttgttaacaaaaattgaatgttatttcttaaacgatctgattaacaaaacttaaattttttattgaaaagtcaattaaaacttcataattaaaataacatttttaaagtttaaattttttcgtctgacatttagtttttttttggacatgtttccctatcttgattcaatacctgaaaacgcaaatcttttaataaattaaaaataaaactatatttaaacgataaacatgaactacattatcttttcctaactttattccgtgtcaactatgtcgccatctgaatcttgaattacttgcactatatgaacaaccttttgacacgtgggcttaaggagagaagaaataaaagtttgaaacttgagagtagttccaaatatttttcatttgacaaaagttttaaaaaaaaatgaataattgctaagaatgatctttcaatacgggaaaaatgtcaaaacaaatcacgaactttcaaatttgggacgatttaattttgaatttcaaaaaaaacaaataaatcgtaattttcttgttgactttcgaaataaataacaaagtttttgttgacttgtcatttgagtcatgtcgttaagtaggttaacaaaaaaaatttacggcgttaatgtctcctttatctcctctgttagaacaaaaaaacgttgtttattgcagttcgttttgtctgttgacacaaatttaaaccctaaatccccaaatcgattttattatctgcgattttgaagtcaatgtgggtctgtgattttgagataataaaatcgatttggagatttagggtttatatttgtttcaagagacaaaacaacgttgttttgtctcttcaataaacgacgttgttttgttctaacagatcaaataaacattaacaccgtaaaaaaattctcttaacctatttaacgatatgactcaaatggcaagtcaacaaaaactttgtcatttatttcgaaagttaacaaaaacttcacaatttatttgtcgaagtttaagattaaatcgtcccaaatttgaaagttcgtaattttttgacatttttctcttttcaatactatctttttcaattatgttattttctctttctcatttttatttaccctctcttttattttttaatgaccatttacccatattttgaaaatattttaggttaacaaaataaaatattgatttgtcccgtctaaaatatttccgtcaaaaatttccaacaaaatttatttttgagaaaaaatactctcgatatatttttttagcgggaactagatttacaaagatttttgaatgatttacaagagttttaaaaccctattaaaactcttgtaaattttgtcataaccttttgtaaatattcacaagagtttttcaatggttcaaaaagagttacaaatgtattcaaatttttacaaatttttttaagagtaaaaaaatggtttaaagattttataagagttttaaaaagatttacaaaagttcctaaaatccttgtaaatcctttaaaaactcttgtaaatattttaaaattattgtaaaagattttaatatgatttacaattaaagagattttaaaatatttacatatgtatttaaagattttataaaaatttaaaaaaaaattaaaataatttataaagattttaagaagttttaaaatgatttataaagccttttaaacactttacaaagcttttaaaaaattttataaggttttttaagagtttttaaaaatttctttacaattttacaaagatttttaaatatattttttttgctggaaaatattttattacgggaaaaaggttttggtgggaaaaacttttttgaccgggaaaaaaataattttgttgtctgtcattttaaggaaggatactgttctctgtcttttactttggggttcaacttaaaaaactatttttcattcgtctgatgcaagcccatatcgagattgtttcaaaacatagagattcttttttgggccatacttctttaggttcagccgttttcagggtaacaacttctgatgaaactgaaaccaagtaaattacccattcttcattttgtgggcttaatagacatatatttgtaaagtgaggatccaatttcgaaaattttaggtatcctattttccacagcgtgatagcgacaatgctaggccacatgtcattatttccttggtccatcttctgaccattaatacaaattaacaaaattacaaaacattaaattcaaaaatctcagcaaatatagaggatttacgttttagtgtatccgattatggttcgacagagagcatagaaacaaaagtttcctccacttgttgtttcaacaaaacaaaatcctcccctttcatatgttagttacgaggcgatgggaatcgcatccggcgaactcgccggacctcatcttacagttttttgggaatgaattccacggctacggtgacgatatgcctgagacattgcggaggttgacggagttgctgggttatgagaaggaagaagacggcgccggaatgaatgcagccaagaaaatcgcggcggaattgaatcgccgaaaagatgatataccggctttcagacgcttgcggtgtctcgagcttgatcagttgaacgagtttcttttttctacgaagctcaatcccccgatcggtgaccaggtgaatctcttttagttttgaccggaattgacttaaaaagtccttaggttcttctagttgattctgctatatctcgagtcttggctattcatttcaaccctatagcaaattcaattttggcttctctacgtgatgtggtttcctgcttgtaattgttagaaactgaagcctcttgttacaaagaacacaacaagcgtttcacttgttgttgtgtttaaacagaggaatttgattattagaatcagaatcgagaagaacaaagaagagtaacaggaaactgacttttattgaatggggaacttgttcattacatcacgatacaaaaagtttaaatagaaaacacagcgacagaacaagtgaagagtcgtgtctctttctctctaagataaacgacacaacctaatttaaaagtcactactctaacaaacaccttttaatacaacataattataacatatagaccaaactcaattataaactaacagtaataattataacagaagtcgtgtttctttaggttcatcatgacatgcatgctccgctgtcgcattacttcattcacaccagcctcaattcctacttcaccgggaatgtctttgggaaatacagcattttgcccatcattgaagcacttgaacagggtgtgagggtggttgaactagatctgtggccggatggtagaggcagcatctgcgttaggcctagctggtatgaagccctgtttgtgtccgattcttgttttgcttttcctctgaaaactattaattgtttcattatgaatttcataggaactttgagaagcctctgaaattgcaagagtgtttggattctattaaagaacatgcctttaccaaatgtacatatcccttgataattacgttcaaggacggcttgaaaccggaacttcaatccaaagctactcaggtttagaatcttctatcatccttgagtattctaaattttctgatcacagataaatgtgatggtattgacataggtatggacatgttgtatatgtagatgatacaacagacatttaatcatatggtatatcaccatgatcctcatagtttggaggtttttccttcgccacaacaactgcgaaataagatactaatatcaagaagacccccaaaagagttgttatatgctaatgatgatgatggaaaggttggcgtacggaatggggttgagataagacaacacccggcagatccaaattaccagagtttagtttccttccatgtagtggagccaagaggcatgctacaaaacgtattaacaggcaaggctaacaaaatccaacgaccaggatggtacgaaacagatattataaggtacgtgttgcgaaataagtgttattttatatattttccacagggtgagatcacaagtattgaaaagctaagtgattaagaaatacttgacaatcaacagcttcacccaaaagagattcttgcggacacgtccacaacggaaattgttgatctatgccccctataaaccccaaagagcgtggatgcacggtgctcaattgattgcactaagcaggaaggtatgcctcttaacttttatttctctctgttttttttctggtttctcttgctcatgtagtagttccacaagcgtgtacacactatgtggaatcaaccatgtatacccttagtttttttttgggcttacctatcggactctatgtcatgagtacaacatgttttaccacataactacaggaggagaaagaaaaactttggttgatgcaagggatgtttagagcaaatggagggtgcggttatgtcaagaagccggatttccttttgaatgctggtcctagtggagttttctatccaacagtgaatccggtggttgtgaagatattgaaggtttttcatactacaccaagcttcgattttctcacttaagatgggtgataacattatagtttgcaggtcaaaatctacatgggagatggatggattgtggacttcaagaagcgcataggtcgactgtctaagccggacttatacgttagggtacaaaaatctaatcaggagaagatatatataactttattgggtctggaaatgtgtttgattttagttctttcgttgcatatgaacgcagattagtattgccggtgtaccccatgatgagaacattatgaaaacaacggtgaaaaacaacgaatggacacctacatggggagaagaattcacattccctttgacctatcctgaccttgctttgattagttttgaagtttatgactacgaagtatcgactgcagatgcattttgtggtcagacttgtctaccggtttctgaactaatagaaggaattc

SEQ ID NO: 1064 - DNA, 101154 bp, Arabidopsis thaliana
tctcaatttcggaagcttgttgtgatacttccgtctgggtttccatttctagggtttatggggtttagtttctaaattagggtaaaatttggggaagaagaagacaacaaagatgcatataaaggagatatgcttggaaggtttcaaatcatacgcaacgaggacagtagttccgggttttgacccgcatttcaacgcgattacgggtctaaacggatccggaaaatccaacatcctcgattccatctgcttcgttctaggtatcactaatcttcaacaagttcgagctgctaatctacaggaactcgtttacaagcaaggacaagctggaatcactagagccactgtttcagttaccttcgacaattccgagagaaatcgaagtcctttaggtcatgaagatcattcagagattacagtaactagacaagtaagtcttatttaaggttttagtgaaaaaaggtttcgtttttaagttttgttaagagtgaattttgtttgtttgtgtgtgtttgaagattgtagttggtggaaagaacaagtatttgatcaatgggaagcttgcacaaccaaatcaagttcagaatcttttccattcggtgcagcttaatgtgaacaatcctcattttctgattatgcaagggcgtattaccaaagttttaaacatgaaacctatggagattttatctatgcttgaagaagctgctggtacgagaatgtatgagaataagaaagaggctgcgttaaagacgttggagaaaaagcaaactaaggttgatgagattaataagcttcttgagaaagatatattgccagctttggagaagttgaggagagaaaagtcgcagtatatgcagtgggctaatggtaatgcggaattagatcggttaaagaggttttgtgtcgcttttgagtatgtgcaagcggagaagattagagataattcgatacatgttgttgaagaaatgaagataaaaatgactggtattgatgagcagacagataagacacagggtgaaatatcggaactggagaaacagattaaagctttgactcaagcaagggaagctagtatgggaggagaagtaaaagctttgtctgacaaagttgattcattgtctaatgaagtgacacgtgaattatccaagcttactaatatggaggacacccttcaaggcgaagaaaagaatgctgaaaaggttacctgacagttattaccttgggttgaaattgttacagattctcagctatttctgacattttttggtgttgctagatggttcataatatagaagatttgaagaaatctgtagaagaaagagcttctgctctcaacaagtgtgacgaaggagcagcagaactaaaacaaaaattccaggaattttcaaccacattggaagagtgtgaaagagaacaccaggtagttttaataagtagaagctttatttactgaacctatcttgtatgttaattgggtttacatcccttgataattagggtatactagctggtaagagtagtggagatgaagagaaatgtctcgaagatcaactacgtgatgcaaagatttctgttggaacagctgaaacggagttgaagcagctgaataccaaaattagtcactgtgaaaaggaactaaaagagaaaaagtctcagttaatgtcaaaacaagacgaagctgttgcagtggaaaatgaacttgatgctagaaaaaatgatgtagaaagtgtaaaaagggcatttgattctcttccatataaagagggtcagatggaagcattggagaaggttagtatgctttccctatgattttttttctttcttcttctgttacataatgaatacatctgtgactcaaattttcttaggatcgagaatcagaacttgaaattgggcacaggctgaaagataaagtgcacgaactttcggctcaattagcaaatgttcagtttacataccgcgatcctgtgaaaaactttgatcgatcaaaggtgaaaggtgtggttgcaaaactgataaaagtgaatgataggtcctcaatgacagctttggaggtaagtaagttattatattgttgttatattattatactttgtcagattgtttgagttctctaaggtgactattttttcaggttactgctggtgggaagttatttaatgttattgtagacacagaagatactggaaaacagctccttcaaaagggtgatcttcggagaagagttacaattattcctcttaacaaaattcagtctcacctagttccacctagagtgcagcaagccactgttaaattagtatgtggatcttttttgttctactgtcaaattcaactctttctttgttccttgctgattttctgctaatttctccaggttggaaagggtaatgcggaattggcactttctttagttggttatagtgaagaattaaaggtgggttggttgcctgctcaaagtaccaagaatctgatacatttgcaattttgcatcatctattagtttatcaaatttctgataaccttatattatgcaatgcagacaattaaatcctctcactcatgagctgtgtaactgctgattttgtgttttagaacatttagttatggacagactgataccatgaatccaactattcaatttcatttgacattctctaactttttgcagaatgccatggaatatgtttttggttccacttttgtttgcaaaactactgatgcggctaaggaagtaagtatttcctagacattagagtaccctgtgttttttgaggtgtgtagagctgtattctaagctggttatataacaaccttacttgacatgtgttttcagctgggcctttgttatattgtcatcacctcaatcttctctcaaaacttggaccggcgatttccctctttatattaatggaatatgactctagcaaaatttaattcctatagttctcatatatgttcatcgttctcaaataaatttttttttttgctcaaaatttgattggtttgcaattgtcagacataatttattttccgtactatcttcttccttatattgagactactctgttttctttagatatttcattcgttgatttgtgtctcaaatggttgttcggcaggtagcatttaatagggaaattcggactcctagtgttacacttgaaggtgatgtatttcagccaagtggtcttcttactggtggaagtcgcaagtatgtcattctttctattagaccagtagatcttcatggcgttcatcttcttgatttcatatagatatggttcagcaaggcctataacctgaccaaaaacattatatattttgtattcctctgttgcaggggtggaggtgatctgctaagacaacttcatgatctggccgaggctgaaacaaaatttcgagcacatcagaaaagtttgtctgaaattgaagcaaacgtatatatttcttcaatttttgatatgctattgctttccttttagaaaaagacactttggcctttgacaactgaattaggcgccatagaatttctaccgaaccatttgaagtaaaaccatatacattttcttcaggttagaattagatctgggtcattgggaactcgaggctcatgtctgttcattggtgatctaaaagaaaatataatcttagctgctgaaactgacactttgaaccttatttagatgtctcatcatcttagatagtcaatcagtttggttgtttctggttcaaatgaaacatggtttagttagtgccattgcagcatattgatataccatgtttatttttctaggatttattgataactcaattatgtttgtgaaggctcccacataatgttgttgtcgactctgggttcctactgcaagttatatggttttgcataaaccctacatgttcttcaaattgcagatcaaggagcttcagcctcttcaaacgaagttcacagacatgaaagcacagttggagctgaaaatgtatgacatgtccttatttctaaaaagggctgaacagaacgagcaccacaaggttttatattttttcttgtcttcgtatctccatttgtctacatccttgtagcttaaatttccgaattatattttttcccttcctattggtgctaaaagacatatttatagtatcactcccttttaccaattgtatatatagcttggtgacgcagtgaagaaacttgaagaagaggttgaagaaatgagatcccaaatcaaagagaaggaaggtctttacaaaagttgtgctgatactgtctccacgctggagaaatccatcaaagatcatgataagaacagagagggaagactcaaggacttggaaaagaatattaaaactctaaaagctcgtattcaggcatcctcaaaagatctaaaggtatcccagatctttcagtcaaagattctttttctttgtcctggacccctggtttaccaactttttgccttttacatttctaaaatggcttcatagcttttggtctatgtttcttcttgctcatagggtcatgaaaacgtaagggagaggcttgtgatggagcaagaagcagtgacgcaggaacagtcatatttaaagagccagctaacttcattgaggacgcaaattagcactctggcttcagatgtgggcaatcaacgagccaaggtactgcaattatttctatctgtgtcttttaactataaagaatatacgagtaacatgtggatgtgacccttctgcaggtggatgccatacagaaggatcatgatcagtctctctctgagctcaagttgatacatgcaaagatgaaggaatgtgatacacagattagtggttctattgcagagcaggaaaagtgtctgcagaagattagtgacatgaagcttgacagaaagaagttagaaaatgaggtctgccctcttcactttgtttgtctggaaatacatgtgttatttcttgcagcgttctccctatctaatgacagatgtcttgggttcacttaattactttgactttaatattgaagtaggactgggtgttggatgatagaggtggatataagtattaggacttcctggtaattcggcttataaaaaaattgaagatgttgtatactcatgggagaacattttactctgagtaggtgacaaggatggagatggagcacaagaattgttcagtgaaggtagacaaacttgttgagaagcatacatggattacatctgagaagcggctttttggaaacggagggacagactatgattttgaatcccgcgatcctcacaaagcaagagaagaacttgaaagactccagacagatcaatcaaggtatgtttctaaggatagtcatagatttaattttgcaacttatataatattcactctcatgcaatgcaatatcaatggaatgtgctttatttttcttttttgtttcttctctttaattaaatgagaaatctctcctctcgtttcctggctattcattctcttataaagtctagagaaaagagtgaacaagaaggtcacggctatgtttgagaaagctgaagatgaatataatgctcttatgaccaagaaaaatataatcgaggttagttttggagggtctgtgcaacatagtttaaaaagcttaaaacacatttacgaactatgtttttttttttttcattttcttagactgacaaatcaaaaatcaagaaagttattgaggagcttgatgagaagaaaaaagaaacactgaaagttacatgggttaaagttaaccagtgagttgcttatttagtttctttacttaaccatgtgattcacttctctttacgatatttaaagttggatccttatcgttagggattttggttccatcttttcaactctactacctggcaccatgtcaaaattagaacctccagagggaggtactttccttgatggtcttgaggtccgtgttgcttttggagatgtctggaaacagtctttatctgaactaagtggagggcaaagatctcttcttgcactatctttaatcctggcgttgctactctttaagccagctcctatttatatcttagatgaggtacatctcgattttccatttccatgaatcattgctcttcctttgcattttcaatacgtaacgactaaattcgtgttgacagtgatcttgaaatgttcacaatcacatgatcttgttgagtttgatgacataagagaagtcatgactttatttttatcaggttgatgcagctcttgatctaagccacacacagaacataggaagaatgataaaatctcatttcccacattcacaggtcataattttacggatttctctgattgtgtagtcaccatgattcaaaaagctttagttatctatttatatctcaaacattactgctgtctgatatgatttctcttacagttcattgtggtttcactgaaagaaggaatgttcagcaacgccgatgttctcttccgaacaaaattcgtggatggtgtttcaacggtccagaggacagtaacaaaacagagctaataacctgcttatatccttaacaacactaatgatgtatatactcttctttcctcaatcaggttggcttatatgtgtgttctacgtatcttttaagatctgtagccaattatttgttggtacctattgtctatgtctagagaccgaagcttaacttaaacttttgttttttttgttgcaaatgtattaagagattgtgaatctaagttatggtgtgcttatatataactgttgccacatgaataatagatattaaagagtacaacaatgttgattaacttagttcctctgtacattgaagattccaaatttgttcatggagctacaacggttcaacaataattcaagctcaaaaaccaagaactctaagatgaaacacactcacagacagacatgaaagtgatggaagatagataggtatgagatcataagtctgtcttcactctttagttgaaggtttggacaatagtgttgtgccatgggtcagacaagtgctgcaacagattctcaaatggtccttttccagtcacattgtgttgaaccacaaaccctaagaatgccaacatcgccaacctccctgcaacaacaacaaaaatgtcttttaagtcttttaactacaactagcagtttcttgcataacaagaatagcggattagtctaagcttaccgtttgctagctctttctccttggcctcttgcgtaggagcaaagttaagcgggttaaagattccaccagggtaaccaacttcacccttaggtaagctgtattgcttaaagatagggtcttggttcacacttcctgggttcttgatgtcttgccaccgtctgatctcaacgtaatgaaacaatatgaactcgatcacgaacaatgtcgacgacgatgcaaaatactgctctttcccagcatcgtaccactcaggaacatttatgattcctaccaacagttttgacaatgtgttaagttcttgaaagaagttataaattgttttaaggtcatgttaatggtaactcaccgatcttggtgaaaacttccggcaaaagcatcccagcgacaccgagcatagcccatcgtccgttgaccagctctgcctggacgaaccatttcaagttctctggatcctctgctagacccaacgggtcaaacccattgtcaccggcaagactgcaatatgtataagagtgagtgagtgaccattattaactaaaccggtatcaaccaagtccggtctaacctaaccaatccaaactgattagtcacggttgtgttcaaacaaattcctatacacttaaactaaaccggtatcggactgtcctaagctaaccaaatcgattaccatgttggttccggttgtgttaaaccgaaattgaatgtagtttgcaaaacattacctgccggtgagataatcaggcgatgccaaaccgggcaaccattctcctttcttagcttcaaccttgaacgacgacgttttggccgatgaaccgatcgatgtaaacgacaagtcgcggttcaacctaccggaagaaccggtgaggaatcttggctttgaagtacaaggtcggaaaatcgaggccgaggcatgagtagtgacagtagccattatccctagctagacttagaagatccgacccgagaacccggcacttgaagaagaatggattggaatcaagagagattgaaagatgagttcagagatggttgtgaagaaataagacttggaggggattttgtaagtttattcgtttcttgaaacgagttttgtggctgtggtttgatgactgagtatctaccgttggattagatgacgtggttgatttgacggaggagattggtttgagaggagatacaggcttatcggtttatcttcgaagcgtatcttaagaggattttaatgttgtttgagattggtcggaataagatagtgtcgggtccattgttgttacacgtgtcaattaaatggatttaaaaatattagagtggagtgaggattctcgtcaaccaatcaaatggaactgaattggcatatgggaaaccaaaaatctaaagtctgattttcctaatcatcaagataggggagtgtatgtaacttgtaaaacataaaaccaatttggatttatctaaaaaactatcttcactttgggcttgtcaaggttgagaatctcgggctcgtttgaagagtgagatattgggttgttttaggcccaagaagaaaagaagaaagagagtgttgaagaacttaaatccatctttttctttaatctctctttttcaagatcatgttcatctttcaaaatcttacagagttacagtgacatttgagattaccttttaaactgttaactcaaatcttataatggattagaagatactgaagatccttataagatattttgggaatattcttcatgcattttgtaggaaattacaaaatttagtgtgctaacagatgatctagccagaccccagaaaacaagatacataagccatcgattcggcctcaaaatttgaaagccattttaaaagaaaaaactgttacaaatatttttgagtttgtagaatcctactatttacattgtagtctgttatataatcccacatttgattaacactaaaattttggagcaaatgatgagattgactattatcttgacctttttaaaaaaaaaacaaattaatctcttctctttttattattgaaaaagtgtattaggaaactagctagatgtagcagtctcaagctctatataaacattatgtatgatcacttttattattataagtgtgaaagtaaatacaaattctatccattaaaaactcttatcaaagtctactagagagaacttgtgaattcaaaaaactatttttaactgtagttttttgaaaattaagtttatttgttcgattatggtccatacttttttcccttcaatattatagataaagacgatatccaaacctaactggaaatcaccatgcaaaattcatcacaaatttaagtttacgttgtcatatattatcactttcttggaaattcagagaagcatgaatatatcaacgtaaataagtttgtcagaggaaaataaagttcattagaggacgacccactaaagaagaagaaatatattagacaagtcgtataattagccaacaacataactattattattattccaatctacttcacgaaaagctcttctctataagcttcacaaactcataaaaatcaatttttccatctctattctcatcataaaccttaaccatcttcctacactccatctttgtacactcatcgtatcctaacaaactcaacacatgttttaactcattttcatctataaacccatcctgattctcatcaaataacctaaacgcctctttaactatctccttacccatcatctcattcttctcaagcaagtactcttctccttcttcaatcaaacattcgtataaagcttccgagtcatcgattatcgccttgacttcttccacggacgttttgatatctgctcgatttgggacaacaactttctttatgattgggagctcggtattttgcttattgtttcttattgaggtgaagagaatgtaggcattagagaagaagagatggaaacgaaagggaaaagaagaagagaagtcttgaattatcatcatgagattgagaatgaataagaagatgacaatggtgaggagagagattgggctaagaagagacgaatcctccatattgatctaaatttatgtgtgtggaataccataaacaaaatttctatgaagcttttatttgtcttctttggtttcaaaggttggataataagtgtgttgagttggtcctattttataattcctagttaagtatacgaagaccaaaacatatcttactcacaaagtctgcggaaagagtctccatgtaaattgttgagaaacttaccaaaggaaagaaaaatgctactttaaaactcaccgcaattcaattgaaagtattatattcatacttttatacctaccgagaaaacctaagaaactaccatcgactcaagctttcattaatgatgatcatactaataaaaacttaatgcttgttattaataattaatctgtattttcatttcaaaattaatatatgttcttgaaaatgtttggcttttcaagtaataggtggagtatatatatatatatatatatatatatatatatatatatatatatatatctcaaaatcaaattgaaatttttggactgaaccaaatggagacatggaagttaatcttgtcatataagaaaaaaacaaatgtttatatatattttgatagttgaataataaatgtaatcaacttctcatcatatccaagaacacaagacaatagagttgaaaattgagtgagagcatctttcattgtcttggattccaattcatggaaatttccatgcaatttccttgtaacgttttcctttaaatttattatcttgttgctttcaccgacccaagtaccctttggaatatttgatatgtagaaatattgagactcttcgtggtagttcagtttcaaacccatgatcagtttttgattcaaataaaaaacatttattattatagttgaatgatttgaaaacctcggaatctaaagttcacgtggtaattttcttaatcgtttttttatggagtataataggcttaaaaaattattaactaaataataatgtaataggcgctagactaattcaatttggttactattgaatcaaaatataaatagaaggctagcaaattaaattgaattaaatataaataagtttgaaaatattgaaatctacatctagccatctaaaacatagatgagaagtttcagttgcgataggttttagtacattaaattaaattcgaactaaccttataatttgttctattatatagttttgactggttacgaatatcgaaatggtttaaacaagaacatttggaagaaaaaaaaacatgagttgtaaaatatattaatcccaagagcaatgacaaagttttgtacttttcatgtctacttcttatctttgtagatagaaaattacgaatatcgaaataaccatcttgaatatacacgtatgagtaacgagcccatatatttatgttcgtatgtttatgggcctaatgagattaagagaatggattggcctacgacgactctcatctcccgaagaatctgtaatcttttgattttcttcgtcaaattaaaccacaaaaacctctccatcgattcggataatccacaacactctgcgatgaaacccgacccgaccagacgcagaaacagagccttatcttcttcttctccatcaaagacccgacccgaactatcttccgggtctcccaaccggaataccggtgaagcccgtggtggaaaggtgaaaacttcggccactttactcgaccgggaggagatgggtctttttcccgggtcgggttacggtgacccgaatccagaacctaggagctttccttatagtgtgaagcagcaatgttgggaaaaagcagagaagattaaaggaagagatcctgagcgttggaggagagatcatttagggaacattgtgtttaggaagcttgttggttgtcctggatgcttgtgtcatgattatgatcacattgttccttactccaaggtttgtcctttacaattctcacttcacgaataatgatactctgttttctggccaatgaattctagttatgtaagtttaggattgggctcaaagcctcaaacgtcgtgaaatgtataaggaaagttttgcttttaggttatttcaatatagtttcattgtgagattgtgctatttacttactccaaggtcttcctttatgttcttgtcgagtactactctcacttcatgagactctgtttttccaatgagttcttgttattaagggtttaggattgagctgaactttatgtattttgggctcttttactgtgaaacgtgttaggggattttggtgtagcaacttgatgcacagaaaattttgctcctaggccattttaatacagtttcttgaagacgttttgatcactctgaaataaatctttgaatttgtgttatacatattcttgatttgggatacgagagataagggactgaatttttctcttgtgctctcatgttgatgacagaaccaacgtctaaagttaaaatgctggaagatataacttgagaactaaacagtttttaagtattgctggtttgtatttaagaattgaatctgccaagtttctttatcgaactagattgtagaacttgcttcattatctttcaccaagtaagttgaacaatgagaggaaatggtattcttattttgcagcatggtctaatatgagctattattgtttgttttgtaatttctctttcgtcgctatcaataggatatgtgtccattagaacacgcatttgatgaaccccataaagatttcttggatctaaaagtttgctgtattcacatcgaagataggattttctgatagagttttacattcatcctttctatgtatagttaaaggcttaaaggattgctcagtaccttgttagaactattactgataagttataaccaacaattgaaaagcttatgaaatttctcgaaagggaaaaatagtgtctaaaatatctcggaagggaactattgcttcatgttttctgctttcagttgaactgtgatctgattgtgacactaatttccgaaattgagatttatttcactttgtattgataatgaatctatcttcttcttttttaaacgcataatgaaactggattcatagtagttatagagtctgatatgcaggaggatatggtcatctacatgtaacattagtcacttagtactcatgctttctactagtatctgagcaattttgttttccgatctttatagggcggcaagagcactctggaaaactgtcaggttttgcaggtatgcagtcactcgtatgaaaatttaaactaacttataacaaactactatttaaggtttccatgttttaaaccaacttacagtttattcatatctacgacaagtcttcaatatctatgtttatagtcactattctctcataatttgcctcatgaccggctttaaagctttagtggaggcttctctcagacgatcggatttccacagaacactctcttgcatattctcctttgcgtttacttataaacctctccatccaaaacttcaaaccaaacatactcttttaggcctgttgcttctttctattacttggaatcgtttactttgtttcgtttctacatttcaggcaaaggtaaaccgatcaaagggtaataaaaccgatatttctcgatccgagcttatccaaaggagttcttactgtcgagtcgctggtaaatctgctctctcttctctatgaaacaaactataactaggtttttatcctaaactgttctttacgaaaaatttgtaggccgagatatggatctgattgagctaacagcttacgggaatgtacagcgtgcacctacgtctagcggatgcagaattcagtgatctgttgaagatctattgatggaattgaaaatgatgagtttctcaatatttacttggtcaagaatctgtaaacttgtagttcttctccgagttacttgtgtactcattagtcattatctttcctatattgtggacatgtaagtaagttgtaagttgtaacattagtcatttagtgctcatgcttcttctatattctatcaagttctattcttgttattacattcttttaaataaaaaaataatgccttctactactagtaattttgtaaaaaaaaagaaagttaaatacgactttgatcatccatgatcaaatatataaatagaaatgtgaaaagtagcttttgtttcttttatctttaacggaagtttgcttttagctttttcttctaactagaagcttacttttcgttttctttccaattttcattaatttataaaataaatacgactttctttctcaatttctccaaatttgtttcttgttattttttcggttcggattagagtgtattcttcttccgatttgataaaagacaattctgagcaacaaataaattaaaggagaataacttgttagctagaacggtgagtacatattagttatttacaaattacatgaaacattttaaatgaaaaaaaaagaagacaaaagtctaaaaaagacatatctttttgttgcctttattttgataatcttttgggaggcgtgtcaggtttcctaaaagaacctaaagttggttacacgtgtcaagatcatagaagatgccttcctttgtgggaaagtcctttttatttattttcttgtggaaaatctactcaccaaagttgtatttggcactcattctctgactggatttctctttttttttctttggcaaaatccataaatgttcagttaaatttgaacagatattgccaccgttccaccacgaaattaccagattttctagtattaccatttacatgttgactaaaaaactgagttcttaccagaaaaataaaaagaaacaagctgaactctactaaaactacaactacaaaggagagtagaatcaagtggacgtaccgacgtagactagtttaaagttacagtcaatggaacgcatggattgaattgaaaagtgcaatggccttcttatttcaagtggatacatgaagggatgagatttttcataaagcttttagtggagggttgactccaacttccatatcttgaagtggtttactttgatctcaaaagtcaacactaaatcaaaagttaatttcccaatgaaaccagtttcttagtgagtagtgactatatacatcaatggctctctcaatacatctttcttgtaattttctccatgagtgcattatcactttatccttctcccatcctctcaaattcatattctcctcttttgtttcctaataatatattgtttaccggatttggatttgaatttggataattgacacagtcacagagtgacaacgctaacaaaactatattatcttctaatggattacatctaatcaaaatgatagcaattcacaattataaaattatatatcatagtaatgaaatttacgatcgctgattgcagtaaaaggttaaaagtatagaattactcaattatatagtcataccaacaaaatgcttttagttactatgatatgatatttagtcatagtaaggttttctagcgaacgtatttaattatggggccaaccaatagaatagagtctttagatttagaagataaattaattaaatttaaaggcgaaagaagatcagaagattagttaggcctaatttttagttaattgtttctctttgatttgaaatgcttccatttttaaatacagcatgcagaaacatgaaaaaagaagtttcatttcacattgcttcgtatgtacttatggttttaaacatcttaacgacgttcttgtctcctatttggaaccatttgtgatcctctaataaacaaaaagaaggtatgcctaatatcttcgtgtcttgaacaattatagtggtgcgtttgtggttgaatcgcgtttggcattagtcaatgttaaattgggggccaaacttgttttttttttcaaattttcgtaaaggcatttgggtgaaaataaaaaatatcaattcgtaatttacttttacaaattttaataagaaaatgaatgttaatgtaaggtagggaaaaaccatggaaaaaggaacaaaattgctttgccacaaaatgaaaaaggcagaaaagaacagtattatataaaaaggaaataaagcaacttgacatacttttaattgtaagaatggtgataataatattatttctatggtataaaatagaagaaaaataatatgtgtggctaatagttgtttgagcactctcaaatatctaagttgctttcgaagacacagatcaaataataaagtaaaaacgggaaaaaaacatatagtgacccatctttttcagcatcaatattaaaaaaaggatacaaataaaagaactttttcaaccttttaaattctgattgtctgtacgtggaatggaaccatccaatttttcttcatactgtattttttcatccaataacattttctttgatgcataaactatattgaataagtttgtaatatgtttaaatttcatatattctatttttattttcaagtaacaatccatttgttcttttattagacgataaaaacggttaatattcaataaactaacatggttttgttaaaccgtttctatcgtctaatatttttgttttatgttttctaattttatccagattttatggataaaaatttataaaaattaaaaaatattaatttgggaataagtagatgagcaagcatgttaaattatcttataatgattatttcgaaaaattttcgacaaatatattaatcccttaaattaaaattggatggtcccatttcacaaaaatataaagaaaatgttattggattcgatatttacacagtatgcttaagagattttgaagtgtattgctatttcaaactataatatattgaaaatatcaaatgagtttttataaacaaattattaaataaaccaaactataaataacagaacaattttaataactaagcatatatatatatatatatatatgttaaaaactttggaaatagctaaaaacacttggaaatttattattattccctttgatcccgatataaattggtactgaacaagacaaagtaattagattacaaaaaatttgttcttcacaagacaaagaagttgcaaaagaagagtcagaagagtgtcggttgaaatgccaacgcaacaacggtccacaccaactttttaccattaatgttatcttccaacatttcctgacaaatgaagaaagaaagtaaaaaaggtaaatcaaatagtgtacagagaaccaaaacatgtaaaggaataaaggcaatcactagaaagaagaaaagagtttgattctcaaaaactcatcattctccagtatcatctatacatacaatcaatcatacatatatacatatacatatgtaactctaaatctgttcatggaaattgtgtgatcttgatagagcagcagggttagcagaaagaacaggggagttctcagctttgtcgttgttatacatctttgtcttatgatcaaaccctttgaacataccaccggctttgcacatcgcctcgttcttgattcccaatgttgtccatatcgagctctttgctgcttcgttaggatcatctattctcaacgttttcgggaccagaacgcacccggccttctgttttcgctctgtctcgttgtcctttttcgatgatccttcatctctcggatgctttccgagagtcggagagtttgtatttgaacacttttggcttataggcgatgaggattgatgcggtggtagcattgggatggtccagtaagggtaaaacggcattggataccctggaggcgggtaaaaacctggtggaggcatcgctggattccacgtgtaaggccatggaacacctgggatgcaagcataaccattcatgttattgttgttgttgttgttcatttgtgcttcaacaacactgccgctttgtgctcttgattcatccactgagtgattgttagaggtggtcacagaggatccgcttgagcaatcatctccattctctacccgagctacaagccgttgatccgctaacccgtgaaacctgttcctagcaccgtttgagaccttttgatcttcttgtagcttcatcacaggtgtcatgggagcagcaacgtgctgctgctgagcttcgagaccaaaactcaagacccttgtgtttgcctgtaagcccgggtcaagcctcgcagcctcaagagcctcggaaatagtgatgtgacggtaatgagaagatgagcttttgttcttacgacgtcctgcccccacaggaacattcctcatagtccctccagcagtccaatatctctgacaagccttgcagaaatgacgaggctggtttatgttgtagttgttgtaataacagaacttggtctccatgcttttgcatctcggacacggtagaatcttagtcggtttctttagggttttaccatcaggtgtcgtctgctgattatcctcaggcgtgtcactactctctatctgatcagttgatgtcgcttcctctttgtccaaggtttcgggtttcgaattgttaaaactgttgtcgttacagttgttgttgttcttatctgataactctggagttacctgagatacaagaaacactaaattaagaacacttgcaatgaataaaagaagtttctctttatgaaatcttaatcaaacaattattcttcatcagaagttcagaaccaataatctctaacaactaaatgaactagtaatatcttaatggtaacacaagactggaactatgttataatttcgttcatgtaactcaataacacaaattgtagatccaaaacagacaaaacagagactgaagaagtaactagttaagttaattactagtacaaaactaatctaatcatatttatttttaggacaattccaattttcaggccaaaattactttttatcaatcagtaccttctctggtgatttgtcatctccgccgctccagtcatcttcttcgtcatcctccaccgtaactgccgattcaaaaaccgacggaaaagggattttcataccgaaaagcttaatagctggatctctagtctccatcatcatttttttggagcctctgtttcttcttctctctatgtctctgtgatttttttttttgttgttaaagaagagagatttgggagagtgtgaattggtgaaatttagggatttagaagatcagtttaaaagagaaggaggaaacacgtcagcatcacaattcaattctcagccacaagtttatgtggcctctgatattttccttttcgctcattaataccgggtcgggttgtcgggttttattaattaatcattaatatttcctacctttttatgtgtattattcgcatctaatcctttttttttgttcctttattttctgtcgcacatatttattcgatcattcaaaactatatatatatatatatatataatattaatcataaacttaaaagtatcagttttttttagtttcctatcagaaaagaagttaatttttattgtgaaaatttgtttatttgttttttataattggcgtttaaaaatgaagcaacatattatattggttattaatgtactgattttttttgctttataaatcatctctacatatttttctcttcattaaaaactgtaatagaggataattgttggatgtaccatggattcaaagaattttgtaaatcatcgagtgcaaactataataatagtgctcaaatttgatagattctaggattttcgttcaactttacttatagttgtaaaatttggcactgattgtaaaacaaatttcactgtaagcatcatgacacttcaaaattacttaatacttttttttacatcattacatggtatttgtattcattttaaatgttaactataatctttggcaatctctcggtcattcgtctaccaatttttaggtaaaaaatttcatactaaaagtttttattgtcatataacttttatgcaaaataacatcacaatcgatatgaaaaaaaaaaacacaatctatgtaataattaggatttgactatgtagatgttttcctaatttataacattaccgttttgtataatttatttctttagattagattctatacaactaaacattttgctataccataggacagtttgattttctatagaatagatattagacctcgttggaattggatatcagttttttctaactggataaagcaaccccaaatcaaatttagtaatgatactagtcgatccgaaaaagttgttgagtatggtgataagggtgagttcgtaatagctgttgtgtagattataaaacttggccaatactatgtcttcaaaaaacttgatctcttggatgactacaaaactgcatatctgaaagtagtttatgcacattcaatggagtggaggtttaggcaaccctccattccagatattgctgtgaactagatgatgttttcatccttctttagtaagaagagaataatctctttgactattttcttagtttgttgtctcttattttagtgttcaaacatttttttggtttggcccaatagtaactaaaactctttcatattgatatagtaataatgccatggtctctctttcttaatagtctgatatctatttcgtttgattttcttttttgctttcatttggtgattttgttcctttattcttaccattaaacttgtgttttatggttttgttctaaagaatttatggacgtaaagaaaaaaaaaagataaagagatttaagatcagaataagagcaaaaaaaaaaaaaagcaaaggaggttggattttaatgtcatgtcaatagataattggctgtgaacaaaaaggtttttaggtctctgccacattgtacaaataccaacatgaggatttttggaggatctatatcaaagtctgtcttttgccacgtcggattctgacacacctgctcatggatttcaataaaaagattgatgtctttttcttcctagatctaatcacaacccttcacgtgttccactgagatcgcatcttaatagttttattattttctctcgcttattgattttctttaaatggtaacaatatgtggaactaacgaattttagcatttttagctaatagcctaatacttatgtaacatatgtttctgtcgttttttagagggaaaaaaaatagacattacttcttaaatattagcattacatatttctcatttttttcaattccttaggtaaagtttttttaaaaaattaactataaaatgaatttttgaaactaactctcatcttcgaaagagatgttacataacctagcgtgctatttaaaacacaaattaagtatgttttcacaatacctttaaacttaaatatatttatctaataagatatttaaaaacttttcattttcgttaacaaaattttaaatgaaaatagaaaatatatatttgaaatacaaatcttatttgttaatattttggcttacagtggcaaaacagtagtaccatttaatgctattgtttcttgtgatatttaatattccaattttttttatttttttctaaaagtatagaattaatattggaaaatagtatcgttaagagcatatatagtgtctttatcagaaaactaataagtgaaatatatttgctcagttaattattctcagtttgttttttttgtttgagtgcagtacaacatttgtacttctcctagctctgaaatagtttttttttttaattttgttttaaaagattgtttaaataaatactagataaataatatatgtgaagataagtcatctttgtgtttaaatcttgtctttacacagcacgactggcgagatgtggatgatgcgtcgtgaaaaccctaattttctgtacttggttactttaaccctcgttgcttcgaagagaaacaaaaaatatcaagtaaaataaattattccaaatgttcgatctccaattgagcctatttagtactccaccacatatctttctgaaagcccattttaaaggtccagatttaagcccattttaagcctcaagccttccctttttgacatctaagctggtcctaattttctatgtatatatttctttaacggataaactaaatttggactggttcgaatcgaacccgaaaccgaataagaaccattcgtccacttaagtcgatctaatattctaacttctaagtgttgttctccgaggaggtgctttcctcaaaactgaaaagtaaaatatatccctttctagtggtttcttaaaatgtatttcctttgctaatgtcaattaagaaaaggatacaaaatgataactaatatacttatattatattggtgcacacatagagaaggtgtgatgtgatccaaaggccactattgaatttttattaagtttcttgttgacttaaaatacaaaagggaaactttccaagaacacaaatctttggtgatatattttgacattttgccgaaaaagcagtgcatgcatatggccataaagctagcttcattaagtggatcgcaattaaaaaaaaagtatccacgttgatggaacaactataactcctctctcccacattttttttataaattcataaatttgaaaaactaacaatgccctcgatcttcatcccttctggatgaagagatttcaaaatttatgatcgaggacatttgtttccatcgagtcatcggtcgagggcagtaaaaaaaatcatttacttttaaaagatttgaaatatatgaattatctctaagtacttacttttgagttttgattttataagagatgtaaaagaatacaaaaagttgtatctaaataaaaatgaatgccgtatatgttaagaataagcggtatgatgtattagccactatagaagccaaattcgtgaagtgatcataaaacatcattatgagttagtgccatgactttgacaagcatgtatcatatcatatctgcacttccatatactctaactttatttaaatggactatttataaacattgatatgtttactttgtcgacatgtctaaacaattgaaaatggtttaaatatttttcaatactgtctatgcttagctatcctccattatagtgattcgccaataaagaacacatttgtaatacctaaaatatttttttggcaaggaacgcattttgaggtcttccaatcatctgtaacacccaaaatttcagtatatgatatttacttcttagcaaaaaaacaaaaacaaaaatataagtgtatcttcgaatttatttattaaagtaagaaagattttacatacatacaaattgtttctctttattggttgtattactgtaagatatatttttctgttaaatatttgatttcatgaaatccagaatccatatcaccagatggtggatgaatttcaatctatagtgtaccatgttatcaaaaaagaaaaagaaaaaaacagtatatgttccacaaattaggcattttataattgccatagttgatattcctaacattagtgaacaaatatgattagtcaattgaaaattgaacaaagcaaattaaacgtgaattctaaagcactagacacaaagcttcgtttgagtcgacccatttgttagtgtaatgactaactataaaatagacacgcgtaattaagtgatcatgcccattggctcccacaattccaccactttaaacagcatccataatctacaagtttttcttattgatcatttacatatgcaaatgattcatacttcaaggaagagaacattctactaaagcaatctccactgactttcaacattgactataatcttatcttttcttttaaaacaatatatagtatgtttaatgtacaaacactaaaaaccctacggataaattaggattttgcttatgtatgatggagtatacacacattttttcatattgtaattataattagtatcatatattatatcgaacaataaacgtggaaaagtgaaaccgcgtcgattacttggtgcttcgtatatgttcttttaaagtttagacattttggtgggctgatacaaaatactatagcagtccaaatcagattaaaaaaacattccatgtttaatttagtgatgaaagccccaccacgacaatattttaaaatgcgcaaataggaagaaaagaactataaaggaaaccaccacaaagacaaaactcaaaacaagttggaggaaaaagagagacaaaactcacaacaacatcaaggttttaactaaatttaattttgtcataactattcatatatagtcaaatggctaacaaagctctcattcatctcctcgtcatcttcttcttggctctatcacacatcttcttcttcccttcccatgcttcgagtaaaatcttcatctctcttaaaatcgtattttatgtatttacatcatatgttttaacttatatcatctatattttgtacgtatacaggacttgggagtttgatggagaagccaaaaattgttcgacctcaacaagatacactaatggttagttatttagctatttatctgtgttcttgagaggttaaaattaggttattaaagattttaatttggttttgttttacataatcaatgctattaggatgtgaagaaggaggtcgaagaaaggatggtgatggagttaaacgactatccaggttcgggtgcaaacaatcgccatttgccacgacaacgaggctgcgtcgttgattgctgatcgatatataaaatgacgaaaaacgaattaatatgattatagctagtatcgataaattgatgtataagtaagatacgtctaattatttttcagaatatgaattgagttagtttaacattggagtctatagacgattagactatatacttgtctactctacggagaaaagcatagttttatttatgtagttcagttggtaaatcaatagatgctattgttaataaaccatatatatggatgatatgtacaagcctttaatttcaatttggtgataggacataattggtttactgccaactaatagacattagactgacgtaaagtttttcaaaataaagataagtcactactctccttttcacttatatttaccaaaaattgagttagttaacttcttattcaaatttatattttgctgatatatcttatatactcgtcatgttttacgccacggatcaatataaaataaagatttaaaactaaaaactgatgtggaaaaagagtggtttaataaagtaaaacaacaacataattgaagttttatgcaacaccctaagtgtggactagataggaacatagaggacaggcaaaaaaagaagaggtaattaacatacctaccttggagtacatgccactatgccagttgggtttgatttttaccctcgaaatattagtatgttaccgttcatctccgagtaggtgttgtgattttatagacgagcaaaaaacaaaagtggttcatgagttttgtcgggctctctccaaagagacaagattgggaaagaatactctatcttctcattcttgttacattgattttgttttattttgcataggcgatgcagtaaaactattaaatatatactcaaggtttcaattatcataactggtgtgattgttagagggttaaatttaagatttatataagatgtgattacataactcttgtattaaaagtgtttactgtatttgtatcactcacatgtaatcattcaaaaaaatactaagatgaagatatggtaaaacatttcaacatagaaaaagacacaatcgataacaaaatagaacagtacacttgacctaaaccaatgcggtaaacacacacacacttatatacatattgttaataattttgaagttatgctatacaacttattattttgtatatcaatacatattcaaatagcttaatatttaaagcgctatgatgtcaatttcaaatactgaaattattttcaaaactttgtcacttatattatcacttataaccattctatatatcttcccaccgcgaaatttataaccacacttttacaaactaaatttcatacattttccaaatagtattgtaataaacaaaatagtttaaaaataatgtaatttacaaaacaataaatttttaatataaaacatattgatcagcaaaaatgctggttgatgcataaaaaagactcaactacagaagaaatattcagcacacgatatcacaagaagaactcgatgagacaaaaagagcccgtggcatcgatattaaggtaaaacgcatcgtttggttgtcgtacggacactactaaaagacgcttctcacctcttggcggatcctacgagacaaccaaacacagatctgcttccttcttcacctttttttttttttttttgtaattttggtttccctttttttttattaaataagatttattcctccatcgttacctaatccccttcttcgtcttcttcagcttcactgagtcttacgaacatagcaaaatccaaatcaaattcctgaagaaacctctttcgctctcgtcttcgttttcagatcaacaaggttagattctcaacttctcgtttcttttttcttcttcatagatttaggatttcacctgagtctcgtttgaaaaacctatgaaattcgatctggttttttacgtctctcgtcgattagggtttctaatttgtttcatcgtttccgttttcgatttctgaatatgaatcctttaggtatctaataaagttttatatatgttatgtgaaaacagaaatggcaacagcaacatcagcttctctgttttcaactgtttcttcatcttactccaaagctagctccataccacattcaagactccaatctgtgaaattcaactcagtccctagcttcaccggtctcaaatcaacctctctcatctccggatctgattcctcttccttagccaagactctacgcggttccgtaacgaaagcacaaacatctgacaagaagccttacggattcaaaatcaacgcttcatacaaagtagctgttcttggtgctgctggtggtataggtcagcctttatcacttctcatcaagatgtctccgttagtctctacgcttcatctttacgatatcgccaatgttaaaggagttgctgctgatctaagtcattgtaacactccttctcaagttcgtgatttcactggtccttctgagttagctgattgtttgaaagatgttaacgttgttgtcatccctgctggtgtgccgaggaaacccggtatgactcgtgacgatcttttcaacatcaatgccaatattgtcaagactcttgttgaagctgttgctgagaattgccctaatgctttcattcatattattagtaacccggttaactctacggtacctattgctgctgaagtgttgaagaagaaaggtgtttatgatcctaagaagctgtttggtgtcactactttggatgttgtgagggctaacacttttgtttctcagaagaagaatcttaagcttattgatgttgatgttccggttattggtggacatgctggaatcaccattttgcctctcctctcgaagacaaaaccgtctgttaactttactgatgaagagatccaagagctcactgttaggattcagaacgctggtactgaggttgttgatgctaaggcaggtgcaggttcagctactttgtcaatggcttatgctgctgctagatttgtagagtcatctcttcgtgctcttgatggagacggagatgtctacgagtgctcgtttgtggagtcgactctgactgatcttcctttctttgcatcacgggttaagatagggaagaacggtcttgaagctgtgattgagtcagaccttcagggattgactgagtatgagcagaaagcactagaagctcttaaggtagaattgaaagctagcattgacaagggtgtcgcatttgcaaacaaaccagctgctgcagcagctaactagatcgcaagctgataacatttttcttctgatcatttcgagttttgttttatttttcatatttgttgcatcggcgagacattttcgtgttgtagaataaagaatgtatttgcttcagtttgaagattttggaacatggcattgaagcagaatttataaatcatcaccaaaaaatcattacaagagcaaaatgatgacaacgaaaaaggtctatgatcttttgtttgtgttttttcttgtcaaccttcttagcactcgccaaacatttcttgttgcatgcataatatcaccattattatatttgtaaatatatgttttgaaatgtaatttagttcttgatgacattggttgcaataattatttaaactgttaagttttttttgacaaaagtcatagcgattcacaaccgtctaacaacggaagatcgtatgtcgaactagaacgtcgggactaacacggcctgtatcttttgcggtgatttaatggaggcaagacaccgtctatacttctcttgtggatatgcaactgaggtatagggaaatttagcacaagaatttctcaagaatcatctcaccactagttggaacaaccttctccaactactcccgaacagcacctttgaaaagaacacatttgttcttgctctattgcgttttccaagcttcgttccactgcatatggagagagcggaatgctcgttcccatggagacactcccacatcgcaagttcgcaaacatatctcctccatcagtgaccttcatgggcgcaaatatgaaggatctcttcaattattcatggtttgcgtaaagaagtacatatacatcatttttctctaatccttcaaaaactcaaatagatgaaacacctattgtaaaaacagttttttatttttattttttcaacaaattttacattcaattaaaaaaaagaagttaattatgagcaaaagcaataaaataaaaaaaatcatttctaatttattatatatgacaactttaaaaaatgaataaggttaacataactaataaaaataaaataaacaataaaaaagagggaaaaaaatcagttatgtttattacatagacatttaaaggtactaagcaaaattaaggtaggcacaattatttttaagtgaagtcacatgaatatttactatttctattataaggaaataaattagaatatactataattgctctccaactttcttaaatctttaaaaatgaggtgttaggttaattaggttgtgagtcagttcctccaacaacgttcgatggtatagattactagctcttgagaatttgtatactatggtataatttaatgtgctcttgagaatttgtatactatggtataatttaatgtaggcagattttttattttattttttattgaggtcacatgaatacttactatttatattataatggaaaattttggtatatactataattgctctccaaatttcttaaatctttggaaaggaggtgttgggttaattaggttgtgagacagttcctccaacagccttcgatggtatagattattaactcttgatcgtctgtacagataaaatgattttcaattgttttgcattgttgttttcctgtctttcttcatgttataggatttgtcaatggtttgtcagctttgaaaatattgcatgtatataacaagagaataaaggattttaaaactacatagaatattggtaactaatgatgatttataatggaaaaaatgtaaactatttgacatacatgaaaattagagagtgaaacgagagcaatacaaatagggcaggccaataaattattggaccttgtgctatgctccaaatttctttacctaaaactctaaatatttaaaaactagaccctattttgcaattatttgaaaatttggactctaaaatatattaaaaaaaactgaataaagaagtgggacccggtgcactagcacactcagcacctcccaagagccgggcctggatacaaatacaataatttattatttaatggtagcaaaaccttacatgcaaagtaaacatatatatatccattatatatatccaactaattttgtagggagatcctaaaaaatgtggtttttaaattcgtttggctggctttatttcctttatattctagaaaattgatgttgaagcgttaattactcatttgcacacaaaaaaagagagttaattacttgtttttgaggattttcaaataatcaatatttgaaaacttatactaacaattaaatatttttagccattggtttagattttttttctttatctttataggaatgtcaatagcatataaaataaaagtttgaggtttaacgaaaagagtttaacctaaagattctatccatgcataactagaaagctctttaacggttatgtacatacatcagatacaaactttgtgacattattgcaatcaacataagttatgagcttgtttcaaactcgtaatgattagaagaaaaatgttatcagcttgaatcatcaccaaaagtcattacaagagcaagagccgcctttaaaatgatgaaatctggaacggtctctaacgatcacgatacgatcataaacatcagatacaaactttgcaaaattatgacaatcaacacaagttctgagattcttggtcactctaatggttgttcctggtggagtcaccagaatcccaaaggctatagctagcttctcgctatggtatcttaacgcgtatcccttttcttcttctgactcaagattgtgcagttccgatgtaatttccgccacataccccgcaatcttcagctgctgattgatttccgccagcattttatagatttcttccttccgcggatgcgaaacatcgtctactataaactcatgaacggttccttgtagctcgatcgcgctgcatccaggtttagtatggattcttttctccttcattaaagaacgcaattcagtcactttctcccatttcccaaccgtggagtatgtgttgagtaacagaacgtaatctccagcttcttcggctttgagttcgatgagatgagagatcacacgttccccaagttccacatctccatggactctacaagccccgagaagcgtacgccaaatggttgagtccggtttcatctccattgacttaatgagactgtaagctttatcaagtagacgagcacgtcccaagaggtcaacaacgcagccatagtgatgtaaatttggctttatcttaaattcaccactcctcattctatcgaaaaacatcattccttcagcgaccagcccggaatggctacaggcagacaataaaccagtgagtgtctgttcctctggagagattccaaacttcaacatttcgttgaaagcttcaatggcttcttttccaaacccattcatagctaaacccgagatcagagccgtccacgagactacgtttctttcacgcattccataaaatacttggtaagccttatccatagacccgcaacgtgagtacattgaaaccagagtgttactcaaattcaaagcaccactgagtccattttcatcgataaagtcatgaacttgtttaccaaaatccaacgcccccaagttagcacaagcttgtaaagctaacaaacatgttacaccatctggttttacacaaccatcgacatcgttcttcatcttatcaaacaaaactaaaacatctctcgtacgtttattccgcagataacacgaaaacagcacattccaagaaacagtatctctcttgggaatttcgtcgaacactttacatgcatcagtactgttttcgcaagtggagtaaagatccatcagagtcgtcataagaagactatccgagagaaacccatcactgaaaatcttgccgtgaatctgcaaaccaccgagtaagtcacctgatttgatacaacacttgagagcaaaagaagacgagagcggattagcaggaagagagctgtttcgtcgaagagatcgaaacaagcgaaacccttcgcatggagtttggctgagagagaaagctctgatcatggtgttgcagtgagagagagttgggttcaatctctgggagaaaactcggcatgagtaattgatgtctcgaggaatcagagagagagcgagacgagagaggaaatggtggaaaacgtcagagtttctgattaaggaagtgcggagtaagagggcgtgaatctgccggagatggagttttccggtggaagatacgatcagagaaagaagatgatcgtcgccgctgctgctgcttatggacttcaacatagtcttctggtgaaaagaaagtatactaagctttgatttaaaaggttttactaattttatttcgttttaagtattaaaacttgaagttttgatatatgcaagcacatgatgtaaaacagttttatttttggttttgaataaatattacattcaattcaaaaaaacattatgagcaaaaaattcaaaagattatttctaattgattatatgtcacaactttaggaaagtaaatgaggtttacataaataatacaaatagaataaaaaagagttgaaacatattcaatcatctgtattaccttttattcaaaaaatcgctagatgctaatattttattaattatatgtatttttgtataaaatcaaataaattagaaataagaacaaataaatagaaaagaaaaattatatatttatatttaatataagtaaaaagagtttagaaaattaactattaaataaatatagttcaataaaaaaataaattatattaagaatataaatttaagacaatgagattatatgtcacaactttaggaaagtaaatgagattttatagggactaaaaactaaataatatttattttagagatttttgcctcataaactttacaaaaaaatatatagatggaaaaaagacttccaaaaaacttatttcccattcacagcgttacattttgatttgttgtcttttttctatgcccattttgttattttctatttggttttcagttcctaaaagacggaagttatattatttttatttatttttagtatcattccgcaagtaattaaatctatacatgttttagattttaatataaattctgattgaaaaacatactaattttctctgaacgaaagttcattaaacaatgttggtgaaaaagaaagttgataaaaacaatgcattgtttgatgttaccatactaacagtacaacggcggcgccaaagtcttttccaatatactagtttcttttgacatcaagtgattttattaatagatggtaccataagaggttacaacccaaatttgtatcaactaccaactaaacctatttaaagagtaatgccgctttactctcaaacatatagaaataaaagtaaaaacttagcccaaagtttggtgaaagaagctcaacttaaagagcttaggaaagatcctacaaatgatattctatcataaaaggataaatccccgatgtactatttgaatcgactaaactacttttaaaaccagttaagaaactagaaactaaccctagaagaacctcagtcaagcttccttgttcattactgtaggataggcccatagtttaatctctttttaggtaggatcgacagaaataaaaaacagatgggcaaccatgcatggtaattctcgaccctgtctccgagggacagttgaatgaacgactcatgaatactgtcggcacggacgagccaataattcgaacgagtttagtctattttgaattttctagctaccttataaataaaaagctaaatgacatgtaacttcatttaaaagaaaacttatagaagaagacaaacaaacaaagaaaatatatataataaaaagaaagataaaggttgccaccacgtaacaaccacttccactactactctttcgtcgtaatgaagaaagctgaccgtgccggagtttcatcttcaccggatcaccaaattagtcttctttatatagccgatgaaaataccacgtgactccaacgaccaaaataccaaagtccattagtataaagaaaaacatttatttacaaaaaaaaaacgatggatatctcaaaaataaaatgaccaaactacccaaccattatccctatatgtataacacacagcctcttctttttcacccacaaacaacataacatggcttccaccaaaatttccttagtctttttcctttgcctcgtaggtccttgtataggcgctggaaccacaagcgctgccgaatcagtcagtagcattgtgacacaaggtttctttaacaacattatcaaccaagccggtaatggctgcacgagaaaaagattcaacacccgcgactctttcattgacgctgctaataattttccaaactttgcaagttccgttacaagacgtgaaattgcaagcatgtttgctcatgtcactcacgagaccggacgtaagatttttttttccttttctctatgtttttatatattattaaaaacttattagttttgtttgtacatctactctagtcatgagtaaattattctcaaaacttttctctattttaaagtaaaaaatagagatttacattggagattgtctaagggttgaggtgtttcattattatttgagattatcaaatggtgattataatagttttattagagcacgttaagattaaacctgtaaaactgaacatttgacttaagctgattaaaaatcataacctttttttccatgtgatctctatgtcgtatagacttctgctacatagaagaaataaagaaaaggtcacgtggtaggtgcgacgagaacgtagagcagagaccatgtccatcacagagtaaaggtcactccggtcgtggtcatcagagtctcggtctcgaccttctacgccagcctgagcttgtgggtagcaacccaactgtagctttcaggaagggtttgtcgttttggattaatagcgtaaggccggtgctgaaccaaggatttggagccactataagagccatcaatgggatggaatgtaacggtgggaattcaggtgcggtcaaggcaaggattgggtactatagagactattgtagacagcttggtgtggatcctggtcataaccttagttgctaaaacgttttacaaacgcatacacgtgacgtgtcacgtgataatgcggaataagaagttacatttcaaacagggcaaggattcagaatcgcaagtacatgaattaacattctgtaactgttaattgtatcaagttgtgttaatatataagagctaggagaattggtctttcttatgtctagctagtaaccatctatgtttgtagctaggagctacttgttgtttctagttgtttgtctatctaagccaatcatacaaaatctatgcttattcacaaacatggagatcgatgttgcaaaattcatcatttcgattttcacaaacaattaaaatcacgctaccatggctcgcatgcactccatccgccgttggcatctccctccgagcagatcttgttgtcgttctcgtttcccttcaatagaggacttgattcctcatggtcttcgcggctatcttctcccgctatagattaaatacattctcatggtaggctaatgtatttgattgttggtcttccttatgtttattagtaacgttttgacgcctcctctaatcgtcttctcgggcatggggatgaccctttttggccaaatctagtagcactcgtctcaataaaaaaattgcacaaacaatcaaatacattagcctacccgagattctttcagatgcttagaaaccgatttgaatagtcatgttctaaccaaaacaaaaacatattatctttgacaaatcctaaaagtataaatggttcattcccacggtatttcaactcctctaaaccagtattagaaccatatgaatcaaatcgtataatcaagtatccacgaaacatcataatactaagctacatatataccttgatttatcagagttactattgtcattttgcaagtttcagatttgtctttgagaaaattgtcttactttgttgatattgagattatataaaccggataagcgaccttgattttacatgattttgctgttttaaaaaaaaacctaaccggtttcatttaattccgcatgttattaaaaaagagggaaaagtcaaagagtcaaacttattaggaacgtctagaattttccaacttggtccattttgcctactctattggaaaaaggaaacaaatatgtatattattatatgtcacataaattcttttccaacgaaacttcaataatttaccatatggaccaattttaattaattcctgtatcagatttaggtgaaacaatcttaataaacatttaaactcaaaaccaaaaaactgtaacacatttttccgtcaaaattgacgagaagaacaagcggctttctctactagccgttaaacagacgttatcttaccaaactccaaagctctggttcgtacaaacccgaacctcatccaatgcttatacacgtatgtatgtatacatttcttttagatattttataaaaacacgctcccaaaaatatttaatagagttgaattatgtttatctgattattattcagaccgaacacgaagaaacaaaaattcaacaaaaacaaagacaaagtttcgttttagcttaaaggttccagatttcgaaaaagctctctttttttttctccttcgtgttacacaaccatttctaggtaatgttttgatttcgaaagagctctctttataatgattttcatttgtgattctggaaatcaaatcgttctattgaaattggggattttttttcgattagggtttgtttggttcctgttaaattatcaaacgttcctgcatttaattgatttttggtcttctaatattttggagcttcttcttgttgttacagatatcattttggtgattaagttatttaagaaatggctgatcatttgagtttatgtaccgatcgtctcataacatctgagagcttggactcagagaaagattcagattcttcaggagaaagttcttaccggcctcaaggcacagacttggcttcttcatctgtgaatgaaactgaggttcctagagagtactacgcggttgcggatgaggaagaacctcttctccaatctgttgagtgtcgtatttgccaagaggaagatagtactaagaaccttgaagctccttgtgcttgtaatggtagtttaaaggtaaacacgttggatctcattgttctttgttttttattggttagagaaaattttcttattgagttttgatttatgcagtatgctcaccgcaagtgtgttcagcgttggtgtaatgagaaaggcgacataacctgtgaaatatgtcaccaggttaatcatcactctgctgctaaatgttgtatcttatctaactgctattgacactaaagagaataccaattacaactaaaatgctctctttttttttaacagccttatcaacatggatacactgcacctccgcctcctcctcctgatgaaactataattcacatcgggtaaatttgcttaaacatagagagttatgacttgttgaattgttgtacaagtggattatctgtaaccagttataacaaaattaataataccttgtgaagaacttatcaagttaacaaagtagtgagtgacctgtgttgtgtgcagtgacgattgggagaacggagttccgttggacttgaccgacccgcgcattctggcaatggcggctgcagaacgtcatttcttggaagcagactatgatgaatattctgagaataactcaagcggagctgccttttgtcgctctgctgctctcatcgtaagctctcagttgagaagatgttttcttaccatgatttaatactaaatgcctgcactctaacttctgtaatggcagctaatggcacttttactgttacgagatgcgctaaatctcacaacgaacccagacgacgaggacgatccaactgccttcttctctgtatgttcatctttacttactttcactacttctttataccgtcactgactacacttgtttgtttcaatagctattccttcttcgtgctgctggttttctcctcccatgttacatcatggcatgggccatcggtatactacaacgtcgaagacaaagacaggtgtgtacacggaaaaaactctctgtatcaaactctgttatattgtaagatactcaatctaacagatgagacaatgtactgcttttgtttgtaatcaggaagcagcggctctagctgccgcagaagttactttcatgatacacggtggtgggcctcaacgcagaggactgcactttgctgtagcaccgcagccgccgatatccaatgtcccaacaccagtttgatccttaccggcaatgattctccgttaaggctattagataaaaccttgaacttggttataagaactctacctacttatgcttcttcaaatgttattatcttcctcttatgtttgtgttatctgaatctgttaaatgtctacttcggctctcaaatgttttacaaagagctctcacggtatactatgtacagtcttattattatcatatgattatataagtattatatttttatttaccttttataaatttatttggtcaaccaaacataaataaatgtccaatgcaatattggagggtcaattacaagtcttgtcgtttttttcttcacaatgactctttatgaactccataaccgttaaaaccaattgactttgataattggtataacaatgatcagctccttccacaatctgtagctcgtggttcggtattatctttgcaaactcctttgcatcttccactggtactgtctcgtcacccgatccatggaccgtcaagaccctaccattacatcaatccgggcttgtttataatgtatctcaaacaaacgatatgagttggtgaacttattgaatctcacctgcattctttgtcaatcttgaggcaagcttcatgcatatctgtgtttaaccggtccatcaaactctcctcggtaacacggtaaccagaatctcctgtaacaaaccagtacattgatagtaacactaaagttctgataacggtgcatgaaaagcgaagagcgataacaataccatctttaacatcgatgtatccttgttgcttaattctttccaaaaaatcttcaccaagacgttctcctatgcctttcttcagatcataacgtcccgagagattgatcacattggggatatcgtgatacttggaggcatagaggaggaccacatcacctcctatgcaatgtcaaagtataagttgagtttcttgcaatgtaagattcaccccttttgaaaatccgttgctcgaagcagaaagatcggtactacttacctttactgtgaccgagaattatagtaacaacacggttcaagttagagaagtattggataacagaatgtagatcatcagcttcgtaattgtagttaccataatagaaactgccttcactctctctgaaagaatgaaagcaccacaaccccagagtcaaaacaaagaccaacttattcaagataatgcaagaaagaaaaacatacccattcccggagaaatcaaaacggaaagcactaatcccttctctctctatagcaacagccacatttttcataatttcgaagttctggatacattcataggccaaagacaaaacaaagttaatgcatgcaataactcctaccaacatctgcaaccctactatgtcatgaggactccactttctttgtgtacaaaataaatattcccaaacaacgaagaagcagagctactaatgggaaaacattataatcactataaaaaaagtgaactaaaattatgcacaaatctttggtaagatgttggattgagaaatggacattcaagtaagtgagaaaaaagcagaaccgaaactaaccttgtttgatcgaaagccatgacacaagactacaatttctgtagaaccagtttcatgaagcagacccaccaggttctcattgtggctgttcagaatcacaatcttctgttgtgtacttccctgcgatgaatccattctcaacttttttactttgtttgttgcaggaaatttgggtctccttaatggtaaggcgtgcgttgagaaagataatgtgggacaaccacatgatctctcattgatcatattttggaatttatatatatatatatatgatttctatttaattttctttgtcactcattattttttctctcttttttctagtgtttaaaaaaacttagtttttaccaatcaaacctaccatctagtaaatgtaaatgaataattggtcaatttctacatcatctcctgactcctgttacatgtttataaataaaatagttcatttgctagttgctacaaaagtgccaaaatatttcatcctgtagccaccgcttgatgtctgaagaaaagtcataaagattcgtaaaatgtctttgtttttttgttcctttttagataatgggatcccataaaacgtgtctttgttgacgacttgacttaaattttcgaaaagtggcagtttaatatccctattttttatttcaagttgcattatcactacaggcattttaatttgcaattgcttcgcctcttatatgttcattttcctgcaaaacatgagaagcatcaaaagctttttaaccaccatttgtttttttggaaagcatgagactgtttcttttacttgctttcaatgctctcatgctacttgaaacacatggttttaccgatgaaactgataggcaagctttgcttcagttcaagtctcaagtttctgaagacaaaagagttgtcttgtcctcatggaaccactcattcccactctgcaattggaagggcgttacatgtggccgtaaaaacaaaagagttactcatctggaactcggaagattgcaactaggcggagtgatatcaccatccattggtaatctatcgtttcttgtatcacttgatctctatgaaaacttttttggtggtactattcctcaagaggtgggacagttgtctagactcgaatacttggatatgggcataaattatcttaggggaccgattccattaggtctatacaattgctctagattgttgaaccttcgtttagattcaaatcgtcttgggggaagtgttccttcagagctaggatcattgacgaaccttgttcagttaaatctttatggaaacaatatgagaggaaagctccctacatcactaggaaacttgacgttactagaacaacttgcattgtcgcataacaatctggaaggagaaattccgagtgatgtagctcaactgactcaaatatggagtcttcaattagtagccaacaatttctccggtgtttttcctcccgctctctacaacttgtcctcacttaagcttctaggtatcggttataatcatttctcgggtcgccttagacctgacttaggtattctactaccaaatcttctatcgtttaatatgggagggaattatttcacagggtccattccaacaactctttccaatatctctactcttgaaagattgggtatgaatgagaacaatctgacaggaagtattcctacattcggaaatgttccaaatttaaaattgttatttcttcataccaattctttaggaagtgattcttctagagatcttgaattcctcacttctttgacaaactgcacccaactagagaccttagggattggcagaaataggcttgggggtgacttgcctatatctattgcgaacctatccgcaaaactcgtaactctagaccttggaggaaccctcatttccggaagcattccttatgacattggaaatctcataaacctacaaaagcttattttagatcaaaatatgttgagtggaccactcccaacctctcttggaaagcttttgaatttgaggtatttaagtctattttcaaatagattatcaggaggtataccagcttttataggcaacatgactatgttagaaacacttgatttgtccaacaatggttttgaaggtattgttcctacaagtcttggcaactgtagtcacctactagaattgtggattggggataataagttgaatgggactatacctctggaaattatgaaaattcagcagcttcttcgcctagacatgtcaggaaattctttgatcggctctctcccgcaggatatcggagcgctacaaaatcttggtacactatcacttggggataataaattatcagggaaacttccacaaactttgggaaactgtcttacaatggaaagtctttttttggaaggaaatttgttttatggagatattccagatttaaaagggttggtgggtgttaaagaagttgatttgtctaacaatgatctctctggaagtatacctgaatactttgcaagcttttccaagttggagtatctcaatctatcttttaacaatcttgagggaaaggtgccagtgaaaggaatatttgagaatgctactacagtttccatagttgggaacaatgatttatgtggaggtattatggggtttcaactaaagccatgcctttcgcaagcaccatctgtggtgaagaagcattcatctcgtttaaagaaagttgtgattggagttagcgtaggcataactttgcttttgttgttgttcatggcttcagttactttgatttggttgagaaagagaaagaagaacaaagaaaccaataatccaactccttctactttggaagtcttgcatgagaagataagttatggagatcttcgtaatgcgacgaatggcttctcttcgagcaatatggtcgggtctggcagttttggtaccgtatataaggcattgctcctgacggagaaaaaggttgttgcagtgaaagttttaaacatgcagagacgtggagcgatgaagagctttatggcagaatgtgaatccttgaaggacataagacatcgtaatcttgtgaaactattgacagcttgttcgagtattgattttcaaggaaatgaatttagagctctcatctatgagttcatgcctaatggaagtttagatatgtggctgcacccagaggaagtggaagagattcataggccctcaagaactttgacccttcttgaaaggcttaacattgccatagacgtggcttctgttttggattatctccatgttcattgtcatgaacctatagctcattgcgatcttaagccaagcaacgtccttctagacgatgatctaaccgcccatgttagtgactttggtctagctcgtcttctcctcaaattcgacgaggagtccttcttcaaccaactaagctcagccggtgttagaggaaccatcggctatgccgcaccaggtatactatcacacatctgtagcattatatgaagaaaattagtatctatcctttctttttatcattacagtcttcttaacattgtttctatgaaatatggtgcagagtatggagtgggaggacagccatctataaatggtgatgtatatagttttgggattctccttttagaaatgttcactggaaaaagaccaaccaatgagctatttggaggaaactttaccctgaacagctacactaagtcggcattgccggaaagaatattggacattgtagacgaatcaattcttcacattggtctcagagtcggtttccctgttgttgagtgcttgacaatggtttttgaggtgggccttaggtgttgtgaagaatctccgatgaaccggttggcaacgagtatagtcgtcaaggagttgatctcaatcagagagaggttctttaaagccagtagaacgacttggcgttgaagtgtttggttttgtctacaaactttgcaacccaataaaaaggcttataatatcttatttcataaattggggttttgtctaagaatgcttgtagaatattgctaatgaaatgcttgtgttaattaataaaaatgtatgaatgttgtggtaccaattttatatggagacaacgtagctttatagttgcaaatccacattgttcccaattttatttggattctctttgttttggtaatgtaaagttctgaacatggagcaatagatcgatgttcaacgataagtaagtaagccttgtcgtcttggtaattgcgtttactaaaagtcccacaagtgggatatggagaaaatacatctaatgccggtcagatcatgaaatgagatcgacgtcaacatttctagcataaaattgacttttgttggcacagtgatcacgacattacgatacgttttagcttacaaaaaatcgttaaccggattatagggtatgttacccataacaaaacaaaattgtgagcaactattcgtaacactggtggatattacaagaataatcttcgtttactgtacttttaatttttctctttgaaattttactattttgttgcaactagatgttaatttaggtatgcaaaccctatttaattaatgggtatgtgtaagagaaattgatccatttaatttcattaagaaaaaaagttaaatggggttaaataggttagcccaactaaacatatttattaaatgtagttttacaactaaacatatggggtatccaattaaacctatttatttttcttttatattatttattcttattgaaaatggtaatatgtttatacattaaaattaaattaataaattattctatttaacttcactttttggtttaaatatttgtttttaaactgcaaagctccattttccactaaaaccgtaaaccaatgttttcccgtcaaaatcgtaataccacgttttcccgtcaaaaccacaaaaagtgttttccgcaaaaattgaaaatcatgttttcccgccaaaaccgtaaaccgacgtttttctaccaaaaccgtaaaaccacgttttcccgccaaaaccgtaaaactacgtttcctaccaaaatcaccaaaaatgtttttctgcaaaaatcacaaaaagtgttttcaaccaaaactgaaaatcatgttttcccgccaaaatcgtatgccgacgtttttccgccataccgtaaaaccacgttttctccccaaaatcacaaaaaatgttttcctgccaaaattacaaaaagtgttttccgacaaaattgaaaatcgtattttcccgccaaaaccgtaaaccgatgttttctcaccaaaaactgtaaaccaatattttctcgcaaaaaccttaaacccgtattttctagctaaatttttctttgccaaaagaatattcacccataaaaatctgtaaaataattattgattatattatatagatatagatctaaatgggtttaaatagattaatgataatttaaatagaaaagataaatgaaatataaaattaaaaagagttaaatgatttagagtaaataggatagattttaaatgggatgggttaacccctattaacatttgcgactaaactattttggctttgcaataataacaaatgaaacctgtcgtcagttggtggatttcttaaacccaaggtgcgtgaaaataaatatacaagtgacataagttgtaaacagtaatgactagtgtcatcttttaacaaagttgatttgttgacttagacggcaataatacgtgtcgtattctgtgtggttgtgagccaatttattatcaccacaatacgtaatgaaaggatttgcaattgcttcgtccccttttaaatcagtttcctgcaaagttgataagcacaaaaacattcaaaatataaaaataaactttgagaaggatgaaactatttcttttactttctttcagtgctcatttgttactgggagcagatgggtttaccgatgaaactgataggcaagcattgttggagttcaagtctcaagtttctgaaggcaaaagagatgtcttatcctcatggaataactcattccctctatgcaactggaagtgggttacatgtggtcgtaaacacaagagagttactcatttgaacctcgggggattacagttgggcgggatagtatcaccatctatcggtaatgtatcgtttctcatatcacttgatctgtctgataacgcttttgggggtatcatccctcgagaggtgggaaacttgtttagacttgaacacttgtatatggccttcaattctctagagggagggattccagccactctatctaactgctctagattgttgaaccttgatttatattcaaatcctcttagacaaggtgttccttctgaactagggtcattgacgaaactcgttattttagatcttggtcgaaacaacctgaaaggcaagctccctagatctctaggaaacttgacctctttaaaatcgcttggcttcacagataacaatatagaaggagaagttccagatgaattagctagactgagtcaaatggtgggtcttgggttatcaatgaacaaattctttggcgtttttcctcccgccatctacaatttgtccgcacttgaggacttattcctctttggtagtggcttctcgggtagcctaaagcctgattttggtaatctgctaccaaacattcgtgagttaaatctgggagaaaatgatctagtgggagccattccaacaacactttccaatatttcaactctacaaaagtttggaatcaacaaaaacatgatgacaggaggtatatatccgaactttggaaaagtaccgagtttgcaatacctagatcttagtgagaatcctctaggaagttacacttttggagatcttgaatttattgattctttgactaattgcacccatttgcaactcttaagtgttggttacactaggcttgggggtgccttgcctacatccattgccaatatgtccacagaactcatcagtttaaaccttataggaaaccacttttttggaagcattcctcaagatattgggaatctcataggcctacaaagacttcagttgggaaaaaatatgttgaccggaccactcccaacttctttgggaaagcttctaagattggggttattaagtctatattcaaataggatgtcaggagagattccatcttttataggcaacctaactcaattagaaatactatatttgtccaacaatagttttgagggaattgttcctccgagtctcgggaagtgtagtcacatgcttgatttacgcattgggtataacaagttgaatgggactataccgaaggaaattatgcaaatcccaacccttgttaacctaagcatggaaggtaactctttgagcggctctctaccaaatgatattggaagtctacaaaatcttgtaaaactatcacttgagaacaataagttttcaggacatctcccacaaaccttgggaaattgtctcgcgatggaacaactttttctacaaggaaattcttttgatggagcaattccaaatataagagggttgatgggtgtaagaagagttgatttgtcaaacaatgatctatcgggaagtatacctgaatattttgcaaacttctccaagttggaatatctcaatctatctattaacaattttacgggaaaggtgccttccaaaggaaattttcagaactctacaatagtttttgtatttggaaacaaaaacctatgtggaggcatcaaggatctgaaactaaagccatgcctcgcccaagaaccaccagtggagacaaagcattcctctcatttaaagaaagttgcaattttagtaagcataggcatagctttgctattgctgttggtcatagcttcgatggttctgtgttggttcagaaaaagaaggaagaaccagcagacaaataacctggttccttctaagttggagattttccatgagaagataagctatggagatctacgaaatgcgacaaatggcttctcttcaagcaatatggttgggtcaggtagttttggtactgtgttcaaggcattgctcccgacggagagcaagattgttgcagtgaaagttctaaacatgcagagacgtggagctatgaagagctttatggcagaatgtgaatccttgaaagacacaaggcatcgtaatcttgtgaaattactgacagcttgcgctagtactgatttccaaggaaacgaattcagagcgcttatctatgagtacttgccgaatggaagcgtggatatgtggctgcacccagaggaagtcgaagagatacgtaggcccccacgaaccttgacacttcttgaaaggcttaatattgtcatagacgtggcttctgttttggactatcttcatgttcactgtcatgagcctatagctcattgcgatctcaagccaagcaacgtccttctagaagatgatttgaccgcccatgttagtgattttggtctggctcggcttctactcaaattcgacaaggagtcattccttaaccaactaagctcagccggagttagaggaaccatcggctatgccgcaccaggtaaaaatatcacacatctgtaatgttctatgaagaaacttggtatatattttatcgttacaatcttgttctgtgaattatggtgcagaatatggaatgggaggacaaccatcaatacatggtgatgtgtatagctttggggttctccttttagaaatgttcaccgggaaacgaccaactgatgagttatttgggggaaatttaacactacatagctacaccaagttagcgttgccagaaaaagtattcgaaattgcagacaaagcgattcttcacattggtcttagagttggtttccgtactgctgagtgcttgacactggttttggaggtgggacttaggtgctgtgaagaatatcctacgaaccggttggcaacgagtgaagtcgcaaaagagttgatctcaatcagagaaaggttctttaaaaccagaagaacacctagacgttgaagtttttatggttttgcctacaaactttgcagtccactcaaaaggcctatataacattgtcttttacaatttgtgttttcttcttctctattaaacatacttatgctatacgtgtttctaagctctattaaaacatactaagatggcttgcagaatattgttaatgaatgcttgtgttttttgcagacaatatatgtatgttgtgtaaccagttttatcatatatatcagtgttcccaactttatttggattttctcagtttttcgtagcttaaaaatgaattacaaactttcatgatttaaaaggcaaacgtaactcaattctagttgttcttcacaatgactgtctttatgaactccataactgttgaaactaattgactttggtgctcagtataaccatgattagctccttccacaatctccagcttgtggtttggtatgatcttcgcaaactccttcgcatcttccacaggtattacctcgtcctccgatccatgaaccgtcaagaccctgtcattacaatcaaacacaagtcaatcttgtgaactcaatatgagttagagaactcagcgagtctcacctgcactctttgtcaatcttgaggcaagcttcatgaatatcagtgcttaacctgtccattaagctcttctcagtaacacgataccccgattttcctgcaaaagaccaacacattgatagaaacactagagtcctaatcaaagacatcgcaggaaaaccaaaaagagataacaataccatctccaacatcgatgaatccttgttgcttaattctttccaaaaaatcttctccaagacgctctcttataccctttttaagatcataacgtcccgagagattgattacattgcggacatcatgatacttggaggcgtagaggaggacaacatcacctcccttactgtgaccgaggattataggaaccacacggttcttgttagagaagtattggacaacagaatgtaaatcatcagcttcatggttatagttaccataatagaaactgccttcactctctctgcaacaatgaaagcaccacaacaccaaaatcaacacaaaatccagcttattcagatcaatgagaataaaagcaactagcaagagaaactaacccattcccggagaaatcaaaacgaaaagcgctgatcccttctttctgtatagcagcagccacattattcattatttggttactctgcatagtttcacaggccaaagacaaagttaattcatatgtaaccaagtctcagatcttagtcaccacaagagcagagaaaacagagaactacaaataaataaaaaggttgcagatttacgttggtgagtcactgattacaattcaagattcatattttgattaagggtaaatcaagatcaacagaaacagcaatcacacactaaccttgtttgatcgaaagccatggcacaagactacgatgtctgtagaaccagtttcatgaagcagaccaaccagcttctcgttgtgtctgtttggaatcacaatcctctgttcttggattcccttagacggatccattctcaaattctttgctttgttacaagagatttggttgttcttgatgggaaagcgaacgttgaagaaggatgatgtgggaaaaggggacgttttgtaataaggagaatcttgagggacaaaattgaagttgtgcaaaagagttctcattgtttcatatcacatgaactgttgactgaagatgatgagagtttagtttattattttttagtgagaaaaggaaaatgacttgaaattttaattttttttaaaaactctttatttgtaagaattttcttaaataatatttggactactatataaggctaataatgaaaaattttatttttttctcaaaagtgtaacattttatttaaaatttatgttgtaaaaagtacaacagtgaaaacttccacttacaaggcttgacagactaaaagtttaaccaacaattcagtttataagctgtgacccaacttaaatagcccaatccagaaagctaattctttgaggaagtttaactctttgtcgacaaaatacgaaaagttgtgttttgagctttataaataataattcatcatttcattatcggcttggatttaaatcatcaatttaatttatagaggtgaaatcaaaataaaggaaatcactgtgatttaactttagttttgattgaaactattatgtaatatacttctcaaatctctctgtgtatcttccttcaggtgaaaaacgaaagagatattggacgtagaaaatatcaaaagtgtgcacatcctaaggtaaacgaattccataaaaacctattaacttgttttgatcttggattgctaaagtcttgagcttctattgctctgttttttagccattaggccttgtctcattttcccttttgatcacatattcgtgtttcttcttctttactatactttcttgtagacttgtagtgcgattcagtttcagttccataagaggaaaaaaaatcagtggaaaacaaacaaaaataataatactagtagacatttgatcattgcttaaagtaagtaacatatgtttatcagcagcttaacaaaactagtagtagaggcatgtacatggtttttgtggttaatttaggtttttagggttacagttttttcaggttttggaaaaatagggtccaataaaattggtttcatgaaaaatattggtttggttcggattcggttttaaatcaaatgtataacaaaaaataatttaacttgtttcaaatcatattatgtttaaaatattttcactatttttaattgaaatatttgtttggtttattctgttcaatctcacaaaacgttcgtcaactatcaaaacaaactttttaaaccattgaaaaatagatcagaacagtcaaataaattccataaattccattttcagccaattaatttactaagcccgaaatttattagagactcaagcaaaaaaaaagtcaacgagttgggtgtgagacagtgtgacattaaaatatgtgtgatgtctctaaggtaaagcatctctacttggatcatgctcgttgtgctcaacacaggcataagtcaaacaaacactcacattttcttctgcattaaattcactacttttttcttctttttttgcctctcctgttaattagcagctttattttattagttttacataattctatgaatcactagattttgcctcctataatcggatacaaaactagattttgctctttaattttcttttagtaacaactcattttttgtttgtttaatgaaatatctcaccagtaaaagaacctatatctttattatagaacttcattatttagtacattaaacagtttaaagtaatcttaatctatataatgaatgaggagaaaagtttgttctacctactgattgaagtttatggaaacataaaatctgaaacctaaccatatcaatactaattaagtgacatgaatttgtataaccaaatgagtcacacgattaaaaagacgttacattaataaagatgatgtacacttttgagtttctactacatagaagatatcatctccacgtcgacaaagatttaaggaaaaaataaagagttactactaaaaagatagagaaaaatgtgttaaaacttaagagttactactaaagactaaaatccctaattactgcaatatgatcataataaggattgaaaacaaaactaaagagtacttaattatacaaattgtttataactaagcctcgtggttcctcaagcaaatcgtcaaactttaatgctttctagaacaacacttcctgaccctctagtgacatgttattgatgatcatatcgtggctttgctcatcaaagagccatttctcgaacaaagaaagagagccttgtgtaattagaccattaatgtcatggtctattagtttaggcttctcttcagcttcatctatggagttgaagctgaacaaagaatggtcaatcccttctccgtctccttcggttgtgctagggctcgaagctgccgtggtgatagccatctcggtggctgcaaccggcaagggcaccgaggtctttggtgtgtctttcataaaattctgaagcaaacgagcaatgttctcagcacttgaagcatagaccccagatgggtatggattagtgtttctcgtggtggtggtggtggtggtggtagaggacgaagaagatgatggaccataaccaagatcgggaatagaaaaattagttgggttttgtggtttgtcaatagacaaggcatcacaaagagcttgtttagccatgttgatatctgtctgaagccttctctcccattgacctttactggagttgctgctttgatgtgaggtagtgtttttgtttgatatggagaagtctttattatcaaggccattgttgatagtactatcacaagaatcattcatcttcttgagctttttcttcaaatgagtgttccaatagttctttatatcattgtctgtcctttctggaagatatgatgctatagctgcccaccttcataattatttggtccccaagttatttaaagttcaaaaccttatctttatgcatacccaaaaaaataaaagaatttgtatacttttatagatcatgtgcatgtgaatatgtatgtatttacctgtttcccaaaagagcttgaagatggagaatcatcttctcttcatgctcggtgaaatttccacgcttgatcccaggtcgaagataattagtccacctcaatctacagcttttgctacatctcctcaaacctaaatcaccacaacaacaacaagataatttcattaaaagagtaattaatttgtgatatatggacaaaaaagctggtgccataaatcggatattattacaatttttccttttcattaaatgatcataccaaccaagtggaagccagaacaaaacaatcacaaacccaagaaaaaaacaaaaaacattaaagggtacttctgaagagtataggggttaacaattgaaattaaaatattactattgttcattaaaaaaacataatattaagatagaagaagatacctgtgtgagtaggcacagatctccagtttccaggaccatgttcttggatgtaagaaaccaagatgatatcttcctctggtgtccatggtcctttcttcactccaatcttgtcacagcatggtggtcttcccatctctatcttctctatgtaaatatcactttgtgattaggggaagaatggaacggtttgtggtatgagcagagagaaggactttgatgatgatcagatatatatattggtgaagaacggtttgtggttttttgtggcttgagagcttaggaaattgtagggttaaagagtacttaagacaaagaggtacaagtggtggttggttttgtctgaagatgtggagagagagcttgtgtatatttatacagccaaagagagagagagagagagagagagagagagagagagagagagagagagagagagagagagagagagagagagagagaggtttaagctgaagagtgaattagtagcaataataatagagttaaaagtaacaataatgaagagtggggttttgctatcaaagagtcaacatggacagccaaatgcatttactctcttgctctccaaagtcagcctcctctctctctctctccaccattactccatgctttctctctctaaaattagcctactattttctctttgtaattagtcatttcatattatcgcaaataaacccttaattttgtctccacacgagaacatatgtgcatgtatcattttattaggtgttcatcaatttgattgggtttagacttcaaagactttgattgcatttatgcatgggtccacaatgagagtgaaatgagtatataacttctatttatgtaattaaaccttctaattatacatttggaaaagcatacatgaattaaacaataaaaggattttcataatatgaatttgtaaatttggattttccacttgcatgcatatatgtggcatgattttacaatgtccttcctgcgttattgagaaccaaccggaatttaaactaattatctgtctctctaaaaatattgatattttgtgagttatgttgtgatcaaattggtatacatatcatatgaaaactattacatgatctcaaaatatataaaactagtaaccacttaataagtcgacttagcatatatcaaaattgagtgaacttaactaaaatcaaaccaaatattttggtttcaatcccgtcaaattctcatgaacaatcaaatatagacatcaacaaaacacagaataagtagcaaaatttattatttaaaagaagaaaaaaaagaagttaaatttgaattgatgcgaatttagtcgaacatgtaaaaatgttaattagtggtgtcaggtgtgacttgtgagcttttgtaggtaattgaattgaacggttgataaaagataatcgaaacacatatccccacattcccaataaggaaaatgtccacacatatagatcttttggtgatgttggacttgttggtatatttagatcgataaactttttttttgtaaaacaataatgattgtaatctcatacactaagaattggtttaaaaatcagtttaaggatttcaaaaactttacaagaaacgagaggaatgttgcaaagcgcgtcgtcgttgtgtattgagcttttaaattggataggaaataatattatacgtatctaaataattaacataaatattatataatacaatatgaaaaaatcgtctgaagatactacgtacaatagatacaaattcaacggaccgtagagacttcattgaacaaaataggttgaaaccccatacgccacgtctttttgtattacgtaacccatgtcccgaggatgatggtattaataattttgactaaaatcgtcacatagacacctctaactagttatatttatttgttgttaaagtataactagttatattgtaatactgaatatcagaaattgaattgtatatttcgaaattattttacgttgttggtatcgtttataatattgattagaattcaacagaaaacttcttgtctggttcttaaggttaagattatgcttttaattttaccgaggctgagtatcatgctatgcgtcgatttctttttatataagaattaaggtatttgaagataagaaaatattttcaacattttaggtctacatttcaattattgtagacctaagtacattttttataaaataatgatattcttagcaaaaagaaaaaaaaaattgtattaatatagtatatatgcttcgatataagcaattgagtgcactcattcatcaagtgaattggcaactaaaagttattagtatgcgagttttaaaccaacgtttcgtttagttacaagattagggaagcaattttactctcagccaatatatgtccatgttcacccaaaatctttgtaggggttggttaacccaaaaaactccttagtaatattccgatgagtaatattgattgctttgcattttttagagggtaaagaaaggcatagaaactaagtcagaacttttgggtaacaacgtgaataaaccaagaagagagaatccttagctaaaaacaaaattgtatacatctttttacaattaatttccttttggcgtcagtatacaattaactaaactgtgcttatatagactcaaaccaaattttggacaagtatagaaaattcaaattttcttagcttcatatttgttttggaataaattcatttgtaaaccttaagatgacatttaaacaaaaaaaaattaaatatataaaatcacatttttgtgaaataaatagagtacagtaatagtacacgtaagttcaaaaatatttaccgtagttttaacttttaacagtaattaccttaatggctaatgcctaatgtacacaaattttcaagatgcaagaaaaggaaaaaaaaaagtcacccatagctttgataaattatagcagtaaatactatttactgtcatctatcacaaatactattttgactaaattgtcgagtggtgtaatatatataatatctctgaatctttaaggtctagctagctagggtttcgactttcgtttgtttctctggatcaagatcttgaaagttctccgatgtttcctaatagtttctagaacagatatatttacgagagtataagtcaacgactatggtcttcttttggatctcgacgtgctttggctcgtatcttaatttatacactatccaattaaatattagctaggtttaaacctaggcttaatattttaccctcaaacggttaagttggaatgaaagacacgtgtcaaattgtgcagaaaataatacaacatgcagtaaaataataatcggatgtaagattacttggaccatcattaaatgatgtgcatgatagaatgataaagaagtatatataacacataggccataggtctcgtagtaatccaagctgatgtaattgtcacggaacaacctaaggtttcttgataaatcttctgcggtaatttgggtagagttttgacaattttcaaattagagatgaagtcctgaccaaaatgatatcgatatatgtaacttattcaaacacaaatttctagcaatattgtttgaaaaaggattgtttaagtccccacggaaaacgtatgggtatcagtccaaaaatttaagtcaactgagactaaaaagatttagcaaaaaacaatttgtaaatagaaccaagggccaacttttaaacgaacggtgcgaagctacacaaaacacatatagaaatggttaaaacgttgtaattgcctatgtttttttgtcacaatataattccatatagacatatagttagatagaggccatgtgatgtgaattagcgatcaaaaacttatacattcgatttagaaaagatatgtaattttattttgttttgttaacagcaacgtatatgagtttgaatttcatcgaccgtactaacgtaaacaattaagctacaaatcatggtcataaacaacatgtataacaccagatacatgcaacaccagattgcaccatattgctctccttttggtttaagaaacgatatgtctatattaattacaaggaacctttgatttcggccggttacatctcaaaacccatgatcacgggtaatcatcatataatagtccatgttgtcaaaatcgattaagaaaatcttttcaattttaaggaaacttttagatatatgttatgttcaaatccaagttgctctctttattgttttgaaataggtctaagtcaaaatcattaaaagcaagatatttaggatatttaagcttgatctccttagaggcctaagctaaattaatttacatgctatatgcaagaaatatcatagttaactagaactagatattttaaattccagattgtaactagtaaaacccctataaattgtaggtttaacattgtgattggagacttagcatatactttcttccggaatatagtgagctgtttcttctagccacttgctaatgaaactttatttttgactttacacgttaagaaaataacttacagaaaagaaagaaagaaacaaattgatattctaaattcatcgtccatttaattttgaatagttgttgacttattcaattcgttggcattgacgcgttatgtctacattttcacttacgtctatcaacaaagcattgaaatgggtcgtccatatatgaaagtatgccttgttaaaacaaaaagtacttatgctttgtttacaaaaaaaaaaaaaaaaaagtgatgcttcgttgtatgaaaattgtaactatattttgtaaatgaatcatctttgcttagttgagatgcaagtgccagataatgtatacgcctatacgatctataatcataataatttaatatctttaataacaccgaaccaatatatataaacttcatacgttaaaaaataagttgaaagaatcgcaattgttttttcttcagaccattttataaaataactatattttctaattgatcgacacacatatttcagcagctaaatttgttatgaaatcaacatgtcagagaatctgttacaaatttaaggttaatagtcctgaaaaaaatatttagattgtaacagataatgaatcattgaaaactactattgaaaataaaaaataaaataattgaaacaaataaaataaattcaactcaaatagttaattaggattgattagataatagtcgaatgacatattcagtaatatcttacaaattaaatattagtaacaataatcaaatttgattaaacgaaataaatagaattgtagaaataaaacagtacatatatatatagagaattatatatgaaaatattattttgatttgtattttggtatagtgacttataaatttatttaggcaaaataaagtagataaaatttcagtttaaagtacatgtcaaatgtaccaataagatagcagaattttttttttggaattaaatgtttgtcataaggtattaaaataataaattcaaataaatttaaagaaactaaatcactattaaggaggacaaatgtcacccaaagagagtgccaaatgtcgcaatggtaggaaaagttagaaaaaaaccttgtcttattatataagatgtccacaatacctaattatttccaaaatcgtaactaaggattcaaattgagcctagacacacaaaacgaaccatcaagtacatggtaattttttttattagtaaatgataaataaattatgtttaaccgtaattatagtactagggtggagaattatatgagatccaaaatccaacctaaaatataactttttctttttttaacacatgaaatctaacttactatgctcttgataactggtcatgaacatataatttttctagattcatgtataagtttccaagagtagttttctaaaatatttgttatcatctttacattttaatcttttgatctgtaaaattatacctagtacatttgatatacaatacaattttgcaatcagctcctttctttcttttgatgagatcagtcagctcctttctagtagctctttaattgctaggacactacgtaatacatcggtgtagatgcatggaggcgtgtatggccaggatgcaaccacctaaactctgtccggatatggaaagcgacgatctcggacaagacattggcaccgaatatcatcaaaagcaaagcaagaccacactttgctttcttttgttgggtatgtttgtgggagcccactccaaaaagcaatattttatcgtatagctcgtacatggtccccatttgaattatcacgtgtcgctatgtgatcacttggacgattctatacttacgctctcttccatcgtgtccgttgaaacgtgtcgacgggaaaaagaaaaaaagattaattacaacaacaagatctcgatctttcaatattaagttttggaatttttgcaaatgcatgggctatatgttgttactattacttttcatatagtgatttatgtattaaatgccatttttttgctgtgaaatcgctaattattggtcattttattcatactatataggaccatggtgacataatccgatccaagagcttgaggtctgtaagtcaattttcatttggatttgttcacattgtgtttaatgatatctttaagatgttggtatcattaagaaattaaattatagtttattcctttgatttatatatattaaaaacatcaattcaaagaattaaattgtagttttttaccggtatattattgtagctaattcgggatagtaaactcatttatcataattatgttagttaaagctaaatatcaatttccatgtatacggtttgttatgtactctaaaatttacaaaaaaaatatagcttctataaattagttttgtttttcatatgagatcagtgagttactcaaagtcttaaacccatcgagataaaactagtctaaccaatacaaactttatgatgacaattttgagagtttaattgaattgtcatcatcctaaataaatgttgatcatctcatagatcatgtatttataatataatctgacgataacccacaacaaattgttcagtaagttcttcgaatccagtcaacaaaattatttgattataagacatgaaaattaaattatgatcaatatcatttaatacttttccttccactgatttgacacaaaatatatactttttcttccactgatagttttctaatttctatccactgagagacttaaatttgtgactttggaagaaaaaaaaatctacttatgggttttatacgagttgaactattgaaataatgattgatgttgggttatatacttgtcattttctttttttaatatacttatcatcttatttaagagaattctaataggtaaaaaaataatagtttcgagaattgtgttgggatgttgaaaatgaggattgtcggacacaggcagtgcgaggtgggggtaagaaatgttccactaatcaaatcatattgggaccatggactatggaccatgtaccatggcttatacaatacaaacttatttatttcgttgcccacttcataaaagctatgtcaacattataattttcgaaaaaaaagagaggatgatacttgtagaaaatgagtttaagttgctaacgtaattaagtttttttttggtaaagtatcttattatttatttataaacgtaaaaataaactacactcggacactctgcgtaaccataaagctaaataagtttttgaatcaaataacttaaagtaaaatgtcaaaaccttgcacttcaagaaattatcttttgtcgtctacaactcacatgtatgtataatatcgaatcgattcgaaccatagcacatcaacgatattactataaacttctaagttagaagctctagttgtgtatatcaaatattaaaaatgtgtgaaaatatgaatcatctgattgtaggaatgttaattgggctataatgattaatgaggtctaaaatgatataaatgtttatgtcaagtgatattaggtcaactaatttaggcgttccaaattagtaagaggaacccggtaaacgtaaaattgaaagaagaaacccgggtttaacatgtatttgggtttaagttcaaatatagcgagacatttaggcccgtttcacaatattgggccgagcccatgaataaatacaaaatagtatttttgattggagaggatcggccctttcttgtcgtcgtttcgaagagactaaaggcgacggagagaatcggagaagaagatgggaacggcggtgggacagtggctagaggaagcgcttgttgacctctgccgcaaaccagagaccggtttgaatttcgatcgtgatgtcatctccggtttagtctcctattgcgatcttgctcagcctgtcgatgccaaggaatatctcgacgtaaatccttccctctttagtcgccaattctcacttaatgcttgtgttattcggattcgatgatttagttttttcatataaaattggttagtgattttgggcaattggataagagattagtgtgttaggtttgaattgatttcaattgagtagtagtgaggtagaattaagctctctgaaccattgaagaagtgatagttttggtaatttagttttaatgagatagggttttagtacgaaatcagagatgaatagttgtctccattgtttaacttgatgaacctaaatgatctcatctgatttaggtcaaatgattagtataactcttgatcatgttttgaggttgggcaagggattattagtacatatatgatactgctttaggtttgaggacatataatttgattaagcgaccattcgtctgattgattttagtaatgcctttaagcagaatattattggaaaagaaggcaaaagcatcattgcagaatatctacagcgaagaggatacaaagatccatctagccatgtagcagccagttcaggtccagaactgcaaatgtatgttaagccaaaagtggataatggtgcttctagtggaaccaagaaaccgtttaaaacaccaaaagagggaacatcttctaatcagcaagctggaactgggaaattaacagctcccgcccagcaagttaatcctaagaagaaaaaaggtggaaaggtgatttctcttgccgaagcagctaaaggatcaatagtgtttcagcaaggaaaaccgtgtgcatgccaagctcgtagacaccacttagtgagcaactgcttgtcgtgtgggaaaatagtgtgcgaacaagaaggagaagggccttgcagtttttgcggagcacttgtgctgaaagaaggaagtacatatgctgggctagaggtagggtatactccagtatctgatgctgatgtggcagctgaagcatatgcgaaaaggcttgtagagtatgatagaaattcggccgcacgtacaacggttattgatgaccaaagcgattactatgaatctgagagcagtacttggctctctgcggaggtatatagaatctccattgctaaactacatttggtttttgtttcgccattgacttaatatattggattctgttctcaggaaaaagagctagtgaggaagaagcgagaggagattgaagaagctgaacgagtaaaaaagagcaaagtggttatgacatttgatttaatcggccgtaaggtaactctcaagactcccctgttctcagcatgtttgaaactagaactagaagataagttataggtttcctttgaagtatcgagtcattttccctgtctcaagtctctctgcaatgttactatctatattcttcaaggtttacctacctttcttctccagtagggcatgcttgaattgctagatcaatatcgatttacttgtcctcggattattcttcatagagatactattcattcgaagtagtgatgattcatgatttgacacattacaggttctgttaaatgaagatgatatctcagaactagaatcagggaacaggattctgggaccacctgagactaaaaacgtgaacagaataaaaccgaacccgactgcaagactcgttccaatcttcttagacccaggaccaaccgagaagaagccaaacagcaccaccaccaagaaagacaacaagaaaaaccgaaacggtttgtgtctagagatcacaggaagggtgcaacatgacagaagtgaactcaaatacttacaagccgatccaaaatcggacggtaaatcttggccatcaggaaacgatggacttcatgtagaagatggtggtgaatgttccttagattacgactaaatatttttcagtaaccaaacccggttcaatgttttcggtttaccgaacctgatactatttgttcagtttaaaagtcaacaacttttctcttgttgagtccacgtcggatggttttttgatacgccgtcggtcaagaatcacgtgtttggaactttgggtctctcatgtgattacgtggcgttatgtaattgggtaatgttaaattctctcggttttattaagataagattattcgtctccacgtgttacgtgttcccagctatcaaatcgttttcttagagcactatgtattttttattttttatttcatttcaaattcttcgtcataatgaaaatagaatagaatatgttcgaattttagtttattagttgtgaatatttgtaaaaccaagctacaaacaaatttggagtatatgaacaagcatttttgtggctatagtatatagagaggtttagtgcctagacaatatttttataaccgagattatgtttttattgaactaccaaaaagtaaaactttgcaaaatttgagtcctgtttgattgaatccacccaccgatggtgaaataaaataataatatcgacactgtattaatatgataagcatgattaggacaataaataatcattttcccctataataagtaatgaatagtataagatcgataaaaaagcaacattgatatgatgcgacacaagtccctttgttatccacacctttctccccaaaaaatcccttttaattttctatatctatgtaaaaagaacatttatgacgtcagccacccatgacttcttataatggaaaagattccatctgccccctaccagaaattcagaaaactagctcatttatgcacattcgcacacacatgtactgatatacattacatataaagatttgttttcatttgtgtaacgtagaatatcaaatttagtttgattattgctataaaattggtatcaaatctggtaaccaagctgcaatattgtattaaagtgacaaaaaaataatcagatgtgctattcattctcgaagagtctactccaaaaataggaaacataaaattaggtagaattgatttatctttgtggtttagtcacaacttttaaaaatatgagttaaaaaaatattcatattgttaaaatattcattattaatatagcttaaatatgtttagcatttttaaaaacttttaaaacaaatgaaaacaacttttttttgtaaactcattaagaagtttcagaccaaaactcatacatcttcctaagtataggtcatcttctaatacttttacccgtagtagctgccattcgaacatgtgaacttttagattttttcagggtacatttcgacttgaactatcaacctatagttaatgtaatgtaatgtaacttacactataattaacttatatgaaccatgttgtgatgagcgggtagctcccgcttgaggtgtggagtcttttcccgattctagacaaatgattgattctttttagttatgtattttgatagaaaatattgcattttggttggcccgtagatgtatccaacctagtatccaatgatccaaaaaattatatttcgagtttgtcatagaatttctctggttataactaaataattaaatatatatagataaattttatacagatatgctgatgctgaaaattaaaagaggaaagaaaaagaaaaaaacagaaaaagagagaaattaaaggtgtaatatttggacaaaagatgccaacagagcatctggcaaaaatgttagatggtaagatgtctatttcaatagccacatttatgttcaaacgataccgcaaacgccatgtggtctcttaaaacgcaacactttgtatcaatacaaaccaaaccaccagctgtaccaatcgctgtatatgcatgttgcgactgcgtttcaactttcgaccaaactcccttatcaatttctactgcttaagtgactaatcactgttgcattaactttcgaccaaactcccttatcaatttagcctatatgttttgttaactccgattaattagtcccacactttatagattgtttcctattcaatatttctttgtattcgaatatgattttgggtatgtaactatgatcttttagttacaatagtaagttagtaacaaattttgttataacaagacgatatgttattctacatattaattggcttctttggcttagcatttcacttacctttattttttgttttataaatgtatatttttttttataattatattttaattttacaaaaataaaactggattagtattatacattaaattcacttgtaataccagatatacaataaatttcacttatatatatgagctggtgagtaatacattcatgtgtctacttttttggtgaatattttttgaataggggaaaaaatttataaggttagagacaagtgggtccaaaaaaatgaagaaagttgtaatttatctgtaaaagcttgctggttacaacctgcaacctcacactttaagccttttagtaaaacttttctaataataaatatctaaatccttcactgcttgatttttcatttctaagctatttttactaacgaatttcctcctgcttaaatattttatatttctgacatttataattaaaagtgcctatattttggccaacatatatatcgactataatacttggttatagctaaatttgtatgtgagtaactaaaaatattcctagcgcagaaagttacgtgaattgaaacatattagatctaatattaaaattttgaaattgtatttatatattcaaaaaatatatttatcttaaattaattactcaggtaagatttttattatctctatgaagctacaaactcaagatgctgatgatatattatttcaattatgaataaataaatacaaacgtaaaaacaactattgtattaacctaaaacaccgatgtaatgtttgccgatggcattatgatgctagaagttagaagtgggaatagttatgataaatttagacaaaaaaatctatgatttggatgttcatgttagatgttctttcgaaagttttgtgctcaagagttttggagcttgatgtattatagcaactgtgagactatatcttctatgaaatatcttttatagaagaagcaagagagagtgtttacagattttactagcttccgagggtatcgggttattcgacccaaggttggtggaattccaagtatgcgagatctaatgttgatgtttatatctttatcagtagattaactgcataattatgattcatatataacatgttaagtttaacgcttgatcttgagaatacttttatactgattcatttaaaagttgtgattgaacttcgttcatcgatctaggtttgagaaaaagtagtgtttagacttatttaatgaatcagtattttacagtcatatgactagaatatatatagtgtggggtaatatctctatgtttggataacccattatagtttatctatgactcgtcaaaagatgtacgtttcagatattttttgtaaataagaggtttcatatatttcagaatgtattgtttatataagaattcctttattcatcgatgtgggaaaatccgcacgaagaaaattatctctaaattacgtgtcagttcatgtgttgtattctacttcattcatttctgaaatatgaaaatgatatagatattatttgtgtgatatatatctacaacttatttttcaaaaatatattatcaatcttttaacttttatataaaagacctttctctctttaaaatatatatatatacatatatatatatatatataagagacttgtggaaaatattgtcattttaaagtaataaaatattttgtataaaaagatgtgtagtttggctgtaatcattatttttatttttttttgaaagaatcattaattttctttttctacaacatatatcgatatattctaatttctcgaatatgaaaaaggtaagtatcctaaattatcatttaaacatgtgagtgtgagatactaaattactggttcgttgttttcgacgtaaacaactgtcaactgttatttgaaaggaagatgaactataacatcgttctatcttacaaggaaatcaaataaaacaagaagacccccaaaaaaaaaaaaaaaccgtggggtacaacacttaaaagaagtaaatcatgggacatgacggcatgaaactatgttcaaagttcaaacctggtaatggggtaaagatggaatgatattcactaccaaaaatgccactagctgatagctataacaaatcgacgtagcaaagtttagaaagttaaaattatagaatcacttttgatattacaatttttttataggaatgaaatatatgaaaagacaaagaaacaaactattgagtacatattatctttacatcttcttactcttttttcatcttgtttatttgttatcttcaaaaacgttagaaaatatttatcattaatttccttgttacgtacatatatacatgaaatatcatcagattacttgttagtgttatttctatctcatgagtttattatccgtcgtgctagactaatacttacactgattatatattttaacgtcagattattttaataattgtgcctaaaatttacaagtttcttaatacttatcaaattgaaaaatgatcagtatgtgttgtttagttttatgtggacaaatttatatatctgtaaacaaaatgaataatgaacaaaataagcttgcgacaagaaaaaagctaaaacacatgagatagatgttaggaacttagaagatgacccacctctcatatcatacatttagttaatgaaacatgcccagcctgttttgtacaataagctaagatatgttacatcaaagataccaatcaagttctctgtattaaagtgaattgtttcacgaaattgaaacatatttatttcaaatgcaaatcctccatttgtatttttttcatgtatatcgttcctacttgtctatccaattaaaagaaacacgtaactatactttgatttgaaaactaattttaaattatattttaggttaaaataacatattctctaattatatgaatcatcctattgatatattccaaattttgaatacatatatagtactatatattatcagagacggatcgtagtacgaaaagtttcttttaagtttagatattacataagaacattaactgtaaaagaaagtattagtaattgtttatatgattctgtcaagtaactacgatataaatttatttcagttcagcagatgtgttttactattaactatacaaaatggtgacactcggtagtcggtatctaaacatttttgctggtacgtatccaaattctagttacttgaaatatcgatgagatcaatcatcaatataaatattacaacaatatactatctattctaacacaaagtgtgtatatactatattactatctagctaagggcgggtaggtccggtatcgatcaccctattaaaatcaaatttcaagagtatatatatatatagtaaacctgcctgtaaaatgatacttaaaatgttagattcaatcttccaacaataatttattcattacaatgcaagtacgtatgtgactattgggggtgttaattatttcttacataaaggaataattataatttacaggactcatggtaagtaatatttataatttagaccgaccacttgtgtttctgtcattttacatttatgaatatgaacaatccatttgattccgtcctaggtgggagtagactgcaatctacaataattaatttatagtacaaaaccaattgattagtgaattggtttaagttattaaactaaaagaagtaattattcaaggttgagccctagctatagtgccagatatttttaattaaatcctaattaagcatttaattaagaccccaatagacgaaacgaaagcaagtaccatcatcatatataatcatgcatatttatcaaagttttatattttataacaagagagggaatcccaaagctatcatcatcatccacatttactctaccatactttcgattctttatgctctttttataatcttaattgttgttgaaacttttgcttctttattttaaatatacgtttatggtgcttatttaaacaacaaatatgtaatacgtcgaaacagtttgtaatatgtgtacgtaatattaaactatatcatttcttcgaataataacacatatcacatatcatatgttatttacaaaaattcttcatcaaatacattcattaacatatatatatatatttatatatatgacatctatgatcatatatttttatttttatcaaaatagtcatagtttccatatgtattattaatagagtttagtttacaatatttcaaagccttaataagtagttcttttactttgaaaaaacaaaaatagacatttataatagaaaaacagagaggttggttaaaatgctaaaagtctcattttattcatacttttagttttttcttttttttttgaaaaaccctatttatttgataacatacataaatcaacttttgggcagtggtgttacataccatagttcttcactttttttgtatagagatttgctatctgattaaataaaaacgaataatgcttgggtttaaaattgtgaataacaatgataatgtttctagtttccggcaaaagtagcaggggaagaatgattacgtgaatgatgtaggacccaaaacgttttgaaataaattactaaatttttgaccaaattgagttgtttaatttggagaggagtgttggccccatcactctctcgtcgacctctccattgtctttatggaatgaatgataaaagaggacacctcacgtggactctgctgccacaacgactctctccaaccatatccccttcacatatatgacatatttttcttacatttactatatattaaagactccacattgtacattttttcatctcatttattaacgcaacgttcagatttttccatttttaactagtcgtgaaaagtattttcgttgtacggtgaatattgtagcccttttttacggtgggtgttttttttttcatttgattgatgagtaaatctacatcgagaaaagaatataatgaaagatataccgaaatcttttgattatggacagatttattttgtttaaacctttttttttttttactgttttaaaaagttgactaaatgcttatctgagaaaataattaacgtgaaaaataatttgatataattcggattaagttaactataacagactgattttgattgagcagaaattaacgttgaaatattcacattggctaattacatcaattcatttttgcgttgattaaatgacactttcttttcttcaactattaaatgatattcccattgttgacatttctctaagtatatgattttaagtaattttcataaagaagcaatgaacagtattttcatttgaaaaaaaaaagatatgtaatgagatttttcttttaattttttaatgttatgtaaagctcacccatataattctcactcatgatctttgtttctttaagcttttcttctccattgtctctctctttcttatcctctctttctcaatcaattccttcagacttatacactttattttttttcccctcttgtcgaaaacatcacatataaataaaaaaccaaaaaccctaatttataaaatatatataaaatagttatagctccccacttatatatgcaaaagccaacatcaagtatcttaaatgtcataatggacggtggagacagcgtcggaggaggaggaggagatgatcaccaccgtcacctccaccatcaccaccgccctactttcccttttcaactactcggaaaacacgaccccgacgacaaccatcaacaacaaccttccccttcctcctcctcctctctattttctctccatcaacaccaacaattatctcaatcgcaacctcaatcgcaatcgcaaaagtcacaaccgcagacaacgcaaaaagagttattacaaacgcaagaggaatctgcggtggtggcagctaaaaagccaccgttgaaacgagcgtcgacgaaagaccgacacacgaaagtagacggaagagggaggagaataaggatgccggcgttatgtgcagctagggtttttcagctaacgcgagagctaggtcataaatccgacggtgagacaatagagtggcttcttcaacaagctgaaccatctgtaatcgccgccaccggaaccggaacaatcccggcgaatttcacttctttaaacatctctctccgttcttcaggctcttccatgtctcttccttctcatttccgctccgccgcttccacttttagccctaataacatattttctccggcgatgcttcaacaacaacaacaacaacaacgtggtggtggtgttgggtttcatcatccccatctacagggacgtgcacctacgtcgtctttgtttcctggtattgataacttcacaccaacgacgtcgtttttgaactttcataatccaacaaagcaagaaggagatcaagattctgaagagttaaactcggagaagaaaagaagaatccaaacgacgtcggatttgcatcaacaacaacaacaacaccaacatgatcaaatcggaggatatacacttcaatctagcaacagtggatctacagccaccgcagccgccgcgcaacaaataccgggaaatttctggatggttgcggcggctgcggctgcaggtggtggtggtggtaataacaaccaaacaggtggtcttatgacagcttctattggtactggtggcggcggtggagagcctgtttggacgtttccttccattaacacggcagcggcagcgttatatagaagtggcgtttcgggcgttccaagcggcgcggtttctagcggtttacattttatgaatttcgcagcgccaatggcatttcttactggacaacaacagctagcaacaactagtaatcatgagattaatgaagatagtaataataatgaaggaggaagaagtgacggtggtggtgatcatcataatacacagagacatcatcatcatcaacaacaacatcatcataatattctctccggcttgaaccagtacggacggcaagtttccggcgactctcaagctagtggatcacttggaggtggtgatgaggaggatcagcaagattagacacacacaaaaacattttaacggtgggattttctgccgacggcggtagcggtgacggcgttcggcggctgtgtaaaacttttgttttcaccgttaattttttttattttctgtagtaattttttttgctaagtaaaaaaaaaaaaaaaaacacgtgagattttctttttaattttgatttttttacttgattttaaatttgatttttcttgtgagtgagtgattaaatagtacacgagattttttatgtcaggttttttggattttgaggagaatatgacacttttttttatcattattgtttttaattgttttttttcttcttctgatagtgtcactgtcgtctcgattctcaatcatcttcgttttctttatccattaagaaattaattatacataaagaaaaattctaaaaagtattcgtcaaacaatgttggttcctatagtaataatagtaacatatacatcaaagtataatcttactgtttttttagtaacattacgtttttttaagtgttaatacaaaaaaaattgagaaactattttatcaaggaatgagatgggcctctctctattggcccaccaatctctgttatatttggcccttgaagtagttgtttcaaagctaatagaaaacagcaaagtgtctcgtttgttttacatggtcgaacgaaaacgatacaaaaaacataaaaatatctcgtttgatcttatatgctatgaaatatattaaatgctttttttagtatatgattcattttatctctgtttctttgtcgtttgtccccactaaacaatcaatctgattttgtatatgatgagatatctaatactattatatcatgatattgttaaaactggttttgtatatgatgataatattatatcaagactagtttagactatgagaattaattagaaagtgatatagtttgaatgtcgcgtacaaagttatggctcaaaattttgtttctttttttttgacgaagtacaccaaaaatatttgattgtttcagtatattctttttgtgtttgtatgcctttagaaagtaatattaacaatttgtaaattgatagtgtttaattagaacataatttactttataaaatctattattatgttgtgaaagaaaatattcactcaacatcgatcggtcatatattcaagaatcaagataaataatctgaagttttaaaaatctgttttcgcatgggttaaatataagtttttacaaaaaggatgaagacagaaaacaaataaaaataaatgtgaatgcagactatataatatatcattgaatgtataaattatacaaattcaataagtagagaaagagagagagagagagagattgattgtggtgcattaacaaaaaagagattgattgtggtggtgacatgaggactgtagcattgtaagggtcgtgggacctaaaacgttatcaggtgcagtgattgtcgtgtggacctctttgattctctcatctccgtaaccaacgttcacttttttccctcactgacaccaacaaaattctttctcttctcttttctttttcaccacactcgatcgctgtaattaaatatggcaacaccatttaccaccatttaccaccatatactttcatatttcgttctgtcttgtaaactacatctgtcaaagggatatgaaatgtatatataatcatatagtatacatcatcggacttgaaggtttagttacggaaagaaaatttcaacactaatgtttgaaattcgtacgtaataaaccaatggatgacactattattattgtatatatttataaattctcatgttgtcattatgtattatagctaactccgatctaatgttttaaattcgtaataaattaataaacacagtttttgtatatagttataattctcacgttgtcattatatcatatagctaaccccgatctcatgttttaaattcgtaataaattaatgtatgtcactacagttctgtatatatttataaattcccacattctaattatatgatatatacttcgagctagtgattcatattcgtaataaatgaatggatgatgtgctagttagtatacggattactctgctgaaattgatgattaattgagttgcgtcaatatttatttttacttacgttttttttagcaattttttagatatataaatatatgtcattaaaactcgggactacgtacgcaacgagtcaactgattttgtaggacagacagaggtgcaaacaattttaatagtatagttggggtaagttttagatcacatgggtttaatttcggaagcaatcatcgtacggaaacgtaaaacttggtccccatacgaaaattacattaaagtatagcaaatgtacgattataagtgtcaactcttcaactagtcacggggtcaaatacaaccatgtgtgaattgtttgtttgtcttttgatacatattttaaacgaatatattaatgcttttagtttcctttcacacaaatatttactatgtactagtcagtgattttagaaccttttagctcgtgcaacaatactgtatctcagaagactaatggtgagaaacatatcctaagcccaaaaatgtactaaattgtggctatataagtgggccttgttgctatgaattatatcatctccgacattggaaaacaaaacatcgagacagaaaaaacttgttacttagaaaaagaaaagaaaagaatgatcaactattgtaaactttccttgttcatctaaactttcatggggagttttggcaaagtcatgcacgagagttccaagctttgcgcattttttgggaaagatacattgttgcattaatagctcctgcagccaagaaaccagacacagcttgtcttccgcttgaaaccattacccttctcctcatgactttctccatacatttcgctgcttcttctctcgaacttatacaaacttctcccataactctacctgtacatatataccagttttgccatcaaaaatcaataattatgaatccatttcctgctataggatcagagagatcagagttgataccggtctcgctcacgaatttcttctccccgagtgacttccccatttggcttctcactgatgcaggaagagaagagaccagagaacgtgttgctgaaaggctagaatcctgctcacaagttgagaaggattgatataagaacaatctcaagattgagttaatatccatggtgatggagctataatctgtgtatacctgaactaatttagtgtgactagcttcagccgatgagaatctcaataagtttttggtctcgcactcttcaagaaaaggcttatacatcgactggaaaagatcaaattgtcccttcacaatcttgttcacctaaagggaaaggattgaatcaatggatcagaaatacttttcaccgaaaaaagtaaagcaacttccatgttatgaaaccaattttaccaatatgatgtaatcaagaacatgactgggttctctctcaccttattagtgtcctctgcaaaaaacatgcgcaagtctcccatgtaagaaaggctgcatattttggcgtatagatcttcctgcgccagagttccgtgagttatagtgtgcagtctagtgaaacttcaaggtttctgagtgagcagtgaacagaaaaccaacctcggtgaatttcgatggcaagagaagaagagctgcagatattgcagctctcttattaacagaattcacatcctctatgtccagattatcaacaagcatatgaacctgcaaccaaaggcactttcctaaaacatctcatgatttacagttattactaagaacaccaagcaactgacatacaggtttttgtaaacggccactcaagtagaacctcttccagtccagtatgtcctgtactaggtcatgcatccgaacaactccatacttgagcttctgcaaatagcttcacaaagaaggtaaatcatgcaagaaagatggcttaagattacatacaatgctatcatcctgagcagaatgaaaacatatgaaaatataattaacaaacttagattgttcattaggttttaaacaactctacagttttgggaaatttcttaccctgtcgttccagttgacaaacggattgaagtgaactccaactcctactttatcggcaacatttgtaatctattctcaaattaaagagaaactgtgagttcagtatttgattaagcccgtataagcaatgcaagaatatggtatatagagagtaaatatataccagcctagctccaccaaggtgaaccatccatgaagcatagtgatctgaattcattttcagattcttgtgtcatacaaaagaaaaatactaattaggaaccgtgagcttttaaatagctcctggtctaacaattataatcaaaagagataataatgctcaccgcagaatgccattttataggatcagagactccaaggatatagtccaccatcttagactgcacaaaagcaaaggtcacatttttacagtcaattagcaaacaggaaagatcatcacagagagttttcatgagaagataaaaaaaaaaaagaccttatcttggttatttgggtgcaatgttgaaccataaacacaacagaaatccacaggaggaagaacacttaagaagctcgaaagctcatctttttgagtagtttccattcagacaaaaataacccttgtaatgtattcaactgggcagacctattcagatgaagaaacgtaataaaaaggttgcttctgatagattggtcaaatttgatttcgagtaatctaattaaagtttctacaattaagttcatgatcatttgatcattttgatttcagattgacacaaaccttggaaaaaaggagaggaacgaagccagaggaggaattaggaagcgttagttgatttaagaggggaattgaagaagcttacctgcgactgcgagtgaaggcggcgaagagcgaggaagaacaacaaacgccgtgaagctagcttttttgggtttgggccaaacgagattagtttctaacagatgtttttccggacccggaccggtaatacccacgatccgcttaattatttggtccctgtctagctctaaaatcccggtgcaaacgaaccggcaaaaccaacgacctagcggttcggtattttgtttctgaaatctgaaccctccgatttgttcttctttttttttttctttttataatgcaaacaattgatgaaaaaatatattatggtccgaatggtaacctcggtttttaatatgtgagaaaagtggtataacattgcagtacagttcaattacggtacgtgcgagaaaaatatatttgcgggacaaatatggtttgtacaaaataagcggtacagaataatgtttgattgatgaaaaaattatttgcggtgcggattataaattatatatatatatatatattaataattaattattatttttgtgttaataaataagcaataacatatatttataaattattaatacataaataaatcaaaatatacatttttaaagtttaacatacatattattaaattcgttgaatagtttcatcataaaaaattgaaaaaaaaatcataattttttactagtaaattgattatagaacttatataagcttatagtggataataattgtcaaaatttctataagtattatgatatttctatttcttgtaattacattttcttagattttaattaaataaaaagaataaaactataattattgcatatatatatatatatatatatatatatatatatatatattaaagtccattagttaagcaaattgttatgtcctacgtatatttttttcttttatgcactaggtaactagtgattctgatgcacacatatactctctttttttgtacatatatttaaatggggaagctaatggaaaaaaaattaaaatttgcttaagtaatggagtaataaacgagggatgtgtgtatggaagaggcaaaggctgagaaacttttggttgggacgtaggacataacaatttgcttaagtaatggagtaatgaacgatttttttgttggaatgcggttttgagcaaaaacactaggtaaatgatttttcttcttttgaaaagcattccagtgtattgtttttaggacaaaattgcaaacttttttcttttttttttcgaaaaacgcaaatttgttaaaagtattgattggtaactgtattgtagttttaataaaaaaacaagaaaacgccttttgtatgtttcttaatcacagtgtatgaatggtgacatagaccgcccccaaaaccgtaccgtaactgtaacagtataaaaaatctctatatatacatatatatctatgtatttttgttattatttgaaccgtcccatactttttccgtatcacaaaatacagtcatcattcgaaccgcaaaactatatatagtatttcggtttttgaattcaaaatgaaggagaagaggaataggcagattaatataatttcgttatttctttttaatttcctatcttcaatttttcctcacccactgaatttgactatgccattaaaaatgtgtatactaatcatcataccgtcaataaatagagtttgtgggaaacacacgacagacacgtcatcagctctcgacggcgcgtttccatgcctttattatccttcacgttgaccccacatgcccctgttttttttttttggtgttctacggtatatttttgtgaaaatgttacttttcatctactcgataaaattcttaaacagatagtacaactttttacccgattaatctgtagaaaatacaatgttatttacactcaacaaacatttccattaatagaactttacccgatttaaaccactcttccactcgattaatattattattttattaattaaagatacgatgacgtgtccatgagagatgagctttagtggcacgcaacgtaagagaagaagacaaaagtaaaaaagagaaaggcacatgtcgaactcacgtgtccacttaaacgcaccaccttcttctgtgctctccacgcgcctccacacgccctcctcaacttcggaccttcttcctccaaaaaaaacaatttcactcttcattttctcagattctcttattatttcttctactcgtttcgaatcctaatcgtctacagtttccgacgagattctcaccggagaaagaaaggtagttcttttctctgaatctgttgtgttgagaacttagccgtaatttttgagaattattcttcactatttgatttgacaagaatatgggtaataaagacagaatctaaaacacttgcttcagtttttgaggaatcaaaaatcacacgaaagttttttttttttttctgctcctatgtttcttggtgcgtttgtgtttatttgacattaggagtgattgattgattataaagatgaatgatttgttagattcattaagatcactgttctttttgattaatcatcttatgtctaaattttaggtgacttgacagagaatcttgttctgtaataaaagcaaagatggtatcgaaaactccttctacatcgtctgatgaagcaaatgctactgcagatgaaaggtgattcttaaggagacaattcttggaaatagattatggaaccttttatttttatttatggggattgattatgtttggtgtataaaacagatgtagaaaaggtaaagtaccgaaaaggatcaacaaggccgttcgtgagaggcttaagcgtgagcatttgaatgagcttttcattgaattagccgatactcttggtaaatttctcatctttccgtagatttgaatgaacaattgctcgagtgtgttgtgatattttgaatgtgattgtgatatctaactgtgaacatgtttctttgttgcagaactgaatcaacagaacagtgggaaagcttctatactatgcgaagctactcgattcttgaaggacgtgtttggtcaaattgagtctcttagaaaggagcatgcttctctcctatctgaatctagctatgtaagtcaatttctatatgcacattgattgtgtttatgtattctgtgacgtgaatcaacaactaagacgaatgttgcttcaagaagttacttcatctttgtatttttctaaatggtcttgttgatggaaactggtgttgtgtgtaggtaaccacagagaagaatgagctcaaggaagaaacatcagtgcttgagactgagatttcgaaactacaaaacgagattgaagctagagcgaatcagtcgaaacctgacttgaacacctctcctgcacccgagtaccatcatcatcattatcaacaacaacatcctgaacgtgtatctcagttcccaggacttcccattttccaaggccccggctttcaacaatctgctacaactcttcatcctcctgcaacagttcttgtccttccaatacaacctgatccccagacacaagatatctcagaaatgactcaagcgcagcagcctttgatgtttaatagctcaaatgtgagtaagccatgtccaaggtatgctagcgcggctgactcgtggtcttctcggctacttggagagcggctgaaagccagtgaatgaggtcttgaacggctccacatggagtagcaacgcaagttataagacatggcaacttatgaaggactctggttttgtattttttaatacatcgttctgatgtccttgtgggtttggccttggctatttcttgtttttgatggttgttcataggatcaggaagttatggccttgatgggtcgtttgagataaataagtaaattagctctaaccattgtcattttcttttgtcttaagattctaaaaacacagaaacagaacaaaaaaaatcaaatttctttttaagaaaaaagctttctaatggaaactaaaatgtgaaattgggtttaaaagacaaaaccggttaataggttttggtttggattggataaagaatatgatggtattttggtaaaataggcacttgagaaaaagagaagtgagaggagccatcttatctttgctatcgagtgggtaagaagaatcagaaaacagaaaatggcgaattcactatgcttcttctcttctcctcctaccttttgcttccaatctccaagcaaaaaccctaaaccttctcacttcttctcaactaatgataacacctcttccttggtacagaagagagaactgcttcagacttcaagatcccaaagttttgaagttaaggttagaattttcccaaactcttctcttctctataaaatttgcttacttcattgaccatttcgttaatgcaaaatctcattctgtggtatcaataggccgcaaacaataatcctcagggcactaaaccaaacagtttagtttgtgcaaattgtgaaggggaaggtaagttcttacctgttttataattctcttagttttctactcctgaattggttagtaatttgataaagatgttttttcaaaggttgtgtggcatgttctcaatgcaaaggaggtggtgtgaatttgattgatcatttcaatggtcagtttaaagctggtgcactctgttggctttgcaggtttgctacatcttatattctttcttctaattcttccttctccacaacacatacataaactcattacttaatatatatttttacatttcttgtgggcagaggtaaaaaggaggtgttgtgtggggactgcaatggagctggtttcattggtgggttcttgagcaccttcgatgagtagtagaaataagcttcttccaagaagactggatttgattacatggactcaaaaaacactcttttataaaccttagaagaagtaaatctttctctctatcaatgctcttctttaccaaaaacatgtattactatttgttattgcacaccaaacttttgttgtatttttgtttttcagattcttctctctctctctctcgttttttgtcttctacaaattgctaaaagtctatagcacctctatggtagtcttgttgatggcttgaaatgttgaatggtttagagaagaattaatcaaagttttgttctattcatttacattgaaagagaatgttttatatcatcctagtatctatctatatgatattagaatttttattttattttgatatatttgataaaataagatggataaaactgaaaaaacattgcacctgaaaaaaggagaagaaatggaaacaactgtaaataacagataaacgcatctgagaccaacaaaaggagaagacacagaccttttttctcttatctgttgttgttgttgtcgtcgtcgctgggtcagaatcttgttgttatgtttttctttattctctcgctccacgtttcaaatccaacacaaagatctgtctgattctcgggagagtcaagtcagaaacctaacgagggatattagttcgtctaaattgctccaagctcaacatatgtttgttccgtaatttcaataggattcgatttgttccacaaaaatatattttcgcattgtggcgtgcggaacaaggaactaggtgcgtttctctatgatttttgatcatcaatcctgttttgtgtaatccgcattgtagatgatttggttatttctatatttcaagggaaaaatgatgaatgcaaatgcgattccataggagaaagcagaagtagttattagacgtcttgatgaggttttcgattcgaaagcttaggtaaagaacctctttggatatcaaaggcaaaaggggttttattatatggggcgagcattgggattatctggtgctcaaaacttggaatggcttgtttccagagaagtgttcccacagatagggagaatgagcaggtttgttccaaactctcttagtaaagatcatcttcaattcctaaagtttgattcttttggcataaaacttggttcaggcgatagcaattctgaagaaaggggcttatcttttgaaatacggccgccgtgggaagcctaaattctacccttttcggctttcaagtgtactaattcataaccttcagtcacagtttatttcaaagctgaagattgtgatttgatagtggttttctcaaaacttttgcaggatgaaatatatttgttatggtattgtggtaaaaaggagaaacgtcttaaactgagttctgtgacaaggatcatacctggacagcgaactgtaagttaaaatgtatgaatcattttatctggtaactgttttgctgcagatttctgaacagaagaatgttattgtaagaacttttccaggcggttttccgacgatatcctcaacccaccaaggaatatcaatccttttctcttatatatggcgaacggtctctcgatttggttagtagtttcctccctgtagtctttttcttgttgttccctgacatgtattattccacaggcattagctgtcttctgaagaccacatgcaatctccattgctacatcaatctctaacaagttcttactcgttgataggtatgcaaggacaaggatgaagctgagttctggctcactacccttcgcgctcttctctcacgaaacaactcttctgcattggtacttcactcaagaagccgtagtcttgctcctgaaaatggagaacaaagtagttcgagccagaactcgaagtccaacatcagatctgtcagcagtgacacaagctatgaggttttgttggttgttttctttcttcatgatagcaccatcgggttgtttcctacttattatcttcctgtctcacctggcacttttgcaggaacatgcaaaaaaggcctcaggatctcactgcaacactccacagagactggggaaagttttctcagaggttctgtcacaaactgcagtactaaaggcactctctttggacgaactggttcataaacctcatacttcgcctccagagactatcgagaatcgaccaacaaatcactcctcccctggcgttgatacaagtaaatatagcatttccagcgcagtgagttcatctagtcaaggatcaacttttgaagacttgaagtctctctgtgatgtctttgtttggggagaaagtattggagatgggctattaggaggtggtatgcacaaaagtggcagcagctcttctctgatgactgattcttttttacccaaagtcttgaaatcacatgtggcacttgatgcacagagcatttcttgcggtaccaattatgcagtgttagtaacaaagcagggacagatgtacagctggggagaagaatctggtggcaggttaggacatggagtttgttcctatgttccacacccaaaacttattgatgaatttaacggatcaacggtggagttagctgactgtggggaatttcatacatgtgctgtaacagcctcaggggatctatatgcttggggtgatggagatcacaatgccggtctccttggacttggtagtggagctagccactggaaaccggtacgaattctcggtcagatggaaggtatatatgtaaaagctatatcttgcggaccttggcatacagcgtttgtaacatcagaaggtaagctgtttacatttggtgatggtacttttggtgcgcttggacatggtgatcgtattagcacaaacatacctagagaagtcgaggcattaaatggctgcagaacaataaaggcagcttgtggcgtttggcattcagctgctgttgtcagtgttttcggtgaggccacatcatcagggaagctttttacttggggcgatggagatgatgggagactcggacatggtgatatagagtgtagactaatcccatcttgtgtaactgaactggatacaactagctttcaacaggtggcttgtggccagagcattactgttgctctctctatgtctggacaagtttatgcaatgggaactgctgatccgagtcatgatattgtgagagctccttcttgcattgaagggggtctaggaaagagtttcgtccaagaagtggcttgcgggtttcaccatatcgcagttttgaactcgaaagctgaggtctacacttggggcaaaggatcaaacggacagctcgggcacggagacactgaatatagatgcatgccgactcttgtgaaagctttgaaaggtaaacaggtgagaaaagtggtgtgtggttctaattacacagcaaccatttgtcttcacaaacccattacgggtaccgatagtactaagtgctccggttgtcgccatccttttaactacatgaggaagcttcacaactgttacaactgcgggagtgttttctgtaattcttgcacaagtaaaaaatccttagcagcagccatggctcccaagacgaacaggccttaccgtgtctgtgatgactgttatatcaaactcgaaggaattagagaatctttagcaacacctgcaaatagtgccaggttttcaaacgcaagtctaccatctagctacgagatggatgaaattggtataacaccgcagcgtcagcttctaagagtggattcatttgatttcttcagacaaactaagcacgcggacctgaaaaccattggtgaaacttcaggaggaagctgcacgtcttcgattcactcaaacatggatattaaaggtagtttcaacctgaaaggcatacgacgactctctaggcttacttcttttgattcagttcaagaagaaggcaaacaacgtaccaagcattgcgcttcgaaatccgacacatcctctcttataagacactcggtgacttgtggtctaccgttttcacgtagaggttctgttgagttgtttcctttatcgataaaatccagccccgttgaatccgttgcgactacttcagacttcaccacagacattactgatcatgagttactacaagaagtgccaaagaaatccaaccagtgcctaagccatgaaatatcagtactcaaagcacaggttagtccaatccaaccatttagcccctattgaatcaaaatgtattgtaaaagaagacaagtaaaaagcttttaatactcaggtggaagagcttactctaaaatcgaagaaactagaaaccgaacttggaaagacttcgaagaagcttgaagttgcggtactaatggcgcgagatgatgcagagaagatcaaatcttcagaagagatagtcagatccttaactctgcaggtacgtacatactcattgctattcaaatatgctacttaagctccggtaatgtagatttcagtcttattctcttcatacagttgatgaacacaaccaagaaagaagtagacaagacaaggagacaccgaaactcgttttgatataaaccttttgaactataatttgatcaaagtaagtgaatagaatgtaaaatacaagaagaaaagatttctcttttatcaaaattacataccgaaaacaaatcaatgtagtagttacttacaaaggaaagctcacaacacatacacacatttatgaattcgaaattgacaaaacagagaaataagaaaaaagttccaacctttatgattggtttagtgaaatatcaacaaaagcttcttcatttgactaacaatggccaaactaatactcatcatctgattagccatctccatctttttcttgatctcattacccacaattgttcccatttcttcaattccatcggaacaagtctcaccgtcagtcatggcggcgctgatccaagtcttaacatctccgacgacttcttccgtcaaccaattattcccacctttcttcttctttctctcgatctctgtaatcgaatcgttgagttgactcaacgcgtcggtgtaaagcttcacacaatcaccaaccgccgcgtcctcaggcatatcgttgattgatcggaaagagatagagaggtttgagatctctttagcagcgactcgaagagaaagctcgaggattgattcagggttaagctttgaatcagattcgttgagagaagatgatagagagttgaaacaggtctctgggtaacgagtcacggagcatagtgacttgagagaggcggaggagataggtggatggtgtggaggagagtgagtgaaagctccggcggttaaagcgacgacggagaggattaagaggagagatacgacggagccggtggcgattagggttttacgggaaaatgatgatggttttggaagtggagaatgatgatgatgatggatttggttttcttggtcggatactttgtcgtagcctttcaaggtgttgattgattccattgaagggtaatggttttttgatcgaaggaaatttgaagaagatgaatctgtgattttgggagagaaaaagtcaacaggaagaagttgaaatgtgaagctttgttgcatttaagagcaatcccaatggtttagaaccaattggttcttaattttcaatcttagccttattttaaattaaaatgttgtttttactaagttaagaaaagttagaaaaaaacttaactaatttccactccaatgattaggaactattgggttcttaagaaacaaaaatttaaattattccaaaacaatgtcttataatacaagcaattacacaaaatgtttataatacaattcaaattattgaggacttccaactaggcaactacacaagatgcttgctccttgatttttctgtctagacaaagaatctctgcctccacgatggctaattcttgaaagagctcagaaaactgttgaacaataaaatctcatcattgtttgatcattaagaaataattaacattatgtgtgattatgtctattggtattgcctgaggtggaagaaacaatgaggagagacttgggagagaaacaatagagccatcaaaagcagctcgtaaagttctagtcactgcttcttcttcctctagtctctctttaagatgcatcacctgcataaacacaaacattcaaattattggtatagagattttgagttaggaacagaggtgcttactccttcctctaagtcatgtctcttgttactatgtagctgtgatgaatcttccatgagtagttcctcaaatttcatgagtttcagagaaacataagaagaaggaaacgggtctaagtagagaaagataatgattagagtgaaacgtgggagccattaaaagggtcggttcggagtactaaaacagttattgacttttgttttttggtcacttgaagttgttaagaagagataatgtaagtcacatgagacttgccggaataacggcggatcagattctgataaaaagagaatctctgcaaaatgatgtaaagatattacatgtctcagcttttgatcgtgtaaaatcagattgggagggtttgtttgttttacctttcttctaccaccggcatgtgatgtaactaggccaacaagaattccaccaagagcattgcttattactgggacctataagaacattcacagtgcagacataattgtttttctatcaacataatcgatttaggatattgagagatagtttcttaccagtgttaaagcagttcagccataaaagaagccatgtctttgtgtgttcttgtaatccatcctttagtctagctgttgcagaggaaatatatgattgtggtgaatgtgaattaacaaggatcacaaaacaataaaaacatacttcaatttctgtttattgtaccttggaaagaagactgactagtttctgttactaaggtcaccaagggaacaagaatgacatgacaatgatcagcaaggaaatataaattagactaaacatgaaagaagagctgtcatactatcaatcgctagaagctttacttataaacttacaggaggaatacttaaacaaaaaggaaaactcaaagctagcataagttaaaccgaattcattcattttaaaaactgattaacatgctcaagcattacaaagatgaaataacaaaaacaaaaagaagactaaattatgacacatgaaactaaaatgttgcaacagagagtgaattgaaactatgagtttgacaacatctcattgattaatttgttcttgagagccacttctatatcagtaagtggctctttttttgtgaagagagattccagcaatttggtccttgataatctttcttgcttttcaaaatcctccttctcttgctctcgatccttctgccttagctcccaatccttctgctttatctcccaaatagactgaatctccaacatcacattccctttgtcttccacagttgttgtcttactcacagccttttttgctttcgcctttgcagctttaacaccaataggacgagacattgcttcttctgcttcatgggtttgtggctgggaggttgaagccttgtcagactttcttcttttggacattacagttgctttagtagaaggagcagagagccatttctgttcaaagcgaagcactctccaagcatgctcaagggtgaacttaccatgttcgctgttgtagatttcatgtgctaatgcaacgacatcatcgtcattctgtccactagatttctgctttgttgcagcttcatagctccctacaaacttgcctacaccttcattgatcttagtccacctctgctttatgtgacctgtctctctcttttccacaccgttgagctttggacttgctccgtaataggcagcaatacgtgaccaaaaggcataacccttttgttcattgcctattactgcatctttacttgtgttgagccaagcactgacaagcaccaagtcttcaccggcagaccatttccttctctctcttttcaccttaggtgtgtgtgcagcttggtttggagaaacatcatcatcatacggattggtttctaaattgtgagcctcttgttgactagttaagaggttcatgaagcttgatccatgactatatggatccatagactagttctctggttggtgtaagaaggagcgggaaagattgtttttggtgtgtgtttctagtgtgtttctggttaggtgtttaaataacaagaacaagagttaatagtgtctggtaataatatctggttggtgtttaaaagttaatggtgtctgttttaagtgtgacatgacaatcaactaccaagtatcaaccacataccgacaacaagcattcaataaaagccatatatagtcatctaatataattcatgaaaagtcagaggttcaaagatataaggttaagattgttttaccttctatgagccttccattcggtaattgtatccaattcttacacaacagacatcaatcattctagcaactgtatccacttctccatttaacctcaacaaaaacagcataacaaaaacaagtgttatgtcatgaacgtaagacacaataaatctacaatcaaatacaaaacaagtctgtaatcaaatacaaaacaaatctgcaatcaaacataagataaatttacgataacaagcaaacatatatgtacttaaccaacataaaactgtaatcaatcaaaataaatctgtaagcaaattgataaaattaaatctgagtgtactaataaacaaaattgcaaacaaatccaacgacaaaatcctagttctacgaacggcaaacgacggcaaatcccaagaaatagcagcaatcaaaggaagacaagacaaaataaaattgtaacaaaaaaaaatacagattcgttggaaaagacaactccatgagaacagagaattggacagcaacctatgagaactaattttcctatcatcaattcccaattgtgaaaacccctaatttctgaaacaaatataaaccctaatttactatctacaactgaaaacaaagagaaataacacagatttgtaccatttatcatgcagatgatgataatagcggctcaaacaagtaattatgacttgcaactctctcaattcgaaggatgaaatgttggagagattttgccggcagaagcgagagataaatatcatgatggagaagaacaagaaagagagagagagagatgaatatcacgatggagaagaacaagaaagagagagatcgtcggattacaatggtcgccggcgtcttgagagagatggagagaaagagagaggaaaaacagaaagagaaacacgagtgtttttttgtttcctccttttatttattttttctacccactcaaaacacaacatgtgtactcttcttagttttaagaaaatatcttaattaagatgtttatcttagctaagatttgttgatctcattaaatttaatcacttttatacttaagaattagctaagaattgtctaagaaccaaggttggagttgctctaaagtcacaacgtatttctgacttccacgtcttctatctatttacaatttacaaaatcaatcaagcttttcaaatgcggtttaaaattgattaaatcatagttttagatcacataatctaaatcaaatttatgcttgtattttcatttgattttgacagaaaccaaaattttggaaatgaaaattgcaaacaacaattacataacaaaagaactgttatggttttgctgttctttttgggcaaactagttatattgatagaagaacaaacttgaagtagcagacaagtagagagtgcagttttagccaaaacgttagctaaccgattagacttgcaggaaacaaaagagaacttgatatgaaaaaaaaaacgactaagaaaggcaatatcgtggagaatcccttgtagattgttcgtagaggtctttgtatttagcagagatataaagacttgagagtcggagaaaacgttgatggaggtcaattccattctagtcgctgcgatcaacactgatttcatagctaaagccgaggtgagtgtgtgcgtgttgcagctccatggtggaagactcgattgttctaagttttgaaaagccaccccattccgcacaaacctgcatttgcagtctagaccgtatcaataaagcaagaaacaacctctctaggagataagatatgtatggaatcctccgtacaaggaagaaagatcaaagaaaccttagtaataaaaaaactgcatggatctggatttttggtgtcaacatcctccattacatgtattctgtatatttctcaacaaccttgaaataatgaaattttcaaattggattttattaatttgagtgaaagactactaacaaaaagttcttatccacctttatcaaattttctccattgttatgtaatccaaataaacattgtcctgcgtacaacgcatcaagaacgtatgaaatcaatattgcaatttgcaattgtattagcttaatgaaaaccaaatttggtgaggattatattttgaaatattgtggtttaatgaaaacccgtaaatcttgacaaaaaaacaaaacaaaaaaatgagaacccgtaaataaacgttgtataagtaaacgtggcattatattttagtagatttacgggtttgagatattttggttgaggtttactatatcatttaaattgggattctatactaaatttggtgatttgaatttaaaaatctttcaagaaatctatcaaaaatattctcatataatatgagtatttgtttttttttgtaaaagtgttggtcatatagaattaaataattaaaaattggccatctttccagttgccgttgccagccgtttcctacttgtgctttttcacttttccgttctctcaaaccttttttctctgcttccgtttcgtttctccgttcaaaacaagatcgaatcataaaaagtttcctcctttttttcttctcgaaacaaaagagaattcttgacgtcttctactccattttccatcaatacccatttcttctatcgctctcgtttccaagaaaaaagagggttttagagagaagcaaaactcaaatggcgacgaacatcggaatgatggatagtgcatacttcgtcggaagaaacgagattctgacttggattaatgatcgtcttcacctcaatctctctcgcgtcgaagaggtacttcttgcttgttggggttttgtgttctatatcttgcatgagtgctttctctaattcttctatggtaatgtttgatttgggaattagggttttgaacttccaaggaattgtagatttgggtttgatttgtttcaattggctaatgagatttgtaagttaatgttgagttgagtctaatgagagtagacaaagggctttaggctttggcattgtatgattgcttacttgttttgattgttataatgtcatagattcactgttgtagggatctaaagagttctactagttttgtattgaactactgttcttgaatgaaaattttgtgtcactcttgtctttgttctaagtaaacaattatggattttgctaggctgcatctggtgctgtgcaatgtcagatgcttgatatgacatttccaggagttgtgccaatgcacaaggtgattttgtcacttttatatttatctaatcttacgatcattactttgcttcttggtgactgaatatctgaaattatcctctgcaaggttaactttgatgcaaagaacgagtacgatatgatacaaaactacaaggtcttgcaagatgtgttcaacaagctgaaaattacaaaggtaaatcaatcatctctcgatgtatcgtgttcttgtgatacctgtgtgctgtgtatatagagatttctgaccttgtttgtcttactgagaaaacacctcagccattggaaattaacaggcttgtcaaaggccggccactggataacttggagtttctgcaatggctgaaacgtttctgtgattccattaatggtggcattatgaatgagtatgtcagattttttgtatttgctaatcgacctctattgttttccaaacaattaagtttgtaaaatgtatggtctcttataggaactataatccagtggagcgaagatcaagaaatggtaaagagaggagtgtgaagggatctaataagattccaaagtcactgcaaacaaacaataaccatcctccacccaattccagttcagttggtcttagcaaagcatcaggtctgccatttgataaacagatttttctatgcaaacaataataattcttgattgcatttttcttaacatgttggtatcatcataattctcagggcccaagtcagcaaaagcagctgaagtgcaggctttgtcgaaggaggtacattgacatagagaccatcgctcttagttttcacctatcctctaatgaacgaaacatccatcatatgtcatatataatcctttttcatcttctgtgatacagctcgtggatctcaagatctctactgatctcttggaaaaagaaagagacttttacttctccaagctccgggatgtagagatactctgccaaactcctgagctagatgatcttccggtaaacgtttccgtagagcctgttcttttttttttttttaatcttgtttaagtgtaccttgcatggtatagccaccaacttcactatttagctccaagacaagttttccaatagtctagaaccagaatttagtttaccggctgttataagtacacataccgttcttagaattaagaggaagataaagagctcttaccaatgaactcctcatagcaccaccagatttcatcagcgaccgcattttatgtttttcatcatatgaactcaactttatgaacataattttgtttgaatctgatatatatgcttccctggaatgcagatagtggtagcagtgaagaagatactgtatgcaaccgatgcaaatgaatctgcattagaagacgctcaagagtacctaaaccagtccctaggagttgaagatgatgaagctgaaggaaacggagaacaactggaagaagaaaagactcaagcctaagctctgactattaacaatcctaagtagaagggtgacgaacaatggctggccatggccttctcttccaagtttcttttgtgaaaggaaactaactgaaacttgaagatgaatgagcttcttctattagaaagattagtttgaaaacaaagagacttatttttgttactattcaagaggcttttttcttgttttaaaacaatactttgacccaaagtgagaatttaagtgtcggtgcttcctttttgttttgtttctctattaactcatgaatcattaatttaagacgaaacagaaccagagctggttagttcaatttcaattaaaaatccaaagttgtgtgttatatcttaatccacaaataaatgaaatgatctcacctatgaatgtaccttcgtatgagatattgatttgctgaaaaatatctaactaagagaacactctactcttcgctaccttcttggcttcggcttcactcaaatatcgaattctattctcacgtagccacttatcgcctctactcagaccgtccttcacttgcttctcttccatcttcagaagcgtaagcccctcacttagtttaggaaagaaaccttcgggtctaacacaccacgtccggaaaaccccatatagaacctccatgtctacttttaacctttcgactccatcattggtaaacttcacgttcgccatcaagatgctgttgaagaacaacttgtctatctctgaggctagagttctccacatagcggtaaagtctgctttgtttagattttcttctattatagacgtttttccttgcaagtagtctagagccccaactagtgcccttgacaccgtccattctttgtctttcttctcctgccattgctttctgttttttatgtattctcggattcgagcatcaaagcctctcaagatcaccaccgacaatttgtttatccactctagccggaacttctccaacttttcaaattcttctccgaaaataccttcagaaggttcagtaaagttctccagtcctggaacttcctgtggatcgtgctgtccagttcccatttcaaggaaaaagacatcctcagaccattcttctaagacagattcaatgtagtgaccagcattaatagagttcgagaccttgattagatcgttattttcagttaatgcagttagtccgtcggcgtcttggcacctgagaaggaggcaatccaagaacttatgaattgttggtgaggctgccagtctcaggaacctagccctcaaatataaggccggcactgatttggatcgttcgattattgatgacaaatgctgtagaaagatgctggaaatgattggtggtctgtaaacgttggaactggagatgagttcgtcttggaccttcgctgtccaatttctgtcgttatcaatctcctccttgaatttgacgagcctctcatctagctctatctctgcccataaatcaagccaatcaggtctgtcacagaaaactgagagagaggaaattctcaaaagattcccatcttcttgaagcgaaagtattcctgattgtgataccaaagactgaactcgcttatcaaaggagatcatcaggtcaatgagatggagccacgagaccttagcctcagaacgaagatcagtttcatttgcttcgtctagctgaccaacatatataggaaagatctctttcaccaagtacaaagacagtgagcttaccatagccgaaacccactcttctcggcaactgtacccagctagttttgcttcatccacaagcggttgtaacaactcatccatagaatcgacatagtcccttgtgattttatacacaagggcaaaaatgaattctggcttttcactccactttgtaaaatgtcgctgagatgcaactgtcagagggttgaccagctcttcaatagcccagagtggctggtggaaaagaacattttctcccttatggatcccaagctgccgcgactttctttgcaactgtaacccctgcaggctacacaaggcatgaaaacttccacagtattgacttttgaggctcccttccatgttgaaaagcggattttgaacattttctgactttgaatcaagacttgccgaagttagtgtagaaagctgaggtggccatcgaagagaagaaagcaacgctctgtaatcagcaattgcctgaggtctcatcatagctaaagctctatcaactctatgatcaacagcagaaacaagacgtgcccaccgaggatgtctctttgctactgaactcagtatctcttctgtcgttttaagtgttttaatagcatgtagacgcacttcctgaaatcagtaaaaacttagaacattgaaccacacacactggctaaaactacggaacagtctaagctgaagacagtgtgcttacttcaaaaccacttgaccgagatgttcttaagtttttattcaaagaagacatcacagcatcctcaatatcaccaactaaagtgtcaagttttagtgcagtctctgaaacatagagaaagatcttaaaatgttgaataccacagtgaccaaactaagaaagaaggttggtaactccaactttgggactaactaatcccgatcaacatcgataacaccaaatcataaaatagagctagtctttatcagaaagcagccatcaaatacaaaacgccttaacaccaaacataccagcataagcacgcacagactcaacttgtgctacttcctttgctaatgaaggaagatcctctccggctacatgctccgtcgcctcctcctcctttccgctatctgaatgaattaaacaattatcaaattctcaaattataacgggaatatattcaatcttccatcaccaggactgaatttacatatttgactacaacatttcaagaacataatctacatccagaagaatcgtgatgaaatcatacgaacctgacgcggagcgagtaacggaggtagaagaagagagatcagccaatttggcattaacctcgaaaaatagaccaccgacgcgatcggaaaacgaagcgtaagcagcgagacctgactcgagctggcgatttaatccggccaatctctgatccaattcggaaatctccgtctgtaactcggaaaccagacccgtagaatgagagagatccgtggattctttgaatctgccatcgagaaagctaaataccgaagcggagaagctcgagacctgtggaagtggtttgatcgcctccatttgcgattcgtcgtggcctcagtttcatcaagaacaatgaaaaattgaaatttcgttggaagaagatactgagtcaatgactcggagtgttaacgagttgcgagttttggtaactcggattaatgggccctggttaagcccacaaaaatgtttttaacatatcaagtaaattaaaactgtaatggcattctcaaagaaatgacattcttttatcggaaaattatcactaaaatctccaacttttatttgaaaacatttgtttaaattctcaacatccaacgaaacgaaataaatatcaaatttatgttgatttttctaataaatatcaaacttatgtgactttcttaataaatacaaaatatttgctaatggtcatattagacatgatgttaagtagattaacagattccgttaacaaaattaattttttattaacatacccgttaattcaaaacattattgctttctataacaacaaaacgttattgttttctataacaacaaagcgaaaaaaaaacaaaaaaaaaacaaagtgacgtcgagcaaaatctccaaattcaatcaatcatggatccccaaatcgagcaaaatctttaaccttaaattcctatatgacttgaaattaaaaatttaattgacccgttatgacaaaaagacgatgttttattcttagagagaacgttgtcattttcaattaacgagtctattaagagaaaatgaactttgatagcaggatttgttatcccacttaacggtatgtctaatatggctatatcaacaaaattttattatttatttggaaagtcaataaaagtttggtattttacagtatttgaaaaatcgacagaaatttgatatttattttgtttcgtggaaaattgaggatttaaattaacgttttaaacaatttgaggattttgatgacattgtttccattcttttaagccaaattaggataattaatcaatggaatcgcaccagcaaactcaggattagtattttgcatgcatttcatataaaaccgagagtgtgatgtacacgcgcatgtatatttaagtacatatgattcctaaaataaacaataaatttcgagttgtctaaggaaatgtgtagtattgagtctcgtacatatttgtatatataaatcatcttacacaataacatagaagcgaatcattgagacagaaaccatatggcaaagagatctccgtaatctttcttggaattc

SEQ ID NO: 1065 - DNA, 96679 bp, Arabidopsis thaliana
aagctttgtgattaaatgtgttctatttctggcagaaaaccagtgtcaaggaacttgacttagaggctgcattgaccgagcgccaggtttaaattctcttccctacttgtcgtcaccaatttcctttaacccactgctacggaaatattctcgtttgtatttgtttatttttaatagatttccacttcacactgtcttggtaactccgattgtcgtcacagttccattttaaggctttgcactttgtaattgacacattgttgtatgaatcttttatactgatagtggttaataactcaatactctcctgttgtcttgtgcagcaccacaataaactaatgatggaagctaaagcaagaggagaaggatacaaaattgacaagctcagacgaaatatagagatggacgagtatgatttcttacactggcgccgatctttggaggaaagagaagcattgctcagagatatcagctcgtaagtaaaaaaaagttcactttgatgtttttcaaagaaagtgtttagatgaagaagatttattttgcagtcggcaagcacttggtttaccattggaggaaccagggaggtacaagccaggaagcttctttgggaaagaccagtacgatccaacaagtgcattatatcagtatgactactggggagagccaaagaactcagagattagcaagcaagagagaatgaaggatgcacacaacaaatccattgttgggaaaggcaatgtgtggtatgacatgtcttacgatgatgcgattaagcagacaatagagaaaagaaaagaagggtctaccttggcgagtcaagaagaagaaacagagtcagaggaagaagaagaggatgacgatgattttgacgattttgactatagcattctgagtgatgagagcagtatcggttactcggaacagcaacctcttgttaacggtactcaagtcttgacagactgatgtttaaaaggaaagtaaaaataagaaattgtcgaggttgatttatttgaatttttgtctgttaggtttgatctatttgatagtttttttttttcatttcttcttatcccggagatagtaaaatcagtttcttattaacttagccagacgtttgggatcttgtagtacaccgttgaacgttaggaacgtgacgttttttgttttttctatcaatcgtcgtcagagaaggtagtcttgacaccgcaaaatacgcctaaatgtttctcttgtttcttctgtttgggctccaaaacatcaacttctatcaaaaggctttctcgttcgtacctggaatatcaaaaacccttgtcatctctccgtgtataccaaaaacttcacaccatgtgtgctctttgatgacaaaactcttaaggcaaactcttaccaaagctactctgcaaggttgtacctaattcacaaaaataatagcattaaacttgtacaatgacatcaaaactctaaagcaataagttagagaaccaaatctccataacatggaaaatcagtttacttgggtcggagagggtatggagctatctcagctacggagaagatgaaaacagagacggtttattagcctggaagagttcgttgagagcagcaaaagaagttataaatataaaccttgaagaggaagagagcgagagaaaagaggtgctccgagttgtatatgctcgttaagggttttcgctcttctttgtgggccttaaaaggctaataagcttcggcccaattttattattctgtttaaatcgtccgttgacttgttttattttatacaaccaaaaacaatcttcatacatattgtttacggtttaaggatggtgtttgcaacgtctcagtactccgcttctgatcagttaggtcattaacaatagtaacggaagattaagtaatactaaaagattctaacaaacaatttacaaaagaaaagtctccttaaaattcttaactaaattattatacaatttatgtccaatgtaggtagacttgtattgctatttaaaactcttaatttatttatgttttgattaatttgattatatataacgaaaaataaattcaaaaagattctaaaaaacaatttataaaagaaaagtccccggctaaacactattcatttgacccttaaaaactcgattatagtatcatacaatgtctttgattttagtcttgtagcgctatttcttatccggagatggtaaaatcagtttctcattaacttaacgatttggaatttggtacacaccgttgatttgaatgttttgaatctgacgtcttcttctttttttgtcaaaaaatggaactgatgtttaagttccaaaaacacagctacacatagttaaacattggtccatgtggcatttctattatggcatagatgatatatagatgtcccacgtatcattagatatcgcacttttaccgcaggtagactgtagtacattcaaagctgtagtacaacatttattcctcaccctccttttttgttttcttttgctccgacgtatcacgtttattgggtcgtttactttcttatattccttgtttcctcaaaacgtgagtgccgacaaaagaaaagaaaatatcaaaatcaaaatgtgatgagttcgactgaaatatctcttcaagtgagtaactagctcaaagtaagaccggttcgctcacacttttttgtagcaatcaagatggtatgtttcacattttttggaccattttggaatttgcatgtttggacgatcactcggaccgtaatttccaaccgtccttgccgtgaaatctcacaacatgcgtccaatataggtgggaaccgcaccgacgatacgcattaaatacttacaaaattttccttcattaattatttttaagcaacaagcttgaaatttagcatcacaaatgcgtcaagaacaaacaaaagaaagatgcattttttacaaaaattcttaaataaaaaactatttaaaaaacaaccaaaaacaaagaaggcataagaacaaaaacgacataaatatatgttaaaccattagaaatctaattagttctgaatccatattttatcattggaggacatatcatgtgtaatgttcgtgcccatagtgactaaagttgatctaacggtgtcaaaggcacaaagcggccttaacgtcgagcctccaagcaaaaccaccaccgacgtccattctccacacgtcgcaaggcaccgtgactgagcctctctcacgattttgacacgtgtactggagtttcattctgcatgtgaatccaggggacgttagcatcggcctctccctcatcaccaaccgtacgatcacgtgaaaactatcgccgctagttatctccggtgcaccttcttccacgggaataatatccctagccatcttccgatacgcgtcattagtccacgtgactctccctgaaccgtcggatatgaaaccaggacacgtgtctctcacaagattcatcttcctttcttcatctgacctccctaaaccgtaaccgtcaatccaagcgtccgttacacgctccaccgtcatacacgacgaaatcaccaccgtcctctgcacaatctccggtgtctgataagccggtgtgagcatccctccgccgtctttgaaactcaaccataacggaccctgccgcttctgcttctccaccgccgccttaagatctataggtttctccggtaatagagaaagagtcaccgcattagcactgccgtgaacgacgggtttatccgacgtcttccgccgggtgcacctcttggcgttaccaccattctccttcagctgatgacatttcctctttcttctactagctgatctaaaggaaacgtcggagcttccgccgccgctatctccgctggatacgggatttactccgccggggctggccggtttaggagcaatgggacgaaatcgaagcatgatgcgatctgctttggaaagatcgtacggtccagagccaatggcgtacctagctatgcaacaccctcccctaccgtccattttttctcgctatctatatcactcttgatatttttgtgtaaagaatgtttgagaattaggtaaaagctttacttgagctgaggaatacactgaacagaaatggtaagggttttataacgtctgtgatctggacacgtgttggagtctatactagttgtgacatggacacgtgtctttgcctgcacgcttgtggttgtgttgggtctagaagacagtagtaaagggtttgggttgcacatggaaagttattctctctttttgtttttttgcctaagttattctcccaactctaaccattaattttaccgttcagtaaaaagaactgtaactttatatattagtgtaggagaaaaaaaagtttggtctatgctatgacaggagtgatagttcttgttgcaagaagaaaacatagttcttgttgaagattatgtattttgggtcgagttttttttttggttaacttcacataaatctatgcatataatctttttgattatttttaccactaaccctcaactcattgcttcgttttggggcaacgtcaaaaaaatgttaggcaaaaagataaaaaggtataatttggttaaaattagtgacaacatccctatacaattgtgaacgaactaataagattcttggactttcgtatatttcccaaccacactcttaaaactaatccatatactataaatttaagaataacacagtttttttatttaagttttttttttgttatttgccaatcaagtactaatacaaccatatatagagtggatcactggtcagtaattagttccaaaatttgcaaattaatctccacttacgaagcgatttactgatgtaacaatagtgaagagatggcaaaatcaagttaaaatatctgacaacaaaaatggtttttatacgcacgagtcacacgactcaaaaggtgatgagtcgatcgattataattataatcattgaccaagtctaaatttaaagcgaatggcatcttaattaaatttaaagtgattgtgacaaattagatctgaaaggggacaagatgatctcatgcgtaaatgaacttaaagatttggtgacaaaaataaagattagtgccaatggagttaggtaatcgttattgaaatatcaagaaggaatattgattaatcaaatatactcctattgtacctatctatagtaaatgattataacaagtataatcatctatatctggtttataggtgtttccttaatttagctattaatattagaggaattcttatggacaaaacttggatacattcataatacatatataaattttacttgagcttctgcttcgagatcttcttttgaggatagacatattcaaacaataacggatttgacaaataacagttatagtttgaccagtaaatgagtttaatggctattagcgacttgatatatatgttttacgagttcgaatctaatttttgcaaatgggaacaaagaaaaaatttaggccagtggacctatgccaaacaaagagtttgattgtgtaactttgttttctcaagagatggtaattagtttcaatcttctatatgcgtcagatacatattactgtccaaaccattttaaatttctgatgagctaaaaacattctcaaaaagacattattcaatctgtttgaagtctatttttttgggtagaataataaacatctcataagagttcaaaccaaaatcttagtctccaaagattttttgttatccgtcggcttagtttctaggattatcttgttaatcgccagctttagctttgtaaaactctatctataatctatctttcagtgaaaaaaacgaaaaaaaggagttcaaaccaaaatcatatgcaccaacagtttagtctaaaataatttggatgttaagtaatatttagataatacgattgactgtattatagaataacggaattgtattaaataaattttatgtagaatgaaaaataaaaaatcattaaaaaaaattaatttctatatgtcataaaaaaggttcatttaatcccttggtttatgaatgataaaatgagtgaatataaaccagtcagaatttatagttttggttcgtaatatttgttgtcgtttcataacttaggttcaaatctgagagtgagttaataaacaaaattcccaaatcttaaacttagactagagttctaaccaaacaaatcttgtaaaaaactatttaatcttagatttgggatagtagtgttcgaaggtgcgagggaatctagaaagtattacgagtggtccgtgttgtgaactttgcatgagaacacgcaaaaggacacgttaagacaattcattagcttatgtttataataatctttttttttttttttgctaagaatatgtttataataatcatcacataaactattagtagttaactttatttgtttatttaatcaaatgaaattaaccaaaaccagttatactaagcataaagtactcatcacttttttatatgttttaagtacagcacatttatcgctggaagtgttttcactctagaaccacaatctttttttcgactaagacatcagtagtcaaatattcaaatctaatttggtataagtcattataattatgattatgttagcatgttttcttataaatatcaggttttagagttggtaactccgtccacactttggttttccaatttttcttgaagtttttgaaatcttgttagtttgtgaactacaaaactcggaaaaacaaaattaaatatcattaggtttaatatggttagctagaatgatcttaattgtttttttcagtggagttttggaatcaacatttggaattgtagttcaaaaagattttaatatctttaaaaaataaaataataatatcatttcgtacggtttaatatgtggaattaacatttcattcaaatatgagtcgtggaccatatatatttgcattcacgatcaatagttgcattgcttctgctttgagataaacagcatggactgatcaagatgacttcttattggaaatggtatgtgttttcaacatcactagatttgtttttgggtatccaatgttttcttttttccgtttacaactattttttcagtctagtttagcaaaaaaaactatttttcagttttcatgtttataataatttaattagtaaattgtttggatcatatagtgttagacttagaagtttaattttttctttgtacgtcttgattttttggactgattagccatttcaaatatataatataattactatgtttgggaagaaaaagaaaaaaagtgattcattgattggtgggcaaggcttggtagttacttgtataaaatatagtaacaaaaatgttcaccctcttttaatatgccgtctggaacacgtggcacgtctcatataggttgccacaatacctagtacctacctacgcaatttgaatatttggtatgttcataagataagtttcacaaatcttatcagttcaattaataaaatatgattcgattcttataattaatattgagttgatcttccgatgaagacagttgttctgagggccatctaatattatattcgcacttcaagattaacttcaagatagttctaaaatgtaaggaagcaatgttatcttttatatgcgaggaggaaagttttgaaaaccaaattatacggatcaaagttcttataaaacagtaattaattaaatctaaattacaccaacaaaagctaattataactcatttatctttcttgtttcaggaaaacgtaaataaactcctaaatactgaataataaacaatattatttgagtatcgattaattgtgtactgtgtacatgagcctcgtcaattgcaatgtttataccaaccaattacctttagttttatacaagaacattattttcatattatcgtatctctggaccgtgccaactgccaagtgacttacttgaacttgaatataaagatacacgtaactctcacatgaaattcagggaaaaggttaaaaagttgagatgtgcttccataatcggaatggtgtatgtaatgtacataataagattacatataatttatgcataacttataatacgataagtggaggattccaaaggtataatatgaattgaccaagatttacgtcactcctcttgtataatgaataaaaagtagatacaagcctaaattactacaataattaacatttgttctatctatatatagtacatgatatagatattattttatacgtgataattggagcctggagggtttccctttagagaagtctctaataatagtgattagaacaaccaaacgaacgatttactttctaaaagtagaaagcggacaatctcttatctttagaatataaaagaaataacatatgcttttcatttttcaaagatattgattacataggaaagaaaacattgattacgttctataatctcacctgctgctttgatacctaattgtataattaattagtatccgatacagtaatagtagtacacagttcgcgtcgccaacagttttcgtaacaaatactactatagtactatcatccgcaaattaattgattattaactaatgaaaccaatggagatcgtcatttagtaatcacaagtgaactcaagagaacaaaagcagacatgttcgaccaatgaaaactagccaacccgaaataagatatttattagggtttaaagaatttgtgagaatagaagaattaggttcgtcttgaaggccgtaaaagtcccaaaaccaagaatcctaacttggaaaaatgacgaagttgtttgagccacgtgtgaggactgtaatctggttggtagaactaggatgagtcaccaagctagtgtcccctgtaggacaatagcactactagatagatgtcttttactccaattataccaaagtagccatgactagaccacttctccatttgttttttatttgatgttctactctcaaaactaataaaggttaccggccgtttgataggcttacttttacacacagacatatccacaaattatgtggttatatacaatggcggtcctaatgaagattgagaaaaattactagcacaattggcaaattttggttattgaaaattttaaatgaacctactcacctaggtaatgatagtataatactaaggaaaatgtattggagtgatgatttttgaagacttttattttttttaacaaaattctgttactcaatttattatttgcaaatgtcttcccaatctggtgttattgaacatataattcacttaaaatagtttataataaattacatcccctgttttttattcaatagtttatggaagtcatataaaatttgttgtattttaaaatttatgaatttagcttataatttatagaaacaattgctgggttttgatatagcagattagcagttggagcaataattcaaaagcttatataagagttttcaaattattgtgcgaaaacaatctagactttttatttgttatttgaattatgtattttctactgttttcgaaatatgatcatacaaagatgagacgaaacattttaataaaatctttgaaatgtttctaattaattaaagaaaatattttttctaattaataaaaaatatatatatatatatttttttaaaaccaatggagaaataaaaatttagtatttccttaaacaaatgattttgatattaactattttaactataaactaatatattctaattataattaaacaatttttacccataactaatgacaattaaaataaataaatgactgattttggacaatgttcaaatgttcttctcttttaaaaatataaagatagatcattgctcgctgaaaattgttgacaacttgacatctaagcgatcggtgtgtgcctttgtaagttaggttgattctacagagtgagattaactctgtgaactaataaaattgtggagaatgagagagtgatgagatttttgaagtaagatgcgtataattatttatactaccttgaagggtttatttgggttataattagaattgtattgtggtctctgtatagtcttgggctttatatgttgggctaaatattgttaatcccacaaaaaacaaaaaatccgacctgccggaatcgaaccagcgacctaaagatttgctgtcacagactacagtcttccgctctaccaactgagctaaggtcggatgctgcaatacattcgctttgtttactttattaacaaatgtttacaactaagaataagctacatgtctacaacaatgcaaaagaattgacattatagacattctcattggtttggttctcactgttcacatttcatttagcttcaacatctacatggccagttcctaactagattattgatttttgggcttatttggttattttcggtttgctcaatccaatttggtttcgtttgggtcagcggcaagactacaagctctatttctaactcgatgcaaaaaattatgtttcaaggaattgaaccaaaacttacctgattatattcggttttggtatgttttacaaatttatacagattgatttcgcaggcaggagtattgccacactgatattctatatataaataactcgtttttacatattctattaaacgttgttaaggatgtgacttcttctcttgatcttcaccttaagcccaccagccatatgagccgttaaaagaggaacaaaaaccggccggtctttgttaaccggcacaatctcaaaccgactcaaaacagaaccaacgacgtatttcatctgcataaatgccatctctttccctacacaaaccctcggcccggcttgaaaaaccggaaatttgtagggactaataggtttcaaaaccggtcgtgtactccccggttcagaatcaaaccaccggttcgggttaaactcttctgaatccgtaccccatagcgtctccatcctccccataccgtatgggaaataggtcactttgtctcctctcttgacacgtgtcccatcaggcaaaacgtcgtcgtttgcagcatgtttagagtcccacgaaactggaggatatagcctcatggcttcacatagacaagccttcgtgtaagccatctctttcaaatcctcaaaccctaaccctaaactcaccaacgggtccacttcttctaaaatcttccgctccacgtcatcgttctcagtcaacaaccaaaacagccacgtcatcgctgctgacgttgtatctcttcccgccatgataaaactaataaccatgtccctcactgcttcgccgttgtggccggcggctagaaacctcgacaaaagatcttgctttgcttctgctccggttccgatctcaagactcttcttcttagctctgacaatctcagagaccaacacgtgcacggtcctgatcgcttccctaagcttcctctcgcttcccacgttcaacacacgcttcgttttccaaacagcgtaaataggctccgtggcacggcgagcactaatctcagcagcggtgtcaaaagcctccacaagtggattaacgggtcgggttagatccaaacaatccggatcccaacccaacgagactttacaaacaacatcaaaagcaaaacgtttcaaaacatcttgcaaatccacggtcgtaccaacatcagccgccgtggataaaaccgggactagacggttctccacttcgtctttaagaacctcaaaagcaaaactcctaagcgagcgagtggagaactcgtggctagcgagtttgcgctgcgagctccatgagtgaccgtcgacattgaatatgcctccaccgagaagatcaccaagaagatcagtaaaaggtttacctttagggaagttaaagaagtttgttttgagaatgtactcgacgtttaatgggtttgttgtgatgatggtgcgacggttgccgaggagaggaactaagatggtttgagacggagagagacggagaagctcggtgtaccattgaagaagacgatgacggtttttgttgaaagagagtatggagccaatgagtggatacgatggtggtccatatgtggtgttttcttggacttttttagttgaagatgaagataaaaagaagatgatggttataagaaacgctagtatcaaaaaactcagaagaaatgccatattgtttaattgttttttgttcttggttttttttttgtgttggtgtgttggaaagagtttgtgaatgtgctttttatattgctaattaagtgtttgtgtgtgttcttggtgggtattgcgtgtgtgtatatagaaagggaaaggtggcgggtccggaccaatctgtcccgaaacatatcgcttttagtattaatttgatttcttatatcacattttgatcgacgtaacacggtattatactattatgtgtctacggagatattattttatctccttttttgtctttagtgtagctgtatgtcactgtttcattcctttttttagtctaatatatagtatctttttttgagaattgtcctaacgaaaatataaatgtttagtcaggctattttgtctcttttaggatgacgatattgtttcgagttcctaatactgtagtatagattttctcttttagtgataagctccatcaggatattgaactgttagtgtaactgtgagtatgtatcatcaaatgattaatattgtaataagcacattgaacaactttcctgaaaaaaccacatttgtgtataaggaatttataaaattaaaaaaaaaacaaaaaaaaagaatttataaaattaataggacatcaaacatttcttttaattaatttattcgtttattacatattgtttggcttacttgaccctttatttatcgctcgtttgctatctaagccgcttttgtgtttcctaatttgacgtgttgcaaacgctttggcgacgcagaagtccaaagttttagaacgtggcatatctccgacaaaaccacgatagagactatgacgcaaggaaaatagacctatattaaagtaactaaattaattatagtgtactttgaatggttaacaaaaaaactcaaatgatatacgacatctccattaatggttacaatattacgaaacatccaaacattatattaatatttgttaggtcaaaatttgaatcgaaccgtggtttctagaatataatacatgtattaatggtatagttgaaatttgaatggtagcttgaaaacatgaatttcgctccggcttacaatatgtgttaataatcactattctaatgtcttaaaaataattaagcgattatacttttgataaaatggtcgggtgtcaaataaatctggaggcgaaatgtagaaaagtaaacattgaaaagaagaaaacaaatactagcaagagcctgacaaaactgttcccactcgaacaagagctattcaattgtgcacgtgtttctttaggcttgaatttaaccagtaaagtcagttttatatgagacgaaagaaagatgaacttgatttcagccactcacgttgtcgataccgtcttttcttgctcgcacacaaaataattacggaattgaacaaaaataacggcgccgttctataaattatatgagccaacataattgattggtagcacgcaaaaaaaatgacttaagaaaaggaacaaccgttttttgtcttcatgacttcaccgtccaaagaactcgtgggttatacaagagatatttttccagatgtatacaacatttcgttgttgatgttgtaatgtaatagttataccagatttctatgataattttgacaaataaaggtttctatttttttttttgaaaattttattgtaagtggatgagaaatttcataacttatttgatcaatagacgccaaagcagtgtagaaaacaatttttgtgatcaatcacaatctagaatgcatgagaaatttattaaagtctaatagagtcggtgtaataactaattaccttgttctaaaactaacatgataaaataaaattcgttttagcatatacttacatcatgttcaatatcaattgtaagccaaatgaaaagcaaagaaaggcagaagcaaaaaaacttcacatagccttttagcctcaatccatgacttgtttcttgttgttgttgttgttgagttatcttcttcctctcgacatgaactctattagcttcttcttctttcctttcttatggtaaacgatcttttgcttcacctcttctcacgtcttctcactttttcttttgcaagtttaatgaaatgtttcaagttcaataacaacttcttacgaaattgagctccgattagattcaattcagcgttaagaacgatcgaaatgatgttgcgaatgatcgatctcaacttatgcaagatcagagaacagaaaacgaagaataaagacacacgatttgtttacccggttcagcaagatcggtgtgatcaagcctacatccggagccgaatcaattcggcaaatccactaagctttatgaagagtacaactaaaaccgagcttacaacaatggtgattctctcaagttctctctctctcgatacaagaaaacttcaaagaagaaaacagatgaagaagatgataatcgtaacagactctgttactctttgtataatagtcaaaccctccactgcagttagagtctttgacttctcttctttaatttccggtttaatcagaaatcccttaaccagagataaccgactgcttcaatcttcaattgacttaaccaaaccaacttcagagtttgaatcagatataaaccaacaacactccaccttgattcaaatctctccataactagtggacttgcacttacttggatttcaccttcggctgagatgtctttccacctcacctgagtagctttagaaactctaaagctgactcaaacttctgcacatgaatgcctttggtaagcatgtctgcaggattctgagaagtatggatcttaagaacttcaacacttccttcttcaatcacatccctgataaagttgaacttgatcgcaatatgtttagttctttcatggaacgtgttgttctttgccaaactgattgctgactgtgagtcacaccacaaagtaaccttctcttgcttgaatcccatttctgttaacaacccctgaatccacaaagcttctttcactgcttcagttaaagcaacatactctgcttcagtggttgataaagccactatgctctgcagatttgacttccaacttactgtatttccaccaacagtgaatacataacctgttgttgaacgcctcctgtcaaggtctgctgcatagtcagagtcactaaagccttgaactctgaaatccttttctctggtgaaaaccagattcaaatctgtagacccttttaagtatcttagcaaccatttcactgcagtccaatgaatcttacctggtttgctcataaacctgcttagaactccaatagcttgagctatatctggtctggtgccaaccatggcatacatgatgctgccaatagcacttgagtttggaactttatcagtgtccacacactcttcttcctcaactactgaggcaagtttgaaatgtgctcccataggtgtgcttacaggtcttgcttcagtcatattaaacatgtgaagcactttctctaagtatcctgtctgagacaaccgcaatgtacctgcttttctgtctcttataatgtcgattcccagtattcgactagctgcacccatatccttcatttcaaatcctgtactcaacgcctctttgatcttgttgatttcagtcattgacttagctgctatcaacatgtcatcaacgtatatcagtatatacacaaactcttcatcactcacctgttttatgtaaacacacgaatcatgaccacttctgataaagttctgatccatgataaaagagttaaacttcttgttccactgacgtggtgcttgttttaacccatagagtgacttttttaacaagcacacttgatccttttgttcatcagcaacatacccttcaggttgctccatgtaaagtggctggtccagatcaccatgcaagaacgcagtcttaacatccatttgttccaattctagatcttcttgaacaacaatagacatcaagattcttatcgacacatgcttgactacaggtgcaaacacttcatcatagtcgattccttttctctgagtaaagcctcttgctactagtctggctttgtatctttcaggttccacaccgggaattcctggtttcttcttgtacagccatctacaactgatgattttctgattcttgggatggtctactatatcccatgtatagtttttcaatagtgactgcatttcatctcccattcctgcattccatttttcccactctttggtttctttagcttcatgataacagctaggttcttcactgctgtccatatcttcagctgccataagagcatatgcaaattgagagtaatcagagaatcttataggtgctctgatttgccttctaacccgatctctagctaactgataattgctcagtctttcactgcttgctggagcttctccttcgggttcaaaatactctgactcatcatcactagatgaaacatcaactgttccacctgcaacagaactctcaccaacctgctgttggttacttactatttcagagacagtcttttctgcttgagtaatcttctctgctctttcttcttgttcagacttctcttttaactgcaaatccttatacaccaagtcctcatgaaatatcacatttcgactgataacacatttcatttcttctaagagccagatcttgtatcccttagtgccttgcggataaccgaggaacacaccttttaaagctcttggtttaagctttccttgatcttggtgtacataagcaactgacccaaacctccttaaatgcttgtacccagatttcctgtttaaccacaactcttcaggtacattgtgatccactgcaaaagcaggtgacctgttcaccagatatgcaacagttgaagcagcttcagcccagaatatttcttcaagacctgattcactcaaaagacatctcactttttccataagagttctgttcattctctctgctacaccgttctgctgaggggtataagcacatgtcctgtgcctttcaataccaaacttcttgaggtaatcttcaaatttggaattacaaaactccaatccattatctgtcctgagcactttaaccttctttcacacctgtgtttcaacaagttctttccactcacaaaaacggtcaaatgtctcatctttagatttaagaaacataagccaaacctttcttgtcttaccatcaacaatagacagaaaatatttcatacctaagagtgatggagttacatttggagagccccataggtctgcatgaacgtatcctagagcttcctctgtgatgtgcttgctgacattgaagctaagcttcttggattttcccattacacagtgctcacagaactctagttctttgacatcgttcttttgtagcagtccctttccagccagtatcttcatgttgtttaaactcatatggccaagtctgctatgccataattcagtactgcttttagtgtcttctgcattaaagctctcagacataatggtctctccatccagaacatacagtccattgattaaacgtccaactaatgcagttgcattgttcttatggtatctcactttaccatctccaccttcatggtgatatcccagtttatctagagtgcctgttgaaattagatttcgcctgagattaggcacatacttgacattcttcaagattctgattgatccaccatttgccttaatccgaatagaaccttgtccctgagacttaactgtgtgatcgtcaccaagaagaattgttgtgccatcattctcctcaaaatcactaaaccagtctcttcttgatgacatatgtgatgtgcatccagagtctagtacccacatgtccttgaccaatctgtcaccaatgtttaaggcttcagaaacttctagtttctcaatgataacaccagcctctcctggaccttcactttccagttttctttttttagcaaaacaatctttcttcacatgaccttcctttttacagaaccagcaggtgacctttgttttggaattagatctgctcctgcctttccctttgtttccttgctgctgagacctgttttggggtctacctctttcagttgtatacaacacagttgaagagcctctttcagactctttagattcagcaagttcatgttccaatgacttagctgatgatacaacgtcctgcacacagagagtcttgttaccatacttcaaagtgtgcttcaactggatataactcacaggcaatgaattcaagatcaagattgcttgcacttcttcagcaactacaatctgcagactgccaagttcagccacaattcttaagaattgatcaatgttctgatcaatactcattgtttcaagcatcttgaatgagtaaagtctaagttgagtatagatcctgttaggcagagatgtttccatgtagagcttgtttagcgttgcccacatatcagctgcagatacacaatgctgaactttaagaagaaccgcatcagtaatgtgattgattatgatgttcttagcttgtttcgattgttcaatcttgatcagatctggaacttcttcagtcggagatgattcttcatcggtttcaggtttctttccttcactctttgggactggaacaaactttgtcaaagagtaatccgttaaagtgttcatcaaacccagaactccaagttgtgcttcaatccgaatcttccatagagaaaagtctctatctccattaaatgtcttgatctctacctttgacgacatcgccattaacgctatcgaagcatcaaacctcctcaattcagaaaccaaggctctgataccactttgttacgaaattgagctccgattagattcaattcagcgttaagaacgatcgaaatgatgttgcgaatgatcgatctcaacttatgcaagatcagagaacagaaaacgaagaacaaagacacacgatttgtttacccggttcagcaagatcagtgtgatcaagcctacatccggagccgaatcaatccggcaaatccactaagctttatgaagagtacagctcaaaccgagcttacaacaatggtgattctctcaagttctctctctctcgatacaagaaaacttcaaagaagaaaacagatgaagaagatgataatcgtaacagactctgttactctttatataatagtcaaaccctccactgcagttagagtctttgacttctcttcttcaatttccggtttaatcagaaatcccttaaccagagataaccgactgcttcaatcttcaattgacttaaccaaaccaacttcagattttgaatcagatataaaccaacaacacaactagtcattacaaaagtcatatataatgttagtgatacaatcacgattcacattgatcgcataatatttgattgctctgtttaatgtaatgcttgtaattagaataatctagagtctcctctcttattcttattcttgtataaatatgttgatgtacataaccctaaatatattagaaagacattttttacatggtatgagagctttgtgacattcgttgcagtaattaattggaagcttgcagtacattgccttcaccaaatttgatattgcctatgcggtcaatcgtttatcacaaattatgcatcgtccaacggaagatcattgacatgctgctaaaagaattctaagctagctaccttgatgggacacccactcatggcctctttttctcggcaaacaacaaactcattcttcatgcatattcaaatgcagattgcggtgagattcagacgattatgtactcgtacatcttgttagtgcaccttcagtcaggtcaaaccagaaggagtgttgattgctggaacaaactggaagctgtttcagaagattaaagtgaagatcaagtaattgatgctgacgtggatataccgccaaatgaacgaatgacgtggagatcacaacagaatgagttcggtttggaaagaagatattcacgcaaagatctggagtgatccaagatcttgaagactaacctagaagaccaaagacctcgatgatataaatagaggtgctaaggtgcttgctagagttggccatgattgtgagtgaaaaagctagtgcaacgcttttcattgttagagactaaggtttagtctgattggaattctagagagatcaaagagtgtgttcttgtgatatactcttgtgtgtttagagaaatctcaggtgacaagatatagtagtttagatcttgtgtaaaaccaattaaggtagttgtaaacttcttaatcagatttctaataaagtgatactcagtggttcttagtttggggaatacgattcttggttcatccggaatttcacatctacctaggacgacgaaacccaatatcttggacaaccaagaaacggaaggggtggcaagatcatctatagaagtagagtatagggttgtcgcaaacacggcctctgaactaagttgggtatatatgtaatattttcacataacttggaattactttcaacacaccacttgttgtgtactgcgacaacgtcaaaaatatcttcctttgtgctaatccggtcttacactcaaagatgaagcatattgctatagattatcatttcatccgtggttaagttcaacaaggtgctctccgagtagttcatatcaacacaaaggaccaattagcagatgtgttgatgattggagtgtcacaagcctctccatcttgagggggcgtgttagtgatacgattacgattcacatttatctcataatatttgattactctgttttaggtaatgtcttaattgaaaaaaactagagtctcgtctcttattcttatataaatatgttgatgtacaaaaccctaaatatatgagaaatagtttcttaacatgttcaggtcatctataaggcaagtaaaacacatgcttaagtcataaaatagaatctaaagagacattattctgaaatgatcaacttggtctacttagcctaattttaagtcaatacatacaaatttgatctctctaactatatttgtttttctctttctagtgttctttttctttccaatatatatacatagcatattttgaattctttttgttttatggagtaacgtcaaatattataatagccgcatataaaattagaatttattaaatattaatttataacttttttattgtagacaattattttaggaaagcaaagtatatttagacgaaaatagtattaggatgaataattttttgaaagtcctaatgttgcatattttttgttttggtgaacaaatttcgtgttgtagttcttaaacatctatactattaattgggaatcattgaaaataaacaaccttacgaagggtaaaatattacaaaaatactattgattgttagtatttttaaataaattctgattaatttaaaataattataattatgctttacatttagaaatatataaacaataaattgtacatacttattttgaaatattttggttttcttttttctttttttcaacctgatttttttttaaataaatccataatatattattgaacaaacttttgaaataatgtaaactaatacatttttcattcaaaacaaattatccaacaaaaataatttggattatgagtactatataaaataatttgaaaccaaacttgacatcaaattaaatatctaactggtatgagtttgggttatgaacactatatagcatgtacgtattttgtgacacaaattctatttgtgatgtttacaggttggtagtattttttttccacatatacagacgggttatgagacgaaaaatttatgatacatacatcacaggttttccattccaagaaatataagtcaaatatacgtttttattttctaaactaatcaaaacattataactgttataacagtaatcaaaacattataacagtttgattactggtgtaaaataggatataaatttggttttagtttgggttatttatctgtgtgaattcggatcttaaaatataattatataccaacataattgaatttcgattattattcttaactttataatatttatactattacaaagtttaattataacaaaatattatatattttaaaaatctatttaaaaagttctattttatatgtatatgagatttcaaatatctaatatattgtattataatatatattacaaaataaaaaaaaataatttacattgaattaaaaatatgaatccgcacatacgtaaaagttaggatctagtaatttgtataaaaaagaaagaagaagatagttatccatttcataggtcggctgctaatttttggcggatttctaataattatatacaatccaattaaataaatgaaatatgtcgtggaaagtggaaactatataaaggatagagataagtacgacttcgacaaatggagatatattatcattattattattataatcattatctttcgctattcctgaccaatacccaaatgatctccgctactctttccacgtgtcaaaagcactgaattgaacggatgagatcttaagtcactaaccaaaacaacacttgaatttttttataacaaatcacagttccacccaatgaaatccattttgtttcaaaataaacccgtatctttataatgaaactgaaagattcaaggatgtttttgataaattaaaaactatgtagggcttcattcataagatttaagacaacagggtttatgaatttgtctctgcttcacgatctctctactatggtgtactgtatctttcaatctatagttcagttacaaagatcatcacagccaattttagaaaacttctgacggaaaataaaaagagaggatttatttttatctttctgtgttaccggagaataaagacggtaccttttcactgttgacttaacggagaagatggcgactgttccggagataaagataatgagaagcgagagcttaggtcatcggagtgacgtgtcgagcccggaagctaagctagggatgcgtgtggaagatctctgggatgagcagaaaccacagctcagtcctaacgagaagctcaacgcttgctttgagagcatccctgtctctgctttccctctctcttctgattcacaaggtatgaggattttgatgatgtgggtgtttgaccatgagctgatctataattggaactggtaattgtgttgaatttgaatcatgttctatggagattgattttgatttttgtgatgcaattattgatgggttctgtgatctcttggtatgtgtttgttgatgacttgtagtaggaatatgtgctgtgtgttgaaattcaagttattgaaagttttataagtcagaatttggaattcaatccagcttgttggatactcgaatcagttcgatttagggaatcagaattagttcttgatggtttttgtttcttagtctccttgtagaatcagagtacttattgattcagttctgctgtctcacatctttgtggtttccctatatagatattgagataagatcagacacaagtttggctgaagctgttcagacactatcgaaattcaaggtcttgagcgcgcctgttgtagatgttgatgcgcctgaagatgccagttggattgatcgctacatcggtattgtggaatttccaggcattgttgtctggcttttgcatcaggtaattgttctccaaaaaatacgagaggcgacttgtttttgtcatgatcaaattggattgtggtacctagtgaactatacttcatgtctgtactctacttgtctcctttaaaaaacagttggagccaccatctccaaggagccctgctgttgcagcttcaaatggattttctcatgatttcaccaccgatgttctggataacggagattcagcagtaacttctggaaacttctttgaggtccttacttcttcagagctatacaagaacaccaaggtgaagcttgtttttttatgaaggacctgatttcagttgacttttttctcctgattacggcttctgaaatgcgttggatattctctctgacaggttcgagatatctctggaacattccgctgggcaccgttcctggctctgcagaaagagaactcctttttgaccatgctgttacttctttctaaatacaaaatgaagagcatcccggtggttgatttaggtgtagcaaagatcgagaacattatcacacaatcaggagttatacatatgctggcagaatgcgcggggcttctctggtttgaggattggggaatcaaaactctctctgaagtcggtcttcccattatgtcaaaggaccatatcataaaggtcagtttgtaatctaactcatagctccattgagagttttttttttccttttttaacagatcattatttctctttcagatctatgaggatgaaccagttcttcaggcattcaagctgatgaggagaaagagaatcggaggcatacctgtcattgaaaggaatagcgagaagccagtaggcaacataagccttagagatgttcaatttctcctcactgcacctgagatctaccatgactacaggttaatacttcacaaatccttgtgatgatgatacaccgagttttgcagcattgtcaaatcttcaatcctttctctctctttattttaggtcaatcacaacgaagaacttcttagtatctgttagagagcatcttgagaagtgcggggatacatcagctcctatcatgagtggtgtgattgcttgcacgaagaaccatacactaaaggaactgatcttgatgttagacgcggagaagatccataggatatatgttgtggatgattttggtaaccttgaaggactcatcactcttagagacatcattgcaagacttgtccatgagccatccggctattttggagatttctttgatggtgttatgcctcttcccgaaaactaccgagtctgagagaaaaatggtatctttcttctgtaaattgtcttttgtttggtgataatgcttctgtctgtttgtgcttaagttctcgaaattgtgttattaacgtttaacagaaataagaaaagaagaaagagcctgtctttgagtgaatatgtctgaaatacaataactcttaagattctcggatttggccctacattttgaatttgaacaattaggtctctggttggagtaagtgttcttcgaacttgatcaagatctcatccatctctggttgatgtttcctgacctgaaaattttggtttcagacagatttagataccaaatgagacttcccattacaatcactgtagagaaatttcatgtggaaatctaagtggctttaattactttgacgtttgccatggataagagcttgtgagaagctacataggcaacatctgagtcatttggtctcttttccacaaaatagattacctcagcaacaccagactgcaagaaagaaaaccgaaatgacaaaagtccatatgattgtgatgatctacttgcatcaaattggttaattggactaactagaacatttggtttttatatgactgcttagctgaagacattgaccataaaagattactagagtagcttattaaggatccaaatttgacaaatcaagccaatggtatatagaacaaacctgtaaaataatcttggcacattcattgcaagggaacattgtcacataaagcttctgcaagagattcgaggagcacaaaacaaactcatataaaccatccacacacaaatacttcggaacagaaactgcagcagagttccctaagttttctataccaaatagcatttccaacttattagcttttgcgcagaaacctaaaagagaatattctgacaatgatcttgtgtaggatactttaaaagttttaatcttttcactcaagccagaaacaccatgatttgtgagaaaataaacactgaacaaattccaaagaaacaaacctggccagccgccgatgcgtggtttgtgtttagtatggcattgacttcagcgtgacaaacatatctacaaaatcagagtcatgaacatcagagcttagcaatgagcctaaacggatgagaactgaaacatctcaccgtattacagattcccaaagaaagtgtgcacaatactcatcaaacaagaacttaaagattcagccatagtttgcatcactaagattagtacttacggatacttggtctctaatgggtccccagttcttgatttctgcaaaattggtggggagcaaattaagagaaaattaataaatctaggggagaaagttccttgcattatctctagacaacttctgtatattcttagaattcagatgaaggtaataccttggcccaaggaagtttgtcatcagagcagcctcttggaaaaccattatagccaatccctaaatgaaagatgaaagtttttgagtcctcgtttatatgtgtctcgcatgtaccagctaagtgacaaaatgaaataaactatacaaccacacttcatgttgttcaaagagatcaaaacacaagtgtgatcgtattatcttaccaaggattacaccattttggctcaccaaacatgcgccaacctgcacagccataagaccgggaaagatagtcaatttttgaatgcatccaacaaaatccatcctttttgcatcatatgatccatcagaaatggatatgaaattgccacaaaaggaagatataaatttcgaatttgtgaacctttagtcaaaactatactctaatcctaaagaccttaaagtccataaactatactctaaatgtgctagacatcaaaacaccaatgcatccattcattacaaaatcagccagtgcgatatcttaacaccgaaagaatacctccactttgatgatagaaaactatatagtatcatgaacataatacattttgagcagcttacacatatataactgtttggatactcatgttgttcaaatatcacaaacaacaaaatttacctgcctgttaggatccttggatcgttctgcagaaaggaatgcaatcgccatgaaataatcatcccatgataagtaccttcacaacaattcaaacaaaattctaccattaaaaatcaaagcagattctaaacttgggattttctgaaagttggaaactttagctatggaataacgaaattagatatattgaatggaattatgacaaacccatttcgtttcaaaggactgaaaggatctagagcagggaattttctggaaattgcagagatttcggtggaagtgaattttcgggatttggggtttttagggtttgatgagaagaagcgaaatgctagagctgaaatcaaagcaccgaagattgcagatgtagagacgagtgtaagatctcgagagttcatggggagcttcaaaatcgataaaacagatttatccagaaaaatctttgctcttctctcttcactattaaatgtagcgggaaactataagagagtgaaaatccccgccattccggttaaggcaggtctatcattcggttcatatgattgttggtttaggtttcggttaataactagattggtttactgattgtgctttctcttctcagcagaaaattatggcaattaacagattttggttaatttcatttttttcaaaaattatgtgttattgaatcatttattttattatttgttatttttttttattttttttagtattgagtgctaccaatatattttttggataaaaaaaactataccggtccagatttgatatctcaaccatctcttctatatttctattaactatggatttaaacttttttgtatcgttgatgttttgacaatcttttcaattcacaaaaaggttataaaagattgattttgaaattttggttaatgatcttgtgaaaaaattgacattacctttcaaaatttttttttataactatagttctatattcttattttgcgcttttaagataccgtctctgacttttttattggtaggcacggttgtgtatacctatataagttttagttttatttcgctatttagttttcttttgtctaatgtaatgtaatatgaactggatagattaagaaaacataaagtggaaacgaacaaagtttgaaaaataacaaataattggaaacgtacatgaaactatgaaacacatgaaacaagttaataactttaaaaaaaaaacattgaaagcattacgtacatttttatctataaataacaaaatgtatttaaaacataacgaccaggcaatcgtagatcacaacacaattcagattagctattaaacctgtggaattttgtttttttttgtcatttagagcgtctatactaattaatgtaattgagattgcagcggaaagactcaaaccctagtttccgaattctcaatcctataaatctgttataatctttcaactatttaaatcacatatataaataaaatataaactgttatatgagaagaatttgattaaattactaatatatacggactaagcacatagtaagtgagctagttgctagcttttgaatccattaagccacgtgcatcaccaattattacacaacccacatccacattttcatttttttaaaaggatacgttaattaacaaatatacaatcgcaaagttattagttacaaaaacatataaaatgagatagatgatgaaaaagtgaaaagggtttctttaaaaagcctctcatgcttcaataacgtgatccgtttatatcccatcttctctgtcttttcttcaacggagattttctctacaccttaactattttttttcttcctatttctatcttcgttttactaacctaccctccattattttcactttacaagtatgctcctcttatgttttggaaaaaaaaaaaacaatgaaattttgcaattgcaagttatgtcataatatatagtagctttaacgtaaaaaacaacattaatcacgtttgcgtttacatgtttatattatttcgacataaacgcaaataacatgttcatcattataaaacattctaaaaatttggttattggtgactatttattttgtaactcgacaaaacttaaaaaatcttatatatctaacctatttttaactttagttgattgttgtacaatcacatcatttcgtcttatcatggaaccacacttgacaacaaattcacataatggcggtacggtggtcgtttgttaactttgaggattatataaaaacccaatgatcaaataacccaaaaagatatgcatattcgaataaggggttataagtgtaatttcaagtagatagtatatgtgcacagacacgaagcagcttacatataaagtgattggtaattgccatccccacacttattgagaagtgcagccttttagccaaaaaaaacaaacaagaatacaaaaatggctgaacaacaagatcatcacaaagagcttcagcttttaccttctccaccgtctaccgaatctccggtaaggaaacaccgaccaacagttataacaaccgaccatcacaacaatcaccaccgttcctcctccatgatccaccacgatcttgacctcaaactctccatcagcctcagctcgatctcaacagcggaggagcttccaaacggtggtgtggaggcgttgaagtggcaagccgcggagcagataaggcttgcggctatagagaaggcttacgccgagagggttagagagttgactcgccgtgagatggagatggctcagtctgagtttgctcgtgcaaggtagttaaagctagctcgatcaagtaataattctggttttggtttggttaacggttttgaattgtaaccagggtgatgtggcagaaggcaagggaagaagtggagagagctgagagattgaaggagagatcaatgacgaagatcgatacggcttgcttggagatcacttgccactcttgcagacaaaggtttaggccataacataagtatttatttgtttctcttaattattgttattataaatggatatttgaagagaaagagaatgttggtttaatttaaattttattttgtagttaaatttaatttgttttcattttcgagtttggtaatattatatagtccttcctttttattttcttgaaatcgaaggaaaacaatatgctcagataagagatgatttatgtttccagctactttacttcctcttctttgccaaccaaaaaaaaaaaaaaaaaaaatcatgaataccatttagtgaattacttgggaattagggataaaattcattagttacgttgtcaacattagctatgtcaattcctcaacgatcagctattatatactatatggagtattaaaatctaactatgacatttattaaccaacagaacaaaacctaattagtaattacagtgattagttagttaaatgcttgatgttaaagtaacaagagatggagtgacattcacaatcgaggaacgtggaaaataaaaaagagaatggacggattgcatgatttgaatataattggctgacccatatgtgattcatttgatttgttgtaatcatctttgaaaacgttcgttcaatgaaaattgatgattattctgaaaacaaataatcaaacacacgtaaagacatatgcatggagatgatgggtataattattgcattaacatgcttatttcatctactttaatctcttaggtcgctttaaatagtatatatgtgtgtactattattttgtgtttgtgcatatacgtacatttacttacagaaacttgataaatgtatgaatatttttgataagagagaggattaattttaattatgtacttcgtagactatggtttaaatcaatcgtgtactacagataatatgttcaaatttaaatcctaaaaaatgccgagtttacgatcataccctaaatacgtaaatcaactcggctgatctattcggttggtcgtcatattctctataaaatgatacatacatatgaactatattaacgattatgacaatatatagaatatatgtaaacattttgagaatatatatcaaaagcacattgtaatccactttgtcatttctatgcccatctttagtatttggaactgaatatacgttttcgaacagattaattttctcgttactatttttttgaaaagttgtgtttttttacattgcaaacgctatagtgtttttttatatgtgaaattattttttcgcaatgtaatatgtatcttgacggaccaaactcttatgcgaagagacattagacaagttaaaatagatctagaaaaactatatatatctcatgaatgcgtaaaattgctgcaaattaaataacatcttatatatgaaggccatgaaaccctagagagcttcctttttgctctttggatgtatgtaaacatctattttcttttcactaaaaaaaataagatctattttcctgtcaacatataaagatctttatatttaatacgtaacttatgttttaaataacaaaataccttaccttttattaccacacacagacacagttccattcacacgcgtgtaaacacacatgtacatgtacttgtagccttgtaggtatttttttataaagaaaaagtatcgtaatcaagattccaatttgggtactgtctaatgccaaatatatagttattgatatatatgtgtagcaattggtacagtacttttcttttggtacagtattttatagtgcaattaatgtaaaatacgtgatctataacggtaccgagtatatgtgttgatctttgcgatttgtgaatcaatcatcaagtcaacaaggaaatggctcaaaaatcatattggacgataatcactatgctattatagaatttatataaatagtaacaaaattgagtgaaacaggaggggccatgtctcatatttttgatgataggaacctttgataatgaaagatagaagcaaatggatcaaaacaaaaaaaaaacacaatcagtttatgtaatttttttagaaagatgaataattgatgacagaattacaagacaaccaggggtgggaaggagtcggagtatccacttgttttcaacttcttcttcttagacctttctctatacacaaactccaaaattaaattcaaatagtgttgcttagtgcttagaagatattacctcccttcacattatccaaaatcacccaatgatttctaaacttttcctatgcttttacataatttaaggatatggtgattttttattatatatttttactctaaagacaagaatatatatagttttcattattttgatttcttaacagcttagttcaaaaacaaaaacttggctgaacatgattgaattcgtttcctcaaatcacctctactccttaactgtctaacttttcaccaattaaatttcatgttcttgacttaatttctcttttacaatttatatattctactaatgttttaaaaaaaaataatctttttcttaagaagaagaaatcattttagataaataaaaagacattgatattctttaattgttttaaatcatctaatgaactatttcttctccttaacactcttcttgtaattccaaatattttccgtatagtaggtaataattacatgctcaataaataaaagcacaacttctaaattttatttaattattacaaaccaatcaaatgtatatgtgtaaaataatcaattaatataattcagcaaatttcagaatgcatgtacttatacaaagatacatatagttgatgtagtgacgcaaacgtacatgtatgaatattattatgagcgtatctcaacgtacatacaaaaaaaaaaaaaggaaatgtataatcacaacgttgaattcaccagaaggaaagagatgtgtctgcgaaattggaagataatggaaactgataagatacatcaatacacagcaatcttgcgcattgtgacacaaccttaacatttgtcttttcacatttgtctttatactcaaaatttgtagatgtacacactacacacacacatatattctatgtgtattataagtgtatctgtacataaatgttgtatgaacacacatacatacttacatgcatatacatatgtgtatcatcagtgcatacagaagcagtcatattggtatcaaagagagccatcattttccaaatgttgttttcctttgttcagctttttcacaaatttatatattttctgaatcccatgtgggatggatctttgcttgtcccctctagttagatttttttgcttaaaatatataataattaatctcaattctaattctttctacaatataaactatttaataataatttgtgttgtctcttatagtttatatccttatgacagagatttgttttggtttcgatgtctatatattttgtggtccttacacaagttagcttcattattatgcatgtttatctctttcccttccaccacctagaaaatatagttttattgagaaaattatcattttacaactattcttaatgttcattttccacactatagatattttagttagtaactaggcctcttaatcatggattggaatcaataccaaccatgcatgtaacacttacgtatatatgattatatgattcatcatttttaaataatgttttggaaaatattatcggatctttgatgatcgattagctactaattgttgcattaaaatggaagtattaacgagttctaataattgggagaaaataaaacaagaagaagaagccaagtttggttggatttaaaagagaaagggacaatgcccttagaatggaagggaatgaaaagacagtgttagggaaggaagaggggacaatggatgatggaagttactctcatcatgtgatccatcactaccttatatctaattttacatatatttcatttaatagccacaaatatttaccaattatattttttttgtgcatatatatatgagcaccttgcaagcattttcattcttattatttgtttgttttaataagtattttgggattcttaaaacaatcataatttatacgatgaattaatttgaacgaaaatttctacccaaaatcaatatccagtaaaattaacgacgtgattttgaaataattagttaaaaacaagaaaatatatttattatatggttgatgagatagtggtcgttatataaaagataattcttttgatatattgatattaatatacgtataagtttaattcttatatatatatatatatgtgggtattcgtttataagttaatctttttatctttatgctttaaacaactaaaattcggtattatatatgattctatcatttatggcgtaaataattgccaaattataataaaaaacaactaaatgaagttcacaatgaatatgtgcaggtatctcaaccatctaaaatagtcttggaaaccattttgagagataatagttttgttcttaagactacaaaaccatgatcgagttagttactaacaattgtcaacgttggacattcccatattcgaacgaaacaatttaattagagcctgaaaactcgattaccctaaaaagagtctcggatccataaaattacaaagcaaatattccaatagttgcacgcaaaaaaaaaaactcttttggaattacaatttcattgatgttcgtgtataattttgagggcaataatagtatattcagtactatacagatggcccaagagacagaaatatatgtaacatatactataactatttaaaatattttactcattgacgaaagaaaaagtgaaaaaaaaaaatgccaagtcaagagattttattttgtatataaatgggccaaaagtaaaaaggagagaaagtgagagtctttacttttaatgtctgagaaaggcgaaagggtctcactctttgaagtttgaacaactcaccaattacacatttgaagattgaccaatttatataagcaacagtaattaatatgagtggtttctctatgttcgatattttttttttatgaacgtgctatggaaaataaaggttgatcctgatttacatgtaagtatataataattaatataacgttgaaagttacataagtatttattttttattgttatttggttggatctacttttctatatcaactgcattcagtttcttcgtatagattatgagtatatgtagtttcgattaaaattagctttatgcaatttgcactttcttcacttgaaaaaaatatcaacaaaatataaatagttcaatttaatttgttgtttaacaaaacaaagaacaagctcgatttaatttgttgtatacggtatatcgttataactaaattccagtttcccatatagactcatatagttacgtaccaccgatcatgtatacgttttttttaattaatctaatacacgtcatcctcattagaaatttctaacatgcatataaacgataaaacaccatctacaactaaactttaattagtttccgaagaagtctcaatctttattggtgttacgtggtctgttgtgtaactcatgtttaacatatcaatgaaatccattgatgaaaacaaaaagaatgaaatgatgaaaacaaaaacagcatatagtttacaatatatcggaattaaagatgtttttttttgtcaaaaaagaagaagaaaaaagagcatgtaattttctagatattgtttttgtttcacataaatgtcgttttggattattcatgtaatattttaaactaaagtacaatttttgactactttagtttactagttaagcttttatttttttgactaaccattgaatgatgaagagatcaacgcatcatatttacaacttacatagtcttttggaagtgtaaattgctaatactacctaaaatatatctataattaactaatattttttcgtcaattataatagatcaattaaaaggctatcaaaaggaaaaaaatgaaatccacatcctgccatcataacctcatgctggaaaaagaaatgaaaaaatataaaaaatttcttttgtttattaaatttacaactttaatactagtttcttttctattttttaaaagcttttgtcacttacttaaaaaaaaaaaactttttgaaatattcctacttccaatgtctgattagtgcttctggatttcctttttggatcatgtgaatcctaaatcagaaaaattcatataatacccaattcagtatattttcatacttcaatttacaagagttctctatgtttttagcttctttcttttaagccaaatgttttaagcatcttttatacattaaaataatttagtgttgagttgagatttttttttttttttttttggatttacttgttcaaaatctgaaaaaatgtttacagaaggttaaaatgaaccaaaaggcatatcaagctagattttgaattaccctatttcatcgtatacacaaaactgataatgtggacacagttgattttacttctcgatgacatcgtagttttatttaatttggaaaccacggcccatatgagcacatttcaattaaaaaccaatggtaagagcattttccatgcaagattcgagagatattaacccagtgactgttaaaacagcttagaaccctaataacgaatttcaattactcaatttaccattcgcatttcgcaataaccaaactgagccagtcacaaggagtaaaccgaaccggattatttatttataaaatgaaagaaaggaaaccaaacaacaacagcagtagtagtctgacgtaaaccaaaaagcaggcagatcaacaactaaaagaaactcaaattaccaaaacaaacaggaaattgcaaactaagtttttttaccatatgcatacaaagaccataaaaggttctgataatcaccggtttcatctctcagtatttaatccggccatctccttccgttatgacatcgttgaaagtgccaccactcgggatcatcggcaacacatgttcttggtgcggacaaatcacatccaacaggtaaggtcctggtgtatccagcattgtctgaatagcttctcggagatctgctttctttgtcaccctcgccgctggaatcccgcaagctgctgcaaacagcaacatgttcgggaatatctcgtcctcctgagccggatccccgagaaatgtgtgagctcggttagctttgtagaaccgatcttcccattgcataaccatgccaagatgctggttgtttaataaaagtaccttcactggaagattctctacacgaatagtggctagctcttgcacattcattataaagcttccatctccgtcaatatccacaactatcgcatcagggttagcaacagacgctccaatcgcagcaggaagtccaaatcccatagctccaaggcctcctgatgatagccactgccttggtttcttgtaattgtagaactgcgccgcccacatttgatgttgcccgacaccagtacttattatggcttttccatcagtcaactcatcaaggaccttaatcgcatactgtggaggaatagcttccccaaacgtcttaaagctcaacggaaacttctgtttctgtacgttcaactcattcctccaaactccaaaatcaagcttaagctcctccgctcggttctcaagaaccttattcatcccttgcaaagccagcttaacatcaccacacacagacacatgaggagtcttattcttcccaatctcagccgagtcaatatcaatatgaacaatcttagccctactagcaaaagcctcaagcttacccgtgacacgatcatcaaaccttaccccaaacgccaacaacaaatcactatgctccacagcgtaatttgcatacacagtcccatgcattccaagcatatgtaacgacaactcatcatcacaaggataagatcccagccccatcaacgtactcgcaacagggatccccgtaagctcaacaaacctacccaattcatcgctagaattcaaacaaccaccaccaacatacaacacaggcttcttagactcagaaatcaacctaacaatctgctccaaatgagaatcttccggaggtttaggcatcctagacatataaccaggtaatctcatagcctgttcccaattaggaatcgcaagctgttgttgaatatctttaggaacatcaaccaaaacaggtccaggtctaccagaagtagctaaaaagaaagcttcctcaataatcctagggatatcttcaacatccatcacaagatagttatgcttcgtaatcgaacgcgttacctcaacaatcggagtctcttgaaacgcatctgtaccaatcatacgacgagggacttgtcctgtgattgctacaagaggaacactatctaacaacgcatcggctaatccgctaacgagatttgtagctccgggacctgaagtggctatacagatacctggtttacctgaggatcgagcgtatccttctgctgcgaatacacctccttgttcgtgacgaggaaggacgttacggattgaggaagagcgggttaaggcttggtgaatctccattgatgcacctccagggtaagcgaatacggtttctacgccttgacgttctaaagcttcgacgaggatatcagcgcctttgcggggttgatctggagcgaatcgggagatgaatgtttcgggtttggtaggtttggttggagagggagtggttgtgacattggtggttgtgttgagcacggcggagatggaggagggagagctggatttgataccgcggcggcgggaggaggaggatgatttgttggggtttagggagaatgggagggagaatctggagattggtaatggtgatttggaggaggaaggagatggtttggtggagaaggagatcgaagaagatgttgttgttgttgttgttgccgccgccatggttcaggagaaagatgagcaagagatagagaaacagagaagaagaagagacttgtgaacatgatttgtttaaaaatgagacttgaagtttaagggttttatgttggattacgaaaatgccctcgggatttgatttttggtcctttatttatagataaaactcacgtgacgctggaatctctagtctatctattgtatttgtgattgagccttcgatatgctaaaacctaaatgtagaatttgtggctgagaaatttatcaaattgatctttctttctttttttattggttaagagaatggatacaagctgcaagttggttccacgaattggacaaaaacatagtcctggtgatttgagatttagattttaaagatacttcttgatgacaatataatttgtatacatgaataaaaaacttataaggtctataaggaacaagagataagtgaaaatggaataagaatggagaatttggctacaaaaacaataacaaaactaagagcttcctcaaagggctgataatgtcgtttggttcgttcttctcctcctactcctcggagcattgcctgtagcgcgattcagagtttagaaactttcacaaatgagtgtttatctcagcatttcttgcatgaaacaacccaacatgcattacagaaacatggaacagagactccatccatgacaccagagcgaacgaatacagaacaaacaaaactcatgggacgaatagatataataaagatacaaggagacagaagcgtgtcgatagcagaagcaatggagacagcaaagcactaatcttttgagacaataagccaaaaaaaaaaactagctgaaattcatcctaaagtcttccactatctgatctataaccaatctacttctatatccaccaatatgattacaaattattgaggaatgaaccaagaatgtggtctagtcaaaatgatctttaaaggaattaacagaactattgaatcaatgactatatgtcaagtaacataaccaaaatgtagatatataatgcgagatcaattacctcgtaaagaaagtactacactaagaagatccaacgatgatgttgttgattgggatgaaaacgagcttcacgaagaatccaacgaatcccatcaccacaaatccaatcgccgtacgcacagctactttcgtgaattctgataaccaattcaattacaaatgatatcaaaatttcagaaaaccctaatctacagatcaaaaatcggaaatgagatttttttgagaaaaggcgttacccttgcgatcgggtttgtgacagcgctggacgagacgaacactgctcttagcgaaatctctgagaggatcgattgcggaatcaatggcttccatgacttctttttagatcggaattggtaatcgaaattagggtttcagcaggttcgtttaaggatgaaaattgggttttatttttgacatttggttttatactttagttccgttgactttcgcctccaccataatttctccaattcagatttgattcggtctgaacacaaagtccggtttggtttcttatttgtcttaatatcgattactttccatctataaaatatttttctacaacatcttaagaattataattgagtgatgttgatgctactattttaagtttagaaaataaacactaaaaagacaaatgtctcactcatcaaagtaaaactcttgaaaagtgcaagagctctgaaatttgagaacgaagacaagactccttgtttttttttgtttttttttgctaaaaatttaaatattcattattacaatgaaaatttcggttacataataaatggtaaccaaatcatggttccatgacaaaaaaggataaaaagcatggaagcataccaagactccttgttactacgtcaatctcttttatacgttttcagccaagattccggattatgaaagaatcttgggattctaacactttttctttttttgcttgaaagaggtttacaaattttaacactttttttttgttgaggattttagagtgaaacacatgttttgaactgtcttcaactgaacaattcatgttaggcgtctatataaccgtcggttattcacgaggtaactacacatgaacatgataaatttactctctcttttcattaaaaaaaagttgtacaacttaattacttatgtcatgaaaatagtatatacgtaaaagtagattatttttgtggttttccttttttttactataacaataaataattctatgttacctaaattttcttaggtagtataatggatcaaattgatatggagtaaacaaaagaaaaacttaaataatctggtctataatttgaagcgcttcaagccttcaacatcaatccgagtacgaacaataatatgagatttcatcaaaatattatcctggaaacgatttttcatttatatgcgattatattgttaatgaaagttggaaatacataatctagacacgtaaatgtcgtattgatcatgttgtgaaatgagctgtcgccttggtggcactttttggcattctctatttctctttccacatttaccacaatgtatccaaataggcaaatatataagcttagagagttggctgcacgtttttgctaaacttgataaatgagtcaatacaaccaatatagccaccatccatatctacaaatctacacttatcatctaaacttgaagaatatttgttattttatcactaaccacaaaagacaagactcgttacttaagttaaatgatagtgacatgattaagagaatattagctattaggtcggaaataagagaaataagactggtagtggtatggttatgtaaattatcagtacatgtatataacacttgtccaaataatggctttcacattacaagtcattctttccctgagactactgcaagaaacaaacacggaattctcgtgataaacggattagtacgaaggaaaaagtaaaatgcagtaaccaatttttatatttcaaaaaacaaggcattttggatgcaatgaaatatttagatatataaatttgactagtgacaacaatttaaagttgttagatttctcaaatccaaaaaaaaggaaataaataaataaatagtttatggctattcaaattgtgtattattttttctattggttaaaatctataaaagattttttttttattacttcttaaatttatgtttatagccaaaacatctaataaaatgggacagagaataataactaggaattcaaacacattatcaatgattagcagaataaaagtttggaacatctaaacctaatgactttatacttcccctttttagagtttactttgtatggaaaactttgtaagctaacaaacaaaagtattgaaatcgtgaaaaatagtaaagctttttgagctgcaatatttgatgcgttgaaacgagttggaaacagctttcactacactaaaaacaaacttaatctcaaaatttagatggattaaactcaaaactttttaattaattgaataggattttaggatgatgcagtgaatatagactatttggtgaaaaaatacaacgtaacgtacgtggctgctctaagcctatataacatagcccaagagagtcgtgttctaatgtgattaagtaaagtgagggagaagcaacgagagatagagatagagagatcaagatgagaggatctgatcagaagattctactgatggttatggtggttgtagcagttgtagctgcggctcaaggccaagaagagactactggattcgtgacatggggtaacaattactaccagacatggggacatcaagctttggttattaataaaacctctgagctccagctcaccctcgataaaaactctggttttctatctctctttctctctgtctacatgtgtctgtgtgtttgtgtctagtcgatgattgtgattggtctatgttccttacagggtccgggtttgaatcccaattgatttacggatcaggatacttcaacgtaagaatcaaggcacctcaaactacgtctacgggagtcattacttccttctatgtacgtgaatgaccagtaaacttaagtttgtctaaaaataaagatgatgagattacgtacctgaatagctttttgaaatctgtttttctgctatacggcagttaatctcccgttcaagccgccatgatgagctctgtttccagatcttgggaaagaatgggccaccgtatttgctgaatacgaatatgtatctgtacggtgaaggaggcaaagatcagaggtttcgtctctggtttgatccaacaaaagattaccattcctacagttttctttggaaccctaatcaacttgtgtgagtatcatataacactttttatcagatcatccattgattaacatcagtaacaaaaagaaaatgtatttccacattttcaggttttatgttgacgatacaccgatcagggtgtacagcaagaatccagatgtttactacccatcggtgcagacaatgttcctaatgggaagtgtgcaaaacggatcgataattgacccgaagcagatgccttacattgctaagttccaggcatcaaagattgaagggtgtaagactgagttcatgggaatagataaatgcactgatcctaagttctggtggaatcgcaaacagctaagctctaaagagaagacactgtacctaaacgcaaggaagacgtacctggattatgactattgttctgacagacagcgatatccaaaggtgcctcaagaatgtggaagttacacttagagaaagatcaatacctgtcacagggttaagcctacaaaacaattatcttgaaaaaataacttatgttactgtaagatgctttatgataagccttttctatcaaataacaacattattgtcatcaatgctagatacattactatgtcacgagttcatatacagatacctatttacacagaaccaagttggttcagatcgggtttgcttgaggtttacaagcactgaaacctctgaaaagaaccttacaggttacaagactgcattttctcagacatcaagataagtcaaatatgagaaaaaatcggaaagaagcatacaatagaaactgcacattagattatatatagttaggctaagtcgcagcaatgatggttttgctacaataacatatacgttaacagagagaaacaagagttttttttactcttctttaacgaagccttttcattgaatttaggcataatctatcaaacacatccaaaattcaaggcgaggtcgactaatatctgctatcttcaagcaggtcaagcatcatctggaatactctgagcttaactgcaaaaatgataccaaaacattgaaaggtaagtttaaggagccatagttcattgattcattcagattcagcagaagagcaagagaatctagttgtttgatatagcaatgtttgcaaattgcgatatgaaaacaattttcaaatcttgatgattacaggattagagattgtttatcattccaaatcctaaaaccttaataaacagagaaatcttggactaacatgattatatcccaaacaaaccagacttagagattgtttatcattccatctcctaaaaccctagacgatcatgtaatcaatcaatgtatatcacattgcacagaaaatgaaactttacccttggccgtcgagattcccttgaccggaacttccaccactaccataagagacatcatctcccgtccccgtcgaagtctgccaaacactctgccacgcctgagacggaggctggacataaacaccattcggatccatagctggtctcccaatcatcatccctccaggaccagctggttgtcccatcggcggataatagtaaggcacgccgctcgcggtaggagccaccaccattccaccaccgaggactgcggcttcgtccttaatctcatctctaggaacaatatcaacaaggaaatcgaagatatcagtcctagtaatcgcagcagcgatatcgtttttctgaagcgtacgacgtttattctcctcagcgtgaagccaagatctgatcgtgagctcgagaatgaaaagctcacaagctttcgcgaagagaatcggtgcttctgcggagatcatacgaacatcttcatcggctttcatgatcttttttatcctagctagtggaagctgatggtttttgaaatcgttaacttgttcgatctcttggcgttggtaggtccagaatagttggagctgttgttgttgttgttggagaaggtggtggtaagaagctcctcctcctgcggcggagatggtggttccaggtggtggaggagggattccggcggcggagggaggtggttgctggttgttggtatccattggtcggttttggattttgatttttggatcaaaaaggtcgtgacaagtttttgccaaagggattggggtacaagtggataaggtggacagcgatgtagctgatgattttctctcttttttttctatttcctaaattaatttttttctattttctatttcaagttaaattttgttttttttttacacgtaccaaagttcatatgcatccgaaatgaaccaaaagaaaacatcaagagtgaagagagctgtcaggaaaatgttgcatcaagagtgaagagagctctttatttccgactttgtctttgccatcgagtatcgtcttcaaggtatcatcgcatcgtatccgccatttactacacttcgtaatctacaaatgaaacaagtgagctctaaacaaatcataatctctaaacatgaaaatgcaatctatgaccaccaaacagagaagcaagcacaaggtccaaagccacctaaagacactctatattcgtaactggtgaattcttcatctgacagtgtatgaattgacaagctaagttttcaaaatatgcaatcagaaaagaccatttccacaaacaaaaccaaaacattcaagtgagtaaacaacattttcagcgtagatgtcaattactccaataatgaccaacacaagaatcaaatcactaccattctccagtctctagagactccaatccctaaatgcataaacatgtaaagaggagatcataaggaaagtaaaaaagctaacccaaggaaactcgagcagagtaacaccctcatctacgagcttgtgatcaaaggcataatctagcaattttctcaaggcggcgtcaaaagagatttcgctttggccgacgaatctagccagcggctctgagactttcacaatatcattgaacccccatttttctatagtacctccaccggtagccttcaccttcgccgacatagttctaacgttaggaaaatgtcgcaacaaaagctccgtcatctctctgactccgacgactttgtcttggccatcgaaaatcgtcttcaagttatcatcgcacagtatctcctctatattctccggattctacaaatcaaagacctataaatcagatacattgctccaacagaaagaatcagatcaaaagacctagaaatcaccaaaaaaaaaagtagaatgaaaggaaactggagaagagtttcgaaatccctaacccaaagattgtgatcatcggtatactgctccactttctccatggcggtggaaaaagagacttcgctttggccgacgaatctagccagcgactctgagactggaaaaatcttatgaattcctcctcttctatcaacgccggcgccggtagccgtcgcattagtcaccgccttcgccatcagtgtcctgcatcctcctagaatcttagaaattggcgacattgttgtttctccttcactccactgcccctaacaataaacaattgaagaaaagtctccaactaaagaaattgatgcaactcattttgggccttgttgaatatttatatatgggcctaattgggcttcagttatattgggagtttatgaagatctttcgattgctcaacatatcactaacattaacaatgaattttgtctatttctttgttcctcaattctagtttccatacataaaatcacacattttcagatcaaaacataggaagacgaatgcaaacaagatttttaatcagttgtgtggccgtgtagtgagcgaagatcgcatatcgacaatagcagatttatcggcaccaagcttcattgcctctttactagctctaatgaaccgagaagtagctcctttgacatactcatgagcttgtttcacagtcatcttctttccaatttcttccgggaagctactgaggaagtgatcaccattgagaaccgctgcaagctgaaccacttcaccttgaaactcagaaagagcagcgtcttctttaggctcagtggctctcataggtgcaacttcaggtagagtcatgggacaatcggttcgaggagtggttaagtgagatacaacgtcttcgaaagtagcagcccatgcatctctatgtgttaagaaattggaagagagattgaagagtttcttgattgtcgctggtattgatgaatgctcgtactctgagctctctgttggtccttttgcttcacttacgacttcattcaaaacatataataaaataagatgttattaaactatatatagtaaaaaaatattaaaatcaaatggggtcaaaggatggttgaaaaacatgagtcacgcaacgacgccgacaaattataatatactccatctttcaatggcataatcaatggattcaattattttctccaccattattaatgaatacaatcttatagttgtcaaatgccatccatgtgatttggtttttgcagccttaaattttgttagcaaatgtcaaaaatctgtcggaaatagtagtagaaagtggaaatacatgaaatacaaatgaatttctttttttgggttaaagaaatgaatagtttcaatattaataattcataagtgaaaaaaatagtacgttaaataggcataaatactacatataagttttttggtcagtagtttcaaaactatttatatatcaagttcaaaagcggagtgttcttgttaatttggaaaaaagcttgaggattctactaaaaagcaatgcacactaagaacaaatttgtaaaattataatagagaaaaagagaactaaccggttcctttttgaatccaaggcgaaaccataatggtaggaacacgaacacctaaccggtcgaatttaaagaaaccaggagccggtccagtattcccatcgggatttggtataccgacataaggagtcttgacgtgatcatagaacccaccatgctcatcataggttataactaggagcgtctcgttccactgtggactcgacctaagtgcctcgtacacttctttaaccagcttttgaccgttagccacgtcatgcgacgggtgatcatcgttagccggtaaacctttgagatcgaaatacctcggttcgattacggttaagctcggtaactttcctttggccgcgtctttcttgaatttcaaatcgtattgatgcaaattgaaaatgtactttagctgtcggagattacggtagaataatgtggtcggaatattctgaaagtatattccgaagtcgatgtcgttgctatgaagcgaatcaaatatcgtcttctgtggatacctgaaattaaatgatgaatacataactatgcaaaattttataatagtttatattatctcaatattttctatggaaactaatcttaaaaattcagtaatcaagtgtgaaattaaactaatgaaaattaacaaggactaatgaaaataataatttaaagaaagaatttgataatgttacccttgagcgagttgtttcttgacatggctagtggaaccatgtgaggtagccgaatagacaaataaccggtttggttgagtcggaccgggaattgaagaaaaccaccggtcgaacacagcgaattccttaaccagctcagcataaaccggaacagcttcaggcctaaagcctttcattacagtctccgacaaatttcccggcatggaaagcgcttgctcaacgaaacccatcatggacgggatctgacccggcccagacccgaatacttgttgctcaacagcttcaaacgaatgacccggatccggatccacaaactcagcatcactagtgaaacatatagtttgtgtagaattcggaaccgggttacattcttgacccgttacaccgtttattgtcgggtttactgagttcttcatccatcctaagagatgatcgaaagatcgattctccaacactaaaacgacgacggttttgattggtgattgccattgatgagatccttgagctacatgtgtttgtgtgagaagacagtagagtgtgagaaagtgtgagaaagttaaagaaaatcttgaagctgatgatggtttcatggatgggttttttcttgggaaaaatctggttaagcttttggtgtagaatttgtgtctgtggttttgttttgccttagattggttacatgaaagaagaacataaagacagtggagagataattgtctctttgtaaccaaaatacaaaaagataaaaagttttaaatatatagtattataaagattttgggtaaatgtgaagtgtagagagcaagaacaaaaaagctgtggtgtctatttactgctttatttgtttccactactactgctttgatttaggtgggctcgatatgtagaagaagattctgttctcactgagaaaaagtaactaaaaacgcagagatttactcggtcaatgaaattcttgaattttggctgattttattatttgtagctatattataaaacttggaaatatatatgcacgtgaagtcgtgaagagttggtcttgagaaaaccacgtagatgacctcagggttgatgttgttttcttgtagattttagtgttacaagtggattcctagagttctaaatagtttactagttgtgagagatcttgacaaatgtatatcataactttaaaaacataaattggatccacaatccatacaaatgtttataactttatatctgagttttttttaaggagtattgtataaattctctgtaccaagagtatcggaaagtagtattaatatacttaaaataattgaacaataaatcatcatcatggtagttacttttgtctaaggtgccccactgatcttccattaggaaaaaataattggaatttgggagttaaaggaagaaccaatgcttagtgctttttcattctccaaatttctttagtatttttagtttttctgcctcaagtttagtgtttttagaccatgtacataggtgatataattagagtatcaagagtcacaaaataatttttaatatatcaaacaatagatttaggcctgatactgtatcagtgcagtgattcttttgatacccagtatcggatgacgtggaggcttatgattcgtctgtgaaattcgtttttttctggaaaaaaaaaaacatttttctctccgatagtctttctactgttttagctaagtagctacattttccgcaagtgagtaattttgccaacttttcgtgattatgcgacataattttacagtaattttgtaactctatatttttataaatttattttttgattttgcaaatatttttttttttaatgataccaatatcggtatcaccactggaaacaatttattaccagtatcataaaaaatctcaaataataaataaacattaaaattaatattaaaatattgttaatgatactcatagtgtatcaactatgtgcatgctctaaaaattgttagtttaccatatatagtttattttgtgattcacaaaacaacggaataacgaaattatttcgaattttttgtaaattaaataattacgtaaaaacgcattagaaagatgttgaggaacaatttcatttcttcgctcttaatcaagaccttattacaaaacaaaaggaaaaatgtgtaggaaaaatgatatcaagaaaaagagtgaagccaaaaaaatagaagacaaaaacaagagactggaaagaatcgccccccaccacaagttcaccactgggctcgtgagtaagtgaactgatacctcatgcaaccaactagatttggtcgtgtgaacacattcatagtatatatttgtcaattgaacataagctttttaagtttgtcttctaacccattctaaaaatatatttaatctctctcacccatagtactgaattacaaaggttttgaatcgaaggtatattataacttttttttttttgctaagtttatgatttgcattatgatcagcgttcacatcttcggagctaaactttttttaacaaaaagaacatagtgaatttggctacgccactgcatttagcaatcgaagaagcaattatatttgctggaggcgccacgccgccaccatatgaaacacatattcagtcactagcagtcctctttctttagtgattggcaggcaagttttgtgacttaatagtgttggtgttcatataatctgcagaactgaaatggtcatatctttcttttctgtttgagtgttcatttgggtctgtttgttgcagcctctgtatcaaacatccaaatttgtttcgaggaagcgagaagcttgatgtttcatgggataaagggttgtatgattccaatgtactggtggcttttaggagacctagacctgaatggcgtccgcaacagtgcttcttcatacaggtactcaactgatcggtgaagctatcttagaaagtgaattttccaaattatgctatgttaaatacattcaatttttttcaacctggtacagcattctctttcgccagagataggggttcatggcaccccagttgacaacttttctcggtcagggagtggaggtgtaaatctttctaaattggctgttggtttagacttgagtgagccagcgagttcaaaatggagcagcacaaccagcgtaaagtttgaggtacccggacattaccttcttcagacattgtagtacaatatttttctctttgctgttttttgctttggtgaaaaagagtattattttccattggtgcagcatgtgcgtccgattaacgatgacggacgggcgatatcagagatctggacggatttcctataacatgcaggtgatattggatctcgcttcccttaatttgtttccttaagctctagcataaaactgatatttacatgtgtagaattctctgctatgcagtggaaatacccatgacagtatggtagttttaaagcaagaatcccggtttgcaaaggctactgaccaaggtctttctcatgtaagagactcatttctgtttctagcctaggaaaaccacacggccatttttgcactaacttgtcgacgttacttatctttcatactggtttcttgctttttcagtttagtatgcaaatagaacaaggtattccggttgtgtccaactggcttatcttcaaccgtttcaaatttgttgcatcaaaaggtgtcaggtttggaccggcttttcccttagcaaggtactgacagaaaatcttacatactctatgtaaacaactacacgtagaaaatgctttgtaaagatatcctagttttgcggtggttcttacctcttccgtgacagcttgacaggtggttcaattgtaggagacatgacaccttatcaagcatttgccattggtgggctaggcagtgttcggggatatggtgaggttgctgttggatctgggcggtcatgccttgttgctaatacggaattggcggtacctttggaacgtggagctgttgcatatataatttggtcttcagaagcatcaaatggtttcccctgttaagttctcattgagctttggttccttttggtgtacagaacaagatgacagaagggaccatcttcttggattgtggaacagacctaggctcaagccgccttgtcccggtaagttcactttaccttctccgaacaagaaccataaagaagttgttgagacacgaaaatgataaagctgttgcggaattggtttcaggaaacccttcgctgagacaagggaagccggggtttgggtatggattcgggtatgggctacggttcaagtctccattgggtcaccttcaggttgactatgccatgaatgctttcaaccaaaagactctttacttcggtatcaccaatcttgcttcatcaacatagtcaaatagaataaagcaatcaagaaaagcacatattcagtaacttgattcaaggatatatttgcatttgcgttggagccagaaacgtcacaagatgaggcatacacagtctaaggagatgctattaaacaattgacagagatcttgagaagataaatgaagtgttcccatagtaatcagtcatgtaatattacaggactaaaagttttcattggtttggtatatacagctgccagagttttgtctgaaagctgcaggtttcatagagaagagaacacatttgatctgatggtgttgcaaatacgtacgtatctattgcttttacatatatacgtaactatggctgactcttgactaactctggatacaagtggttgaaccaaaccatatttgcccagaatagggacattctagttcctaccacaacaatttccgcaaattcgtgttacatttcataaaccattagagagtctcaccaaagagattaacttacgtgatacaagcaaacaaacaaatacaactccacaagaagctcagaagaaattattgagctgatttgtaagtgagctcttgaggtttgaatacaaaccataaagagaatactgcttaagattatcaacttcataccacgagttgagaaccgccaagtgcttatcagtgccggaaaacgccagctgaatcccaagactacagcccactgaacctccccggcctttacagctcggtgttcttatcgcacaaacttgctttttaagacacacaaaattctgattccctttacacgacgcacacacgtctctcttccaatacagattctgaagcctacctttctgaaactccatcaccttaaaagtcataacaacaccataagtaagatctcttgacgaatctatacataacatgtactgtataagatatgatatacaaaaagctttacccaagtaaaactggttacgataaacgtgctgttagcaataaaagccggatcgacctcgctgcgtatttccgacccgcgagtgccaacattatacatcctactatattatttgggaagtacattttaaatgtaaccttaatttttgtaattaattacatgataatgccattagaaaaatttaatcaaaaacaaaatcttttaatgacacattaagattaccaaaatcatttaacgacaatattcatctcttaattataggcttattggatttaaagacgggtcatcaaagagtttctaactaaagcaaaatatactgaatattcaaatatctatctattaccaaattataaacaattaagttcgtaaaacaatttaatattttatatacaaaataaattaaatcttaatcacataaaaattagcacaaaaaaaaatattgtacattcaggtctatagtatttttgcaagacttttttggtggatttgggtaaaagtgcattcaggtcatatggtacattcacctattaaataaatatggtgcacttctatgttattagctaaaatgtttagattataattcagagtcatatcataaataaaattactattaataaaataaatggctttttggcaagacggatttggagggacgggtttttgaatcaacattaataaaaaaagtaaaatataattaatccaccatttcaatacgggttaaatctttaatttattattttttaagatcactaatattaaacatatcaaatcatcctaatttagaaaagattatataaaaccaaaaatgttatgtagtatatataatgttactatatataaacttaaactataaaatataaatgtattagagaatgatacaatttgcaaaacttttatatagaataaataattcttaaattttaaaaattactactttaaaaaaaaaattacggaacgggtaaagaaattacataacgggttttattttggaattgggttatatggtgaatgtatttgaatcaatatttataaaattttaaaatattattaatatgttgttttaataagagttaaaacttcagttttttaacaattgtctcatggattcgtggtatagtgttacttaataacaattataaactgtaaaatataaatattttataaaaataaaatttgcaaattttaatatatattacttttaaaaaataaatcatcccgcggtataccgcgggttaaaatctagtccactaattaagggtccatgaatggtcaaatcatacttcaccaaatctgaattcactaccaattcaagtaatacttattataccaatttgcataataatttcacataaaaccaaatctggtacttttactattattagtacagactatgaagcaatctaattagtggtaatctagtgaggtcaacactaaatcttcaaaaaaaccaaagtcaaccaaatctatactctgaacagagattaataaaatgtgatttaactaaactaattcgatttattaaataaacaaaaaattgatagaatatatattatcttttcgttagaggttccaagccatactctcaaaatgtgaacagaactaaatcatttgaatctctcattcacttctctacataaaccccactacaataatcacaaattcacaagctactttcttcttcatctcgacaacaaaaatccaaatacatgaaacaaacaacaaagaactgagagagtggtaatatggtcctactataaattaggacgacttaatactttaccttccatgtggcttaacacgactaggagctttatcgccttcatcgcttcaatgtttggtctctattcccttagaatactcatctttctccattaacgtctttcccctcgcattggcagccgttccaagcgcaggagaagacatggttaggcgacaacagggagaaatttagtcgcgagaaaactaatcgccactctcccccttatctttgcatgcttatgcttcttctcgagcacttcttccagctcacggatcttttctaaaatcataacatgatccttgtagacagactcgtactgtgccacaaactcgtttgtgtatatgagcttgttgaataaattcaaggtcttgttgttattctctaaatagagattaatcatagactttagttcttcgttcttagacacatgttcttcgtagtcactaatgtatcttgaccatagcttggtcaaccagaatcatgcagttaccattgatattatactggagctaatatggaatagaaaatcaagattaatacttaaaagcaaaaaaaaaaaaaaaaaaaaaaattaccccaacttttgataagaattttgctcaagagaagagaatgttgtgtttctgatctacaagtattaggtactggatattacaattatataagcaacaaaatcaaaagtcagtcaactttgaaactacgggggaaaaatgtagacttgtcgcgattcataatgtggagagaaaattcaatcttggtacgattataactacgtaaaccaatagtcgagtcaaccttgtaatgtaaatgtgtggcacacaagattagatttgactcgcaagaattctagatgcgaaaacccttttgaattgaagcttgatctcttgcagagatagagcaaatctaaacagagaaagtgagagaattttattagaaacttaagtcgaaacatcatgcgctctcttagccaacatattagtgactcatgattcaaacacttaaaatacattgatagttaccacacaatacattcaaagttgggtgacactaatcgagaacaagaacacaataatctacatagaagcaaaatacatgaaacaaacaacaaagaaatgagagagtggtaatatggttctattacaaattgggaagccattcacaccattatttgcatagacacaataattaaagactaaatacttaatcttcaactgtggctctttatcttctccatcgcttcaatgttgccttttgttgtgtttccaatcaaccgagacaaacctaacaatgtcgtctccatagaattatcttcttccatcgtcaatttatagagcttcttcgccacctcaacgcccctttcccctccctggccagccattccaaacgcgggatttaattggcctacgaccgctacgacgaaacaagggataaagataaccgcgccaaaaccaaacttcattatcctttttctctttgcatgcttatacttcttctcgagcactacttctagctcacggatctttcctaagagcatgacatgatccctgtaaacagactcatactgtgtcgcgaactcgtccgtgtacatgaacttttcagataacttcctagtcttggtggtgacatgatcccagttggtggtgacatgatcccagtaaacattaacttgacacacatattgtgtcacgacctcctccgtgtacatgaacttttcaaataaattcaaagtcttggtggtattctctaaatagagattagctatagactttagtccttcgttccaagatacatgtaggccgtttgtagtaatggtattggccacatcttggtttaggacctttaggtcagccagaatcttgtagacctcttgaaccgatggcattgatattatattggagctaatctagaaaggaaaacaaaacaaaacaaaatcaagaaaatttaaaggcaagatagtttttgcatacatcaagtttaaagttagcatcataaaaattagcaatcaagcttaagttgtttgagatttattataataccgtgtgaatataacatagtaataatatttaaaggcaaggtccatgagatgatcaagttgagattgggttgaaggaatagaaaaattagctcaactttggataagaatcttgctcaagattagagaatgttgtgtcaccgatctacaagtattagctactggataatcgttatatagcaacaaaatgaaaagtcagtcaaccttgaagcaacgcggaaataatgtagatcttgtcacgtctcataatgtggagaagaaaatttaatattggtatgagtataaatgtacttaaatccaatagtcaagtggaccttgtaaatgtttggcaaagaatcagttttgttgctattttagatgaaataagtttactaagaataaaaaaatcgacgaaaaaaaattataattcaacaaacaaaaaaataagtaaacactttcaaaaatttgactacataaaaaaacaattaacaaaatataagtagactattttaaaataaatcaaaagaaataaatttaattgacaaaaataaaatttaactcgacattttataaatagattttatgataagacaacgtagaataaagtaagtctacggtgaataaacaagtctacacattaaattaaaaattgataaacaaaaaaaagtaagtcaacagttcaaaagatttactatgttataaatcaactggccataacataagtcaactgttttaaatctagtcgacggagacaaaaattaaatcaacaaaagtgaaaaataattcgatagttcaaaatatcaaccttaaaaataaatctatatagaataaaataagactaacaaaaaatatcaaaaatatatgtacacagatttttactttaataaatataaattatataattttgaattacttattcttgaataattaataaatctaaatactattatcaacttatataaaaaaaattaaacgagatagtgattactttaaatatagtatattaattttgttaattatttattattaaattaaataattacgaattttagttaagttatcaattatttaatttatttttagttaatttatttaaataatttataaataaataaaaagattattatggttattgaatgtagttttcaaaatagtataacagtgaatgtagttttcaaatttttaataaaatttagagtatttataaaaatttcaaaaaaaaaggaagtctattcgttttgtgaataagataaactttttttttatccagtaataagataaactttttaactacaaaaaataaactaaataatagaaactaaccgttttattaccgcgacaaaaatgaaactaacgaccaaaaacagagttgttgttgttttctttttttctttctaaatactgtaagattaaaagaagaagaaagattcgatttgctagaagattgtgattatttcccagacatttacaacttacaaggttggcttgacttctgatttgaggttacaaccttaaccacattgcattttctgtcgatacaaaatcggatgtttctcctcgtaatttccaagtgaatcctcgcagtttctgctccatattgcattttctgtccatacaaaatcaaatgtttttccttgtaatttccaagattaaatcttcgaggttttggttacttgttttattattgttccaattattgttatttggcaaattatttcttaaatttaatttatcgataaatatatatatatataacagccaaaaacaaagttgtttcttattctgtcgtcatggaagattcgattcaagagagcatgtttacccatgatattataaagtatcatagacttaaatcaattaaaaagttaattttggggatcatttttctttgatttggatcactcagtgatctatttgacaccgttaatttctcaaagtttaaattattaaataactaatgctaatgatattttatgaagttcattgataaacatgctctttatgatgcttctaaaccgatgtgacaacaagattgagtctatgccacacatttatttacaatgttgaattctaataaaatcgtaaaccgttgaattttctgtccgcgttgataaaatcaactgttttctccacgtactttcaaggttgactgactttaggttttttttttttttgcttatatattacgtaatagttgtagatcagagacacaacattctcctgtcttgagcaagattcgtaaccaagttcaagtaatttctctttcttcaacgtcatctcattttgatatttgttatatcttccttgtatttaagtattcacaaggttatattcacggaattgaattagtcttaacaaatggacccttgttaagctgctaattttcagtgatatttacttacacttggtgtatgcaaaatattctgaaatctttgtctttaattttcttcctttccaggctagctccagcataatatcaatggcggcgttggttgaatttatctctgatcgtgtcctgagttcttgcaaatccgcttgcaaagaagatccaaagctcagatcctatatttctgcgcttcgcgaacgaatggacaaattgatggaaattaaacggtcaccggtcgaggaagcaagactggaaaaccatccaaggaggactcaatcattaagatcatcgactttttagctgtctcaagccaagatgtggtcaagatcattaaagaaagcaattatgatttctcgaagaacaaagacataaagtctgtgattgatctctattttgagagtaccaacaatactttgaatttagtcaataccgtcgagaaatacgtagcgaaagcaaaaaccaccacgttcaacatttgacttgcgatccgacagtttgaaagagagtcgagggacacggattttggaggaaacaataagtacgcgggaacgttagagaagctgaataaggttaaagctctgggagatctttttggtgacgagttcacgactcagtacaaggctatctacgacgagcatcagatgcttttaaacaagtcccatcacatgcaactagagcatgagaagaagcataagaatgacaagaaatccaagagattggggtatatttttttcgcggctgcacttttatctgttctcgccttatggatttatcttggagcagtctcacttgtggtagcagctaaggttgtgattgaagtggcaacaccgagtattgcacctttatggaaatgggtcactgagatcctcgaggactctgagtctgagattgcttacaagaaacttactgatttgtttcgatcgatggataaaaatgcaaacctcaacatcgaatttgcaaagacttttaagagcctagttgagacgttattaacaaggatcaagccgatcttggagactgtagattatgctgtggagcaaagagaagaggagaccgtgaaacttgttagcaagaaatcattaaggatattgaaggttttgctgacaaaatcgaggaagttggtacaaatgtggctaggtgtagcaaagtggtcgctgagggaagagttgatgttctggaacacataagcaatttagcttacttgaaaggagagtggtgactatcaatgtactatgtggtaatacttttatattcatgtttgttgtgtgcaagacccatattttgaatgtttgaataatgagttactttgtacttgtatgatcattgcattctatatccaaatctcatttattatgttactgataaaaaagtaaatgaggattaattgaaaccgaccgttttatcacgacaacaaagatgaaacttaaatagaccgttttaatacaactgaaacagagtgacgaaatcaaaactgccaaaaacaaaactgtttcctcttctttacaagatcttgtttcacttctaaaatttaagatcatgttgcctagaaaaccaactgatcaacatagctaagacgaagctcaatgggtcatcaatgtccgaaaatctctcgatgcagagttcgaagaacacgataacgaacaagtcatcgtaagcattttcaatgttcctaaagcgctaatgagtagccatccagattcatacacacctcaccgagtttcaatcggaccttatcactctctaaaacctgagcttcacgaaatggagaggtaaaaactcatgatcgctagtaaattccgaaaccaatctaaatctttcaagtttcatgatcttgtagagaagttacaatccttggagatcaagattcgagcttggtatattaagtacaatgctctacttgtcgtgtagttggagtacctctttctttagttgtaaaaaataagatagatcataactcaaatctccaaaaacccatagatcaattagattgtgaacaagacaaaaaaaataaatgcagggagaaattataagtgtaactgcagtaccaaattaaagaagatgattgtcataatagtgagttcatggtacaacctatttcctaagatgttaatatggtgattggattatatctagttacctaacaaccttaaggtccttccagttgtgccggaaatgaccgaagcctaaccagcagttctcaactcactttccagtatggccaactccctctgcaaagaatgttacatacggagacagaatcgattaaatctaacgaggaaaaatctatctcatccataaaatgtaacaagatcaagtctatctcatccacatatgtacaaacattcaacatcatcaatcaatcttatgactcacctatacctccacgtgcccacaaagatctcagtccgtctcactagtagaaaataatggtggagtcattgccggtttagcagcggatctcatgatgtcaatcgtctcaactgcagcggatctcatgcaggattttaaaacactcgttaaagagacaaagagtgtcagttaaaacactggaattgttttagctgatgggagacaaagagtgtcagttaaagagggatcagtgaggcttgggccgaatctgacactaaaatcaaatctacaactatcaaaaacttatggaacaaccttaacgacttcttgttccaaactgcccgcatatctcgctaatatactcgggtgcaattgcttcaggactgatctgcggcgatggaatctggaccatcccatccgctattctttcaatattaagaatcaatctacccatctgtatgtactttggaccatcctagacattgttatcatgttaaaattttgttgcattatagcaaaaaatagagtttatccgtctcactctatctcataacatgacattttaagtagaagaacacagaattataccaataaacatcttcatgtgtgtggcataaagtcaaacagtcaatgttgacctacgaaactttaattgggcttcttctataagctagaattgtcacgagggaggaatgttttcaatattactagcactttgctatcgtttttggctccaaaaggtgtttggcgatgacaaatgcattacattgatgtaatgagattttgttgattgcgcattcgttcccattttgtatgtgacttttttttttttgaatggttaaatctaatgaatcattccgaaaaaaaaaaaacaatcaatcacaaccttatttttctaaaagcaaatgaaaatgtgatatgcaatacaattcttatatccctaaattttaatacaattataatattattaaaacgtaataagtcacaagaaaaaagtattttttcacaatataaacattattacgaatttgtaacgatttgtgaatggttggaatacaatcgtcacaaattttatttgtaagaaaaacatcataaaaattgaatcaaatatatctattaaccattttcgttacaaatagttaaaacaaaaaaaaaagtttaaaaaaaactctcaataacagactaacatcgtcataatttgtgactaacatatcgacttaattttagtaactcattattacataactacagtctcaaatggtcacaagtgatgactaaaaatttgttgcatattcgtaacaatattactcaaaactaatggtattttgtgactatcataatgctccaattccatcacccactataatatattagtttcaaatagtcccaaactattactaaaaaaaatcatcggatatggttaaaattataaactaaaaacataacctcaaaacactattctttattaaattattgtcataaacatacatatttcttataataatatatatcttagttataaattataattcatctccattcttacaacacaatcacaaatttgacgataactagcagagaatgtaaggatttgacgattactctcatatgataacctctatacagatgatttcaggctctctggaaaggtaagattcaattattatttttctgtaaacgtgattataaaagggtaaagccctgttcttttcattgtcgctgcatcagcgatcggcgaccaagaattataactgagttgagacacgtgtctatggtgagtaacaccggcaacaccattaaaacagtcgcagcgactccttttcaccattccaactgtcgctcatttttccagcgacaacggcgatacccgtggaagtgatcgcatcgactcttttttaattattctccatttatgtggaaattctggtcgcttaaagctatcgcagcgattttaaaccgaacagggcctaagccgtttttctagaaaacggttcaaatagcttgacaaaatgctaattgtgtatcacacctatactcgtgataatttatataaaaataatttcattcatatgttaatataaatgacatgtttacttagtctatatcaaaattatagaacaaatttcgagaaacagaagaagagaagaagccatgaagctaactagtacagtcacaaaaggacgacaccgtttcgaaattgggccagagacaaaactaaactggatcttaaatcagcccaagccgttaactataaatttgttacattagtcacggactcacgtgtcacgtccttcgaaaacaacgtatccgcacgtgacatcgccaccggcctttttttttttttttcacaccgcacgaggaagtttaggtttcttcaaaatcacaaaaccaaacaacaacaaccaaaaaaaaaaaactcaaaccattttctctctaacttctctgtcatttctctctctagtggcaaagtatggcggattggggacctgttgtagtcgctgtgatactgttcgtgcttttgactccgggacttctctttcagattccggcgagaggtcgtgttgttgaatttggtaatatgcagactagtggagcgtcgattctcgtccacaccatcattttcttcggtcttataaccatcttcaccatcgccattcgtctccatatctataccggttaatttcaccgtaccggattcgtaacttcccccggttgtctagttttatggtttgttttggattttgtttcttctctgtgtcttgtcaaaacgttatgaatttgtgaatctgaatatgcattaagttaatttcaaaattcgctatgtttgattctcggtttggtttaaatctggttatggcgttgatttgaatttgatggtaggcactaggcagttagccttagtttggtttattggtattcgagttcaaattggaattgagtactaaaatgctctgttactcatttctgcatcttgagttcttatggatttgcttacgaaatgttcaattttgtttggtctggttcggttcgttctgaaacgaatgtcgagagtcttttgcttgactcgaaacttgccttgtgtcagcgtgtaggggtttgtaagaataaaatgggctttaaaattaagttattaatgggccaacacatgatccaccaagaagaagtgatccggttgcatcttagattctcatgtgatgtgattgaacgttgaaagtgcacagaagtagacctgtttaaagatgtttcacactttcactgcgtactatgtaactagtggagtcagtcccgtcatgcgtatgagtaaagcgcgtcgataccacgggaacacacaaaaacatgtcaccctagtaaaaactgtgttcgttagctcattgtaaattgcagtatatggcataaacaattgtttctacaaattccaagaatgtaagaatcaagacaataaaatgtgactatatcaagaacttaactaaagtttcatccacttaaatgaaaaagttgatttggatagaacaaaagacgtaatattcgatgtgttctctctctctcccatctttacttttattgactttttattttcactttaatgtgtgatgtaaaaataaaaagtaattatttgttcaaccctaggtgaaataaaggacgacccaaaacaagtgacgagagagcagagagagcttcttcttccggacactgaacagtgagagcacccatctccaacctcttcctgtaagtttccccaactactctgtttcttaaatgttctgcgttctttaaaacaaagtatagaagatttaggttgtaagatcgatctcgtttgatttcaaactcactatctgaaactctttgattacaaacccatcttcataatctctgtaaaaatcaaacatgcaattcacttaatggtgcaaaaaccccagaagagggaaaaaggaatcaaatttagtttataaaagcagtggaattgagttgcattgttgaaatattcaaaagcaagatcagatttttgataaagaatttcacttttgattgcaacttataatcaaggaacaagatgggaagcactgtgattttaagctcagatgatgaagattcagatattagtgaatctgaaatggatgagtatggagacaaaatgtacctaaaccttaaaggtgggaagctgaaagtgagactctctcctcaagcttttatctgtccttattgtccaaacaagaagaaaactagttttcaatacaaagatcttcttcaacatgcttctggagttggtaatagcaattctgataaaagaagtgcaaaggagaaagcaagtcaccttgctcttgtcaaataccttcaacaagatcttgctgattcagcttcagaagcagagccttcatcaaagcgtcagaaaaacggaaaccctattcaagattgtgatcatgacgagaagcttgtgtatccttggaaaggtacacactttaaaggttcttacttttctccttaagattgtactgcaatgtgtgtttagtgtttgtgtatatgtggttgaaacaggtattgtggtgaatattccaactacaaaggcacaagatggtcgatctgcgggcgagagtggatcgaagctaagggatgagtatattctaagaggatttaacccgactagagttcgtcctttatggaactacttgggacattcaggaacagctattgtggagtttaacaaagattggaatggacttcacaatggtcttttgtttgacaaggcttatacagtagatggtcatgggaagaaggactggttgaagaaagacggtcccaagttaggtctttacggttggattgctcgtgctgatgattataacggtaataatattattggagaaaacttgaggaagacgggtgatctgaaaactatagctgagcttacggaagaagaggcgaggaaacaggaattgcttgtgcagaacctgagacaacttgtagaagagaagaaaaaagacatgaaggagattgaggagctttgttcagttaagtcagaggaacttaatcagttgatggaagagaaggagaagaatcagcaaaagcattaccgtgagctgaatgctatacaagaaagaacaatgagtcacattcaaaagatagttgatgatcatgagaaattgaagaggctgttggagtcagagaggaagaaactcgaaatcaaatgtaatgagttggcaaagcgcgaagtgcacaatggaaccgagagaatgaaattgtctgaagatcttgaacaggtatccatttactctctgtatctctcttttcaagatatatgttcaagaaataattggtttttttctcttatcagaatgcatctaagaatagctctcttgaactagctgccatggaacaacaaaaggcagacgaggaagttaaaaaacttgctgaagaccaaagggttagtgactttcttcttctttgtaaaaatggttgggcttattttcgtgattactgagaaaattctgtacctaacagaggcaaaaggaggagcttcatgagaaaatcataagactagaaagacagagagatcagaaacaagcgattgagctagaagttgagcagttgaaaggacagctcaatgtgatgaagcacatggcatcagatggcgatgctgaagttgtgaaagaggtggacatcatcttcaaagatttaggtgagaaggaagcacaactcgcagatctcgataaatttaaccaaactcttatccttagagagcgcaggaccaacgatgagcttcaagaagctcataaagaattggtaaacgtatgtatcattcaaagtgttgttcttttcaatcacatcgaaaagctatgagaaagcttgacattttactaaaatcttggttttgtttgtttcatgtgccttcatagattatgaaagaatggaacacaaatatcggtgttaagagaatgggagagctcgtgacgaaaccattcgtggatgcaatgcagcagaagtattgtcagcaagatgtggaggaccgagcagttgaagttctccaactttgggaacactatctcaaagattcagattggcatccattcaagcgggtcaagctcgaaaatgaagatagagaagtggtaagaccgccttcttgactctgtttgttatgttgaatctctctgaaagattaaaaagcttttttggtgttgttgttaattgtgtttaggaagtgatagatgatagagacgaaaagctgagggagctaaaggcagatttgggagatggtccttacaatgcggtcacgaaagctttgttggagataaacgagtataacccgagtggaaggtatattacaacagagctatggaacttcaaagcagataagaaggctacacttgaagaaggtgtcacttgtttacttgatcaatgggaaaaggcgaaacgcaagcgtggaatggcttagaggtttaaccatttttgataaccgaacaaaaatatgttttcatttgcaattgttatttgctaatataggatttcgattgatggtttgcagctgcaagatgatggacatgggactgaataaaaagccgatgcggtttttagttgcagagaaatgtgtttggtttgaccaaactttggtggattctgtttgtttttcttctcagaacttagtgaataattgacacaactttgatgtcttgcatcggttcttttcattgtaacatttgtaggagtttggccgctttggacaataagaaataaaaatatcattgtaatataattcacatgtaaaacaactagatttggcctctcttctgtctcatatcttaagcatgtcatttagaaccttttattgtaaaaacaaactttgtcatgagttactttttgtagtcaaatttgatattgaccccttccttattatgctaacactgttttcatcttataaccctataaatctaagtttcgtgaatatagccaaaatcatctacatcattgcaaagaaccttaaaggagaaagaagaaaaccggcttgagagagatggaaaacaactcaggagctattctctttgtgatcttagctatgaccattgttcttcaagtgaggccagggttctctcaagcactccctacgatccccggacttttcccaccgggtcttcctattgatatcataaaatgttggtcatctctctttaacgtccaaggatgtgtacaagaaatctacaaatcgatattttctggtcagtttgctagcattgaagccccatgttgtaaaacgttttcagctatagatacaaactgttggccacatatgtttccattgaacccattcttccctcctattctcaagaacaactgcgagcgtattgctacgactccatcatcaacacacaagtgaaggctacacacaaatgttgcgagccagttgttagcttcgaggtttaagaagttcttttatcgatttgagagatcacaatgcccaataatccaaaattctccttgcagtaatttttttttttttgtaatctttagcttaaaataaacaaagctaagctttttgatgtactcgtatgtgtttgccatgtagtttgttaaaagagtggttataacataaacaaaattttgtttgcgtttatatatgaaaatattgttcttacactatggaataaaacatatttcagcatttaaaatttgtaaaaacgacgaacacgaacgcatatcaataccataccaaaaagattatatcgtacatgaaacttgttgcagacaatggcatgactaatgggcctctattaacttagcccataaggcccaataaaactttccaaatagtttcatttttcagattttgaagaatctcccgacgactcctctctgtctcctcctccgggaagctttctgtctctctctctctctctctacacaagaccttgaagaatccgattccataacaatggcgacttcgttagcacgaatctctaaaagaagcataacatcggctgtttcatcgaatctgattcggcgttacttcgccgcggaagcagtagcggtggcgacgacggaaacacctaaaccgaaatcgcaggtgacgccgtcgccggatcgggtaaaatgggactacagaggccagagacagataattcctctgggacagtggctaccgaaggtagctgtagatgcttacgtggcacctaacgttgtgttggctggtcaggtcaccgtctgggacggctcgtctgtatggaacggtgccgttttgagaggagatcttaataagatcaccgttggattctgctcaaatgtccaggaacggtgtgttgttcatgctgcgtggtcgtcgcctacaggttcttgttctttgtcattttttcggaatttgagtctctgtatggttccattgtagcttctagtttgagttctggatatccaattgctgtagttactgcttgctagctaatggaatcattgatattggaatttagggttttcattttcatcttccattttgattatggaaaatgtagagtctcacctttaaggagattttacacttttatctgaagtagtgaagtgtaagtaagcatatttgtttggagtgaagatgtccccagatcaagaatcatgaatgatatttgttcagtaaagttaatcttcagagcattttgcgtttagctagacaaggatgcatagaattgcgtagttctttaggtgattagtgatattggaagcaagaaacccattgatgatatgtgcttgattttaaaatttaggtaattcaggggttgaatagattagcatggtggagaccatcttgtttagttgtagaaagttgcctagcagctctggagaagtttcaggaactatgtcatagtaaagatttttagttatgcggagagaattttgcagaaagttgatattatattcagtggttggaaccgagattctgaagctgcgtcaagctgaatgaacataagcgtcttttagtcttaccaaggtggattccgtgtcaaagtctttagttcaacagcctcctggtttgattaagctgtagtttacaactagtacttaattacttgattcaccattttttcgggttaatagctctgtattatcaaccagtcttcatgctttttctatactaacatcttgaaggatagagcatactgtggtgctgcttttgaattttgatatgatagataaaaatctgatcttagaagatactttctactttgatttttttcaggattaccagcacaaacattgatcgataggtacgtgacagttggtgcatacagtcttttaagatcatgcactatcgaaccagaatgcatcatcgggcaacactcaatcctaatggaaggttcactggtcgaaacccgctcaatcctagaagctggttctgttttaccacctggcagaagaatcccatctggtgaactatggggaggcaatccagcaaggtttattcgaacactcaccaatgaagaaaccttagagatcccgaaacttgctgttgccattaaccacctaagtggagattacttctcagagttcttgccttactcaactatctatctagaggttgagaagttcaagaaatcccttggaatcgccatctagaaagcttcttccaggtttctggctacttccctcattaagaaagcttcttcgttttcggaatttgatctgaataagtagctgcggaacaagaaaaagagcagagctgtgtttcaaatgttgtcttctctgtttgttttgtttaagttcatatccttgtgttcaaactttctatgaagatgataatggtgaaaactggaaagtgtaaaacttctttcgtctcccctcacaattggaaaagctaataatctcgtagtgttatagaattaaacatctcgtactaaaatattttcatcttcaatttttattgtgttgctttgggcgaaaagccaatcactgaaacattacagaaactgagagacgcaactaaaatatgtagtaccaaattattccaatatctctagagagcacaaagctagttccctcccttaataaaccctgagaatttatgcatgacttcaatagcattatcacattcaggtttcaacaaatgaaaaacatgatcttctccttcactctccaccacttcaacctctcctttccaaccagacttctcaagcttagccgcgtaaccccaaccctgcctcaccaacgcatctttctcagccaccattaccaaaaccttaccacaacccaacccagacaaatccaccgactctgattgcaccacgttgagcaacggatcatctgttccatctttgctattaggacttgccatcatccaaaacgcctctatcttcatcctcaacgtttcatctttcgtatccttctcgtcgattggtgttttcgaccagaagtaaggatgaagcaagatgattccagagattcctgtatcgttcaaaccaggactgagtttctctttcgcagctctcatcgccatgtgatgcacgatgtttgctcctgcactgtctccggagaggaacactctgctgaagtcagcatgtttgtttaaccaatcttcttgaccagatccagtgatatgggtgaatacccatttgagagctgtccaagaatcatcgaacgggacggagatcggatgctccggtgcacgacggtaatcaacagagaccgctacacagttcgacgcagagacagacgtcgtgaggaaagtgtggtaagttggagagaaagctgtctcaatgatgaatcctccaccgtggaagtaaacgaggagagggagtttcgagtcggtctcggcggcggctttctccgggaggtaaatacggacggataggttgttgtcggcagaataaacaacgtccttggaaacgactccgttttgtggttcggaagaaggtgggacggtggcttcacccatgagtcgctcgatgcggccactcttgtagattttgagcaatggagagcagtcgacggcgatctcggaatccatggttagttgattggttggtgagttatgataagattggtgtgtgtgatttatattgagaatggagtctttataactctattggagattttggtatggttgagacacgtgagttgtgtcattccattcttacacggaagatatgtttgccacacaattcaaagcacacatatggcagttgttgactatgtgacaacgactggcacctctcttttttccttttttagtttttttgtttgtctttggagtttgaactttgaacattcacttttatttccttttttgtctatttagtctttgaagtttgatccctttttttttgtctcattttaatctttttttctctattgactacatttttataggttttgtactatattttaaataaaaatactagatgaattttagtggatcttggtctattttgtttggtttggttgtaccattgagtaatgttaccatttatttagacaatcaatcaagacgttaattaagtggaaaaacaaaaatcaagattacaataaaaatatttagtgggcagaattaaacatctcttattagcaatacaattgaatataatgatgttgtaagcaacatgcaaattactgaaacattagagaaagtgagacagtgacacatctcaaacaccaaactaaaaagcacaatgttacttgtctcccttgataaaccctgcgaatctgtgcacgagttcatgagccttttcagaattaggatccctcaaatgaaaaacatgaccttctcccttagtctccaccacgtccagtacttctccgttccaacggctcttaccaagcttctcccagtaaccccaaccttgcctcaccaacgcgtctttctcagccaccattaccaaaaccttaccacaacccaacccggacaaatccaccgactctgattgcaccacgttgatgaatggatcatctgatccatctttgctattgggactagccaacgtccagaccgactcgatccacgtccttattgctacatccgtcgtctccttgtcgtcgactggggtttttgaccagaaataaggatgaactaagatgattccagagattcctgactcgttcaaagactcgggactgagtttatctttcgcagctttcatcgtcatgtgatgcgttatgttcgctccggcgctatctccggcgaggaacactttgctgaagtcggcgtgtttgttcaaccaatcttctgagccagatccggcgatgtgggagaaaacccatttgagagctgtccaagaatcatcgtaagaagtaggaatcggatgctccggtgcacgtcggtaatccacggagaccgctacacagtctgacgctgagacagccgccgtgaggaaagtgtggtaagtcggggagaaagcggtttcaacgaggaatcctccgccgtggaagtagacgaggagagggagttttacagaggcttcggtctcggcggtggcggctttctccgggaggtaaatgcggagggagaggttgttgtcaggagaataaacgacgtccttggaaacgactccgttttgtgggttggaagaaggtggcacggtggtttcacccacgagtcgctcaatgcggccactcttgtagattatgagcattggagagtagtcggcggcgatctcggaatccatcgttggttgagattgagagagtatgattgtgtgtgggagagatatattatagtattgagaatggtgtccaaaatgtcattgtttacactgaagatatatgccacacaattcaaagtacatgtcagttattctacggtgcaccttttttccttctttttaattttctctacttgtcctacttatatagttcaataaaatatttaatttttaatattaaactagttaggaagagacaagtgtaaggaattgacttctaattagtatatcaaaaattataattaggtgagtatctcaacgagatatctccaatggaaatgccctcagttagcgttaaaaaataataactacaagactatttccagtaacatgccaacatgtcacgagtctagacgcttagatgagaatctgagataaagcctcaagaagaacaaaggttatccgctagagtctccgactccgatgaaagttatcgtcggaaacatcatccaaccaatgatttcaataacagaaacgagatatattacaatgttctattagagaaaatgaatatagctttgttttgttttagtgaaatcttttgaaatggaagtaaaatcttcttgtactgagcgttcttgaggttggtgcgctatgtaaatcctagcttacttacctaatgaaacacttctatcagtaaaagaagagaaacatagttaagtgaaatggatagatagaatattctttcttaattaaaaaaaagggatgtatatttcaaacgacttatcttagattgcgtaagacactttttactggatgaaatctatcttaaccaggattattaatgatcgtcgcgttatttttggcctagtcaacggttatatatgtgtaaaatatccggtcaacgtttttatcatgttttatttagcctcataaaaagttcacgtattaaataactattttttgaaagttcatgtatcaaacgacatttttctcaaaaaatttacgggatagctgtgaaattggggagtgagcgagagccccgcctttgagtttcttcttttggcaccaaaatttttgaaatccccaaattttaggttttcgaatttctctcaaaagctctgaaatttagttttttttttttttggtttaccctttgattcgattctcctttatcactcccatcagctttctcctttattcaccactgtttcagttagtcgtcgtctccacatggcgactgaaaccctagaattgaaaacaccacaactagcagatactgttgctgttaccgagaaggacacagagacgaagaagaaggatgaagtagagaaagatgaggccatggaggagaaaggagaagaaattgatggagaaaaagttaaatcgccggtgactccagtcagtgagagacctataagggagaggaagaggactggccgttacgttatagatactcctcctcgatcctccgggaacaagcctctgtcaattacacaggtataaatatgtaaagttgcttcctttatcaatttttgggttgagttttggacattgaatagttctagtttcgtttggttgtttcagggtcgtggaacacggcttaaggaaattccaaatggtatgttaatttatcacatttggtgatttgggttctttatcttattagatttagatttggtgttactctttgaaagccaaatttagtctgatagagttgttaactgtttcagttgcttataaactgtccaagagaaaacctgatgacaacctcttcttacttcacaccattctttacggcaaaaaagcaaaggtgcttcatttagttatgtataagaaagctgtctcgctctgtttatatgatatgaatattatcttgaagtttcactttttgttcactttttccagagtgaatgattgattactcaagggttgtgttgaaaaatgctgtgcaggcacagatgctaaagaaaaacattggtcagttttcgggttttgtatggtcagagcaagaggtaactgtacaccatctcttagatatttagttccatggatgtgtatgatgatgagccttgttttgagtgtggtatttaaatgttttccaggaggagaagcaaagagcaaaagctaaagagaagcttgataaatgtatcaaagaaaagttgattgatttctgtgatgtgcttgatataccagtaaacaaaagtactgtgaaaaaggtaagtgatatgaatatttggtctatctatatatctatttgtgtctttctcgattatttattcatacatctgtatccttcaggaagaactggctgtaagagtgcttgaatttttggtatgtcccaaagcaacaagggatattctacttgctgatagtgaaaaggtactctaacttagcagctgaatcttgtgactgttcttcattgttttttattcagtatggggtattaaattgctatctcctttctttgaatacatgatgtaggaaactaaaaagcgcaagaagagcacatcgaagaacgtgacctctggagaatcatcacatgtcccagctaaggtttgtaattgttaacctttctcttctttatagtttgtagtcattgacctgatttgtttattctagactcgtggctggtaaaattagctccgtttctagttttgtaatcaagtttgttgttatgaaccattaggtctctatggtatgaatatctttgtctgcgctcccttatcagttactgcaactcacattatgaatgaatttcgagattgcatcaatgcgttataaactggtgttttcttatttcataattttttagttgtacttacagctgccatttggtatgcagtaattattaagcaatgtataataccataatgagaaaatttgggaatagtaggaaatctaagataagttccatggcttggtcacttttaattggctggtttttagtcaacaagggtattattaggccgctcagtgaaagtattttggatagtcttagcactagcttagtacgttatttactcaatggcattcccatgtcttgttatttggtgatcccccatttagctccttgtgtgatatggctttgaaccttctctaaaccgtaagattctgcgagaaaacaaaacatgtggagattctagcaaaagtctctgtctctgcgtggcttgattttatgtgaagaaagttgcataaacaattactgactgtgtctgttattctgtttgatatatacagaggagaaggcaggcgaagaaacaagaacagccaactgagactgaaggaaatggtgagtctgatgttggttccgaaggaacaaatgactctaatggagaagatgatgtagctccagaggaagaaaacaacaaaagtgaagatactgaaactgaagatgagaaagataaagccaaggagaagactaagtcaaccgataagaaacgcttgtcaaaaaggactaagaaggagaaaccagcagctgaagaggagaaatctattaaaggttctgcaaaatctagtcgaaagtccttcagacaagtcgataaatcaactacatcatcaagcaagaagcaaaaggttgataaagacgattcctctaaagagaaaggcaagacacagacaagtaaaccacaggcaaaaggatccaaagatcaaggtttgtttcgaaagcttaaatatcacacattttcatagtgtattgaatctctctatttctttgattgtggccggcacaggacaatcccgaaagaaaggtaaaaaagaacccacaagaaaagaactgcatgtagtggtgaccaaaattctgaaggaagtagacttcaatacggtgagacttcaaaagtttgagaatttacagattataaagcgtatacaaaacctttgaactcaaagacattttgaattttgtttccaaacaggcaactctatctgatattctacggaagcttggtatgtttctgtaaagcttttctcttattctcaatccataatagttatcgtcttccaaatcttcaggaaacgtttatcattgaaacattcttttcctgcttgtgataatactagggagccattttggaattgatcttatgcatagaaaagcagaggtgaaggatatcattacagatgccattaacgaaatgagtgatgatgatgatgagaaagaggaagacacagaggatgaaggtgagaaagagggaaaggactagttttgtctttcttctctttcctacaataagaaaaagaaaacataaccgaagagacggtttaacttaaccttccatgtgtgaatcataggattgtttgtatgtttggtgtaatgtgtaatctgttaggctcatgtagtatcaggtaatgtggttggatactttctggattagaattaatttgagatgtatttgtaaggacttgcaatctttcttcactttagcagcacacaagtgacatggataaatattgttgtgtttcaaaagaggaaaagaagggtcgtccaagagatcagctccaagtcgatcagagagccaataattcctctcaagacacgcccacgaatgaattcacaagtaatctctcgtgttatgggatctattgcacttatttttgattttaagagtcatgttaacttttgtgtcatgtttattttaccaccctataattagcatgttcgtttcgtcaccactggcggttgcggcagcacaccattgacggttcagcaaaacgtttatcataaacattttatttagctcctcaagaagttaaaacgtttatcatgaacatttcagtccctgatcttcttctccatctccaacccatgtttggaaaccatgtgtgcggttctctcaagcttagttctgcactcttctcacgcatttaaaaagttaaaacttcttgaggagctaaataacacaataaaaccacacaatcgacggttcagcagcacaaacaaatagttgaagcgtatgtgacaacaaatatgcttcatatagtgtgcatggtttggttttattgtgttacttattattatacccttattgaacacccgtattttttttttattaataattttgaattgtaacgcttatatctttaagattcttatttttatcatttatacagttttatattatcactttaaataaatctaaataatttttatgtaagttttgaattgatttgagttggagtcgaacaaaaaatcatttgtattaattaaacaaactttattaagtcaattctgaacatttacaaataagccccagttttatagtttgtcatattacctgatgcaattttggtgatgaactaaatgcacgataataagcttttcaccatgaatttttatttttattttagtactttaattgtgtttttaatttattaatcatgtttaaattttatattttatcagatgattattgtgttacttgatttacaagatatttattagtttagaatgccaaagttttttaaattgttttaataattattaatttatgattcataattaatcttatggtcatcattcaataatttgtcttgaaccacatgttttttttacaccgatcaacattatcttgaaccgtttgtaagtttagcgtcttcctatttgtgtagctgttaagtttccaacttttcttaatatatactaattgtacgactggatactttttggatttgagttcatttttgtagatgtctttgtaaggatttttgagcttgcttcttttttggggtctctctatactagtttacaattccacttaaaagagacacaatgatagaaagtaaacagagaagacagtttatcctgcatggaaagtaaacaatgacaacaaacaaaattggatgaaaccactgatttatattatgagatcatctaaaaataaagaaactattttgacccaaaaaaaagttctactaaaattgtaattcatacttataagtgagatcacctgatgtcattgtttccagctatgcttacccgtgtttcaccttcattgtttctagctttgatttccaagtgaatcacctgatgtcatttacagatcccgagtctttctttatactctaccctgcaagtgcaaatctcacacatataatatattaccaattgaaacttcatactccgacgtccgaatatgtgatcaaattattagaggaatgatcaaaaaatgatttttgaacctaatattaaaatttctcttacatatagaaaacatccaactttgacaaatccatgtaatggacccgtaggccgtaacatcaaatatggttagatatcactcttatcgatcaaccaaccaattaccccataaatatatgtatttattcaatcagccgtccataccggtcttaaagtattgaagtagccagttctttagtggtccttattatgttttcgatcacctccttatctctgtagctacataatcttcccttgttaaatacctaaaccctattctccacttaacctccctaaagaacctatatttcacgttatattcttggctctttcacttttcccataaattctgtgcaaaaactcgagtgggccttaagctttatctaccttatctctccagctatacacttgctactcaagataccgctaaccctaatctctactagacccccttaggacttaaaaccctatatatcaaggtctactctctgttttctcgctttctttattcgagccattccatacgtttttcgatttctttcattgaaaaccattgaaatggtcgcctcatctgagttcatcgtcacaaggaaaaaccctgaactcatccctcccgtgtccgaaactccgaatggtcattactatctctcgaatctcgatcaaaacatcgccatcatcgtgaaaacattatattactacaaatcggagtcaagaaccaaccaagaatcctacaatgtgatcaagaaatctctctcagaggttcttgttcattactaccctgtcgccggaaggctgacgatcagtccggaagggaagatcgccgtcaattgcaccggagaaggtgtagtggttgtggaagctgaggctaactgtgggatagatacgatcaaagaggccatctcagagaatagaatggagacgctcgagaaacttgtttacgacgttccaggtgcccggaatattcttgagattccaccggtagtagttcaggtgaggttttgatcgatctcttgcgtactaattactatatttttcgattagcttttacataaacttaggttttgcgggaaaataatgtatttacaatgacggcgacatgcttatagacagcagcaaactagagtagcaaatatcctacataatgttcgggagtaatttgcttattttagccacttgataattgatataaatgatcgcatttaatgtcagaaatgagtttaactttttgagtatcaatcacatgtgattgtccaaaatgtagatttatgggagttttgcttgagaaattcaattatacttatttatatgatatatgacaaaatacttttttgtttgtaatagtaaaatcttaatataaaaaaaaaaatcttaatataaaaatataatccaaaaaaatacaactatatatgtaaatatctaaatcatagtttattttaataacaatctccctgaatatcattgggaaaaatgtcaaaaaaatcacgaactttcaaatttgggatgatttaatcttgaactccacggaagacaaataaatcgtaaagtttttgttgactttcaaaataaataacaaagtttttgttgacttgccatttgagtcatgtcgttaaataggttaacagaattattttacggcgttaatatctcgtgtatctgctctgttagaacaaaacgacatcgtttattgcagagacaaaggaacgtcgttttgtttgttgaaacaaatttaaaccctaaatccccaaatcgatttattatctgcgattttgaggtcaaggtgggtctgtgattttgagataatgaaatcgatttggggatttagggtttaaatttgtttcaagacaaaacgacgatgttttgtctctgcaataaacgacgttgttttgttctaacagagcaaataaacgagacattaacgccgtaaattttttctgttaacctatttaacgacatgactcaaatggcaagtcaacaaacactttgtcatttatttcgaaagtcaacaaaaactttacgatttatttatcttccgtgaagttcaaaattaaatcgtcccaaatttgaaagacatttttcccgaatatcatttatgaattatgatacaatgttactaaaaaaatcatttttatgtctcatgcatgtagtaacgaacacacactaatatagtaacaaatgatcagacgttactcttaaaaactagagtggtcatcatgttcaaactttaaggtacattagaccatctaattagaaccatgcgtaattagtattgttaagtaaccaaaagaaataacgacgatcaatagtaagttttttttttttgtgtgtgtaaccaataggtagtacttaagttaaatgtatattatttcattcctatttctttaaattggtatcgattcattctaaaatgttgcatggattttttttaacatctttagataaagttttatgttccgttttttttttcaggtgacaaatttcaaatgtgggggttttgtcctaggactaggcatgagccacaacatgttcgatggagtcgccgctgcggagttcctcaactcgtggtgcgagatggccaagggtcttcctttatccgtcccaccattcttggaccgtacgattctccggtcacgaaaccctcccaaaatcgagttcccacacaatgaattcgacgaaattgaagatatttccgacaccggaaaaatctacgatgaagaaaaactcatctacaaatcatttcttttcgaacccgaaaagcttgagaagctcaagatcatggcgattgaagaaaataacaataataaggtatcaacatttcaagccttaaccgggtttctttggaaatcaagatgcgaagctctacggtttaaaccggaccaacgggttaagcttctgtttgcggcggatggacggtcaagattcatcccacgtctcccgcaaggatattgcgggaacgggattgtgttaaccggtttggtgacatcatcgggagaattagttgggaaccctctttctcactcggtgggtttggtcaagagactggtggagctggttacggacggcttcatgcggtcggctatggactacttcgaggtgaaccggacacggccgagtatgaacgcgacacttttgattacatcctggtcaaaattgacattgcataaactggatttcggttggggagaaccggttttctctggaccggttggtttaccagggagggaagtgatcttgttcttaccaagtggtgatgatatgaagagtatcaatgtgtttcttggccttcctacttcagctatggaagtgtttgaagagcttatgaagatctgaaaaagaacatacattttcataatcaaattatgatatattctaccaaattataagcaaaggaaaattataatctagtcattatttatacatgttatatttgaattcacgtttgtatccattacaaaaatttatgtaattcgcagaaaatatatatatgtcaaattaagttatcggaccggatcgggtcaaagaaaccggattggttaacaaagtcaaacaaacaaatattgacttgagtttcagattccagtaaaatcaaaccggatcgggtctgaatttaaaccaccgggtcggctccatctaaaatctgaagatcatctccgccttatcttgttgactatctctgtactacttacgagcgcaagtgagagagtaacagagaaacgtagagatatagcaaaatggctgcgacgcttactggatcagggattgctctagggttttcgtgctccgcaaagttctctaagagagcttcttcgtcgtccaaccgtcgctgcatcaagatgtcggtttcggtagaggagaagacgaagaaattcactcttcagaaatctgaggaagctttcaatgctgcgaaggttaggcttttcaatttccatgaattcagtcaataagaaatgtttcttcagattgattacgccttgatgttctgttgctttggttttgtgggatttgatcatatttttggttaaagtgattatctttgttacccttcaaggaacattgctaacaaaataagattacttgagatagaatcataatctgagataaagtttttgtttttattggtttcattctgttctgattattgaaattggtttggttcctttgtgtagaacttaatgcctggaggtgtgaactcacctgtacgtgctttcaaatctgttggtggacaaccagtggtgatggattctgcaaagggctcacgaataagagacattgatggaaatgaatacattgactatgttggatcttggggacctgctataattggtcatgctgatgatgaggtttgtttctttccagttttgatgatttttagatagctgaaagtttagtagttgatacggtgatgtgtctagtgcaggttcttgctgctttggctgagacaatgaagaaaggaacaagctttggtgctccttgtctcttagagaatgttcttgctgagatggtgatttcagctgttccaagtattgaaatggttcggtttgttaactccggtacagaggcatgtatgggtgtgctacgtcttgctcgtgccttcacagggaaacaaaagttcatcaagtttgaaggttgttatcatggtcatgcaaactctttccttgtcaaagcaggtagtggtgtagctactttgggtctacctgactcgcctggggtccccaaagcagctacttcagatactttaacagctccatacaatgatattgctgctgttgagaagctttttgaggcaaacaaaggagagattgctgccatcattcttgaacctgttgttggtaactcgggttttattacacctaaaccagagttcattgagggaatacgccggatcactaaagacaatggtgctcttcttattttcgatgaagtcatgactggttttcgtttagcctatggtggagctcaagaatactttggaatcacacctgacttaacaactcttgggaaaatcatcggtggtggtcttcctgtgggagcatacggtggaagaagagacatcatggaaatggtaaagctagagttgttaacaattgaaccgaataatcttttgaatttgctgcaagagattgagaaagtcctgatcctttatcactcatgtctttttgcaggttgcacccgcaggaccgatgtatcaagctggtacgctaagtggtaatccgttggctatgacagcgggtatacacacgctgaagcggttaagtcagccagggacatatgaatacttagacaagatcacaaaagagcttacaaatgggatactagaagccgggaagaaaaccgggcatgcgatgtgtggcggttacataagcgggatgttcggtttcttcttcacggaaggacccgtctatgatttctcggatgcaaagaagagtgatacagagaagtttggaaagtttttcagaggaatgttggaagaaggtgtctacttggcaccttctcaattcgaggccggttttactagcttggctcacacttcagaagacatccaattcactatcgcagcggccgagaaggttctaagtcggctctaaaatgtctctggaagcttccagggaaccatgaatgtatttgaaattttttgatgtagagaaaattagattcaattgagagcaagcaagcaatctcacaaaatttaactgtggtaagaaaagtcaaaatgtctatgaagatttgttgactttttaaaaagagttcttgctttgcgttaacgtcttacaaatcacacagaatgatttctattgcaacacactttttcatcatgtagccaacatcataatctgagtcataagacgatatatttctccacggaacaagggaagtgcatctgcaaagttaagcttccatattcagttttcttcacatttctatagattcccttgcccatttatgtctttgtccgacctaagacgacctagaaagtggatacacagtccatccaacgagaaagtttcactagtctcctacttcccaaggttacgtctttcatatgtttagttgcatttttctttcttcacatctttgcttctagctgtagtttgttcaatccaaccgaccgagctgcttttcattgtcttaaagaatgaacaagaaacatcctgatgattatgtgaagatgttttggagaccaagctgattcgaactttctttctaattcggacacaattgagttggaattatttgaaattggaaaggcccagtaaggaagtgatccaatattacttgccttagacaaagacttggcccactcagtccatacaaaatattcctttttatttatttaaaaatatgaatactccttgacttaggccaatcaaaatttataattgatattttttgttaaaagaatttatgattgataatgccaatattttctgtattgaaacattttttaaatttttctattttttgttttttttggttatatccgaagagtaatgtgaccacgttaattctcaagtcaaatattatctttcataattagaaaactttatcgtatattattaatattatgtccttaaaataaacagaaaacattaagtatgaccaaaaaaaaaaaagacagaatcatgatggatattttaaatagttttcgttaaatcagaaaataggaaatatacattatccccaatagataattacacaaatttttataaagaagtagagaaactaactccggaaaattaatcctctacttcgcacacttgataaactcagaaaaatacgacagcgtaacggggtacacgtggtggttggtatatcaagttggggtaaagtcaacattaacgtatttttattcatgtagctgctgcggaagaggactgcttgccatgtttaggggtttgtccatcttcaatctcagcccttcgatcatttccgcaggtacacttgttcgcttgacgaaccactgagattggctcaggggatgaaactgtgcctagcttcaacatatcgaggctcacctccggtaacttagcagcttcgacttctttctctcctagatgcggcgacgttttacagtatttgtagacaacgtagagtatcatttggagtgcaccgagagcaaaaccaagcacattcgggaactgcacgaaaaacatttgttgtagtggcaataacataataacattttaatatactcacttttccactttctagcttgtgaataaagtacgttaaaaacgaaataaagtaaagtttatggcaaacttgtgcggcatcgatagaagttacgtacaaaatataatttctatgtaacaataaagataaaaagaacttaatatattatgaacttcttttgcaaaagctaaatcttttaatgtttctgtggaacataaagcgagagtttctttataatttggtttatttttatcgtaaaggacgataccaaacaaaaggttttgctttcattaatcgttttttttatcttttgccaatccatatctctttttatctatgaatctatgattagaacctcaaagtctcaggttcattagaaacaaaagcacccacttcatgtaatatactgttatgataatgatagacatatgattatgatgcttgacgacatgataatcatgttaaaacatatatattcattatagcaaatagagagagatgaaatggcttacagcaacatagatgtccttgagagcaagaccataaaggagccatatgacagcactgatggtaagggttaaggataagctaaagggcatgtactccacacttcttgtctttattaccgtcctctatatataattaaacaaaaatatatatgttaattattattgttaccaaatcataatttaatcacttggtaaattagctatttcgtagtacttacgattatgcttagaggagcagcgaaaacacaaacagagaatccgacacagattcctccgataatcttagcacgtgtggctccttttaccaagaattggcaaagaaggagaatcgcacagaatcctccaaagttcataagaagtagcatcttcactgtcaacatctgcatccattaagaaatgttttatttagcaacttcatttgaataatgttatgaacaacgtaacatgcatgtcatatgaactgaggattaattattagttacccgagctggcttgggagcgtaggcaaggaacatagagatgtagatggtttcgatgaagcaaccaaaggcgttaatggttacgaggaggaagacatctttcttctgtgtcgcatagtaaagccaaagcgtcgcactgaagagcgccacaacataaggaatagactgaaacccttctgttgtcttcttcttccaaatcctatagaacgttggcctgcgtccaaaaaaaaactgaatattagttactcaattatatcggagaatattgatgtaacgtagtcatatatattctgatttgttgcatatatattacttacacaggagataggaacacggcaaaggagataaggttgcctgaaaattatacaagaatatagcaaaaatatgatattaagaaatcgatattaaatctctagaatttagatattagggttgcagaacttgatcaaaaatattcataagaaatgaacacaacgttagtatcataccgagcaagccaaagacaaaggcccatgtgttttcagtgttgaagagactcatggtatataagttgttaggagaaggaagaagaagagagatagcacttagttttgcaagtgttttctcttaatgtaaaagctaatggcacgagcttagtgtttcggggacttcacgtatatataggggttagggctaaagggaggaatggggtttgtgtgggagatggaaaaaggagaaatgtttgtgtgaacaataatattttgaataatgtttgaatttcttatttattttaaaaagcgttaatgtcattgtagttgtataacaaaaaaagacccgcaacaataattcacacgctaaaccattaccaaatcatatacattttgacgtacaaataacaattctgttaccaaataaccttttttaggttttggcttaagaaataaaacataattagttatgttaataatgcttgtcaatctcagctgtttaggcaagctattttcttaaggattatgtctagattctacgtatgcatctctaattctctatatatacaatgacataattatgacctaatcattttacgattttgagggttttcaccaatcctattatttaacttatttacacaacgtaataagtatatttgccaacttcggtttaaaccaatgttttgaaacccgacccggacgatgaaccggactatcttctgggtcactgggtcatcgggtcaaccgggttggaccacgggttaattagttaaaatttatttaataaatttaatactaatagaaattttagagtattttataataaaaaaaatttgtagtatttataaatataaaacaaaaataatcatatcatatttaatcaaatataaaattatattatatttaacaaaatataaaatcatttacacccaaatatatatatatatatatatatatatatatagaaaaaatcaaacaataataataaagtggttaaaaatttgaaatccaataaatgtctaacaccgtaacaaatatattaggagatcatcaatgacagaaataaattaataaaacatcgtgaattaaaacaactaatctcggttgtctctctcaccattcgattcaattttaaggcggtattgtaaagtcatcaacaaaatctaaaacatcaaatgaatttaagaactgaaaaaacttctaaaaataattgaataaagtctaaaatcccatattttattgtaaaatcaagagaactttttaaaacccacacccgaccggttcaactggttcaccgggtcacgggttaattgcgagtttttgtgggttttttcggttttgaacttgttgggttttagcactaaacccaaaccggaaaaatgttcggattacgggttaaccggtcggaccggacggttcgggtcgggcgtgaaaacactggtttaaactaatattttttcttaattagtgattagttcattcacttttattctacatgtttccttatgttgacgcttacgtgatttcgttgctaatttaaaaccaaccaagtaactacaaatgatcaatctgaatgactatataccttgcaaaatcaatttgcatgtgtagcgaaaaattatattttaagttattgtgcgtttagttatatatagatatacaagtaatataaatcgatacaccatataaatatgatgtaatgaattgagaattccactagttctctatcattaaaatatgacgacattctggaatttgctttaataagatatttaaagaaagtgagatttgcaaagtgatctcacttaatttacgttaccaagcaaattagttcacgtgacattgtatgtcaaattattatgccgttttcactttagctctttttaatcctgatattcatgtttctttatagaacaaaacaataattagccgtttctcaatcattattcttttttccgtaccatcgcaataaataacaggatttttcttaaattacacatatataggagttcatagttctttttttttgttgagtgcatagtatagtttgtcaaagtctttttatctatgaaaatcatatgaagttcatgttttatataaaagatagttaaatcttgtcgcaaagttttaatcttttcaagtcattttttcattacgaaaaagtaacatctttcgcgatttatatattataggaaaaagtaaatagctgttggataaaccagaaatacaaaattatagttttgtaaagtatctaatttttagtgtcaaattcagacgagtatgaaaaatgctacgtagggacattaaaatttgatcatttacaaaactataataacatattgtcctagcacatattgtacatatctaaataagaaatacaatgtttagatactaaataatcttaataaatacctaaaataaccaatcattagcgtaataaaaataaactctacttgttattgcatcaatatatatgtctcacatggttatcattttgtaaagtgttcaggttttaggttagttcaattaatatagagcatacactttttcttattgtttttttaaattgctataatatttttcgtcttttcctacaaaacaaccattacttgtttagttatataaaaaaagattagtttttcaataatgtaattatcaacagacaacagacctaaattgatagtatatctcttattacatgtgcataactgtataagactttatgttatgtacatttgattcgttgaagtcgtaactaatctgagaggcaataaaatagtaaacgaatccatttatatagttacccttaactaaatgtgaatcacaatttctcttgtaataaacaaatcctgtaactaattgtatatctttttcgggatcccattttaccttattttaatgttctcttacagtaaatagtttgaacaaagcttaatcaaatattttgtcgggaaacaaaaagtaaatcattttcattaagtcaggcctctccgatccgatgcgtgtggacgtcacgcgcgcattagagatagaaaagctctgttagcgttccaagtggcaaactttaagacagagagtgccaataatacgtataaaccttttcctgttttgccagtagagagatatgtacgtaaccacctttgctttgtcgtcgactcgtcgtacttgtacctgcactgatgcgcacacacatggaaggttttttaatcgcactgatttaaggctcccaagtcaaaaacatatgatcattgccaaattggcaagattatcgaatcaaccaatatagctgattagttaggtttttgtttgttttgtttttataaaaataaatggctaataagttagtttgggagtttgattaattaacttaagtaactggtttaattgggttatgtgactcaaatttgttttgccggtctgtattttagacgtgaatcagaatagtaatatatataacgatgacatttatacgaaaactagactacgtgtttaatttgatcgatgatataagtattagaatataagaaactaataaaatttatcaaaaaacacagtagtaaatcaaggttaatacatatcctatttagcaataattaagcaattttttatagaatgaatgttaaatttattcataaaaaaaaaagttagtgtcacatcgagttcatcattttattttattttgtctctagttttacaatggaaacctaaaatatgaatagtttttcatgttttgttttttcctgagtttcgaagcaaagtgatatataagcaattttcagtattctaattaacacccaacaatgaaattttaaacatcatatatacatagtagtaattatattcttattgaaaatctctttgaggttgtaattcttccattagaggccaaatattttgcaaatgagaaacattatgtggtagcggaaaagaaatgtagtagttttggagcatcggtataatatctataaaacaattaaaaaaatacatttttaccttaacaaaaactatctcatcacttacaatgtaacatttatatatatataatacttgtttgttatatgattcaactccatatagagtatatactgtttctctctaccattttaaccggaaaagatatgtgtcatttatcccgaataggtaattatatgtatgttttgcctaaagttaattttaatctgattcgatatgtatgtattaattggtaacacaaactatataaatttttagtttttagctaaaaaggtaaacttttttaatatagtgcaaaactgtacaaaataataatacataaaaattgtacaattgttttttgaaaataacgtttttaatatcaattctgtgattgtaattatcaaagcgtacacctcatattaaaactatataagattaccattcagacccacactatatattatcagttatcaatgcatttattttcttaattgagcatactgaaatattatatgatgggtacgcttacatagaaatatatattaaatgcattagttatagacttatacttaaattgattgaggccaatgttttgaaacccgacccggacgatgaaccggactatcttctgggttactgggtcatcgggtcaaccgggttggaccacgggttaattagttaaaatttatttaataaatttaatactaatagaaattttagaatattttataataaaaaaaatttgtagtatttataaatataaaacaaaaataatcatatcatatttaatcaaatataaaattatattatatttaacaaaatataaaatcatttacacccaaatatatatatatatatatatatagaaaaaatcaaacaataataataaagtggttaaaaatttgaaatccaataaatgtctaacaccgtaacaaatatattaggagatcatcaatgacagaaataaattaataaaacatcgtgaattaaaacaactaatctcggttgtctctctcaccattcgattcaattttaaggcggtattgtaaagtcatcaacaaaatctaaaacatcaaatgaatttaagaactgaaaaaacttctaaaaataattgaataaagtctaaaatcccatattttattgtaaaatcaagagaactttttaaaacccacacccgaccggttcaactggttcaccgggtcacgggttaattgcgagtttttgtgggttttttcggttttgaacttgttgggttttagcactaaacccaaaccggaaaaatgttcggattacgggttaaccggtcggaccggacggttcgggtcgggcgtgaaaacactgattgaggccatagctatgtctttaaaatttattcggccactaaatagcttttaattcatttgaaatatacagtatgcttttctagacttaacatttttgattatccccttttttgttagtgtcaacaacagttttgattacccccctttttttttgctagtactgtcaacttcagttttgattatctgaatatgtattgaatcaaataatcatgatgattgtctagtccggccgttggagtttatttttaagaaaattatatcaatttaaaaaaattaggatattaaagatgagcatgttcttatttttggtaaatttcatctattcacatgtgtttttaattaactgaataaataaaataccaaattataattgattatatttataatatttgggttggttaatttgattgttcagtttaatccatttggaagcttgtaatctgcgattattttttattttctgaattatttgagattaggtttacgtaatggcttcttgtgattactctgatgtcatgactactttttgttgttggtgttgttaagaatttagtttttgaagatagatccctgaaaatattatgagtgtataaaacacaaatgatagaatatatagtggtgacctctaatataatctcattgtttgttttatggcttaaccattcaatcgatattttacacacatatattaaaatctaaggtttaatattctattcttatttaatactagtagtcactgacttactgtgacgactgacgacaaatgtataagattctatatctaattatctcacgttcccactacaaacaataattgacaacaactccgttatttctacataaatattgtttcatagttttagattcatttagagaaaagctaaaaacaaattcttatttgtcttttcctttctgtggttaaccacctgagtcacgagactcgagtcaaatctcatagctaataagtcaacaactaaatcaagttatctaaaaactaagtcgcttacaattaacatacaaaaacaagtcaattaacataaactactaatataaatacatacaaataatttatattatataaagaaattcatccaaaatataacaataaaaagtctgattgagactttgagaggtattcataattggctacaaatgtaataacgaattaacataaactactacaatacataaaaagcatttctattatagaaaaacaattattctgataaagctt

SEQ ID NO: 1066 - DNA, 82912 bp, Arabidopsis thaliana
aagcttccagggaaccatgaatgtatttgaaattttttgatgtagagaaaattagattcaattgagagcaagcaagcaatctcacaaaatttaactgtggtaagaaaagtcaaaatgtctatgaagatttgttgactttttaaaaagagttcttgctttgcgttaacgtcttacaaatcacacagaatgatttctattgcaacacactttttcatcatgtagccaacatcataatctgagtcataagacgatatatttctccacggaacaagggaagtgcatctgcaaagttaagcttccatattcagttttcttcacatttctatagattcccttgcccatttatgtctttgtccgacctaagacgacctagaaagtggatacacagtccatccaacgagaaagtttcactagtctcctacttcccaaggttacgtctttcatatgtttagttgcatttttctttcttcacatctttgcttctagctgtagtttgttcaatccaaccgaccgagctgcttttcattgtcttaaagaatgaacaagaaacatcctgatgattatgtgaagatgttttggagaccaagctgattcgaactttctttctaattcggacacaattgagttggaattatttgaaattggaaaggcccagtaaggaagtgatccaatattacttgccttagacaaagacttggcccactcagtccatacaaaatattcctttttatttatttaaaaatatgaatactccttgacttaggccaatcaaaatttataattgatattttttgttaaaagaatttatgattgataatgccaatattttctgtattgaaacattttttaaatttttctattttttgttttttttggttatatccgaagagtaatgtgaccacgttaattctcaagtcaaatattatctttcataattagaaaactttatcgtatattattaatattatgtccttaaaataaacagaaaacattaagtatgaccaaaaaaaaaaaagacagaatcatgatggatattttaaatagttttcgttaaatcagaaaataggaaatatacattatccccaatagataattacacaaatttttataaagaagtagagaaactaactccggaaaattaatcctctacttcgcacacttgataaactcagaaaaatacgacagcgtaacggggtacacgtggtggttggtatatcaagttggggtaaagtcaacattaacgtatttttattcatgtagctgctgcggaagaggactgcttgccatgtttaggggtttgtccatcttcaatctcagcccttcgatcatttccgcaggtacacttgttcgcttgacgaaccactgagattggctcaggggatgaaactgtgcctagcttcaacatatcgaggctcacctccggtaacttagcagcttcgacttctttctctcctagatgcggcgacgttttacagtatttgtagacaacgtagagtatcatttggagtgcaccgagagcaaaaccaagcacattcgggaactgcacgaaaaacatttgttgtagtggcaataacataataacattttaatatactcacttttccactttctagcttgtgaataaagtacgttaaaaacgaaataaagtaaagtttatggcaaacttgtgcggcatcgatagaagttacgtacaaaatataatttctatgtaacaataaagataaaaagaacttaatatattatgaacttcttttgcaaaagctaaatcttttaatgtttctgtggaacataaagcgagagtttctttataatttggtttatttttatcgtaaaggacgataccaaacaaaaggttttgctttcattaatcgttttttttatcttttgccaatccatatctctttttatctatgaatctatgattagaacctcaaagtctcaggttcattagaaacaaaagcacccacttcatgtaatatactgttatgataatgatagacatatgattatgatgcttgacgacatgataatcatgttaaaacatatatattcattatagcaaatagagagagatgaaatggcttacagcaacatagatgtccttgagagcaagaccataaaggagccatatgacagcactgatggtaagggttaaggataagctaaagggcatgtactccacacttcttgtctttattaccgtcctctatatataattaaacaaaaatatatatgttaattattattgttaccaaatcataatttaatcacttggtaaattagctatttcgtagtacttacgattatgcttagaggagcagcgaaaacacaaacagagaatccgacacagattcctccgataatcttagcacgtgtggctccttttaccaagaattggcaaagaaggagaatcgcacagaatcctccaaagttcataagaagtagcatcttcactgtcaacatctgcatccattaagaaatgttttatttagcaacttcatttgaataatgttatgaacaacgtaacatgcatgtcatatgaactgaggattaattattagttacccgagctggcttgggagcgtaggcaaggaacatagagatgtagatggtttcgatgaagcaaccaaaggcgttaatggttacgaggaggaagacatctttcttctgtgtcgcatagtaaagccaaagcgtcgcactgaagagcgccacaacataaggaatagactgaaacccttctgttgtcttcttcttccaaatcctatagaacgttggcctgcgtccaaaaaaaaactgaatattagttactcaattatatcggagaatattgatgtaacgtagtcatatatattctgatttgttgcatatatattacttacacaggagataggaacacggcaaaggagataaggttgcctgaaaattatacaagaatatagcaaaaatatgatattaagaaatcgatattaaatctctagaatttagatattagggttgcagaacttgatcaaaaatattcataagaaatgaacacaacgttagtatcataccgagcaagccaaagacaaaggcccatgtgttttcagtgttgaagagactcatggtatataagttgttaggagaaggaagaagaagagagatagcacttagttttgcaagtgttttctcttaatgtaaaagctaatggcacgagcttagtgtttcggggacttcacgtatatataggggttagggctaaagggaggaatggggtttgtgtgggagatggaaaaaggagaaatgtttgtgtgaacaataatattttgaataatgtttgaatttcttatttattttaaaaagcgttaatgtcattgtagttgtataacaaaaaaagacccgcaacaataattcacacgctaaaccattaccaaatcatatacattttgacgtacaaataacaattctgttaccaaataaccttttttaggttttggcttaagaaataaaacataattagttatgttaataatgcttgtcaatctcagctgtttaggcaagctattttcttaaggattatgtctagattctacgtatgcatctctaattctctatatatacaatgacataattatgacctaatcattttacgattttgagggttttcaccaatcctattatttaacttatttacacaacgtaataagtatatttgccaacttcggtttaaaccaatgttttgaaacccgacccggacgatgaaccggactatcttctgggtcactgggtcatcgggtcaaccgggttggaccacgggttaattagttaaaatttatttaataaatttaatactaatagaaattttagagtattttataataaaaaaaatttgtagtatttataaatataaaacaaaaataatcatatcatatttaatcaaatataaaattatattatatttaacaaaatataaaatcatttacacccaaatatatatatatatatatatatatatatatagaaaaaatcaaacaataataataaagtggttaaaaatttgaaatccaataaatgtctaacaccgtaacaaatatattaggagatcatcaatgacagaaataaattaataaaacatcgtgaattaaaacaactaatctcggttgtctctctcaccattcgattcaattttaaggcggtattgtaaagtcatcaacaaaatctaaaacatcaaatgaatttaagaactgaaaaaacttctaaaaataattgaataaagtctaaaatcccatattttattgtaaaatcaagagaactttttaaaacccacacccgaccggttcaactggttcaccgggtcacgggttaattgcgagtttttgtgggttttttcggttttgaacttgttgggttttagcactaaacccaaaccggaaaaatgttcggattacgggttaaccggtcggaccggacggttcgggtcgggcgtgaaaacactggtttaaactaatattttttcttaattagtgattagttcattcacttttattctacatgtttccttatgttgacgcttacgtgatttcgttgctaatttaaaaccaaccaagtaactacaaatgatcaatctgaatgactatataccttgcaaaatcaatttgcatgtgtagcgaaaaattatattttaagttattgtgcgtttagttatatatagatatacaagtaatataaatcgatacaccatataaatatgatgtaatgaattgagaattccactagttctctatcattaaaatatgacgacattctggaatttgctttaataagatatttaaagaaagtgagatttgcaaagtgatctcacttaatttacgttaccaagcaaattagttcacgtgacattgtatgtcaaattattatgccgttttcactttagctctttttaatcctgatattcatgtttctttatagaacaaaacaataattagccgtttctcaatcattattcttttttccgtaccatcgcaataaataacaggatttttcttaaattacacatatataggagttcatagttctttttttttgttgagtgcatagtatagtttgtcaaagtctttttatctatgaaaatcatatgaagttcatgttttatataaaagatagttaaatcttgtcgcaaagttttaatcttttcaagtcattttttcattacgaaaaagtaacatctttcgcgatttatatattataggaaaaagtaaatagctgttggataaaccagaaatacaaaattatagttttgtaaagtatctaatttttagtgtcaaattcagacgagtatgaaaaatgctacgtagggacattaaaatttgatcatttacaaaactataataacatattgtcctagcacatattgtacatatctaaataagaaatacaatgtttagatactaaataatcttaataaatacctaaaataaccaatcattagcgtaataaaaataaactctacttgttattgcatcaatatatatgtctcacatggttatcattttgtaaagtgttcaggttttaggttagttcaattaatatagagcatacactttttcttattgtttttttaaattgctataatatttttcgtcttttcctacaaaacaaccattacttgtttagttatataaaaaaagattagtttttcaataatgtaattatcaacagacaacagacctaaattgatagtatatctcttattacatgtgcataactgtataagactttatgttatgtacatttgattcgttgaagtcgtaactaatctgagaggcaataaaatagtaaacgaatccatttatatagttacccttaactaaatgtgaatcacaatttctcttgtaataaacaaatcctgtaactaattgtatatctttttcgggatcccattttaccttattttaatgttctcttacagtaaatagtttgaacaaagcttaatcaaatattttgtcgggaaacaaaaagtaaatcattttcattaagtcaggcctctccgatccgatgcgtgtggacgtcacgcgcgcattagagatagaaaagctctgttagcgttccaagtggcaaactttaagacagagagtgccaataatacgtataaaccttttcctgttttgccagtagagagatatgtacgtaaccacctttgctttgtcgtcgactcgtcgtacttgtacctgcactgatgcgcacacacatggaaggttttttaatcgcactgatttaaggctcccaagtcaaaaacatatgatcattgccaaattggcaagattatcgaatcaaccaatatagctgattagttaggtttttgtttgttttgtttttataaaaataaatggctaataagttagtttgggagtttgattaattaacttaagtaactggtttaattgggttatgtgactcaaatttgttttgccggtctgtattttagacgtgaatcagaatagtaatatatataacgatgacatttatacgaaaactagactacgtgtttaatttgatcgatgatataagtattagaatataagaaactaataaaatttatcaaaaaacacagtagtaaatcaaggttaatacatatcctatttagcaataattaagcaattttttatagaatgaatgttaaatttattcataaaaaaaaaagttagtgtcacatcgagttcatcattttattttattttgtctctagttttacaatggaaacctaaaatatgaatagtttttcatgttttgttttttcctgagtttcgaagcaaagtgatatataagcaattttcagtattctaattaacacccaacaatgaaattttaaacatcatatatacatagtagtaattatattcttattgaaaatctctttgaggttgtaattcttccattagaggccaaatattttgcaaatgagaaacattatgtggtagcggaaaagaaatgtagtagttttggagcatcggtataatatctataaaacaattaaaaaaatacatttttaccttaacaaaaactatctcatcacttacaatgtaacatttatatatatataatacttgtttgttatatgattcaactccatatagagtatatactgtttctctctaccattttaaccggaaaagatatgtgtcatttatcccgaataggtaattatatgtatgttttgcctaaagttaattttaatctgattcgatatgtatgtattaattggtaacacaaactatataaatttttagtttttagctaaaaaggtaaacttttttaatatagtgcaaaactgtacaaaataataatacataaaaattgtacaattgttttttgaaaataacgtttttaatatcaattctgtgattgtaattatcaaagcgtacacctcatattaaaactatataagattaccattcagacccacactatatattatcagttatcaatgcatttattttcttaattgagcatactgaaatattatatgatgggtacgcttacatagaaatatatattaaatgcattagttatagacttatacttaaattgattgaggccaatgttttgaaacccgacccggacgatgaaccggactatcttctgggttactgggtcatcgggtcaaccgggttggaccacgggttaattagttaaaatttatttaataaatttaatactaatagaaattttagaatattttataataaaaaaaatttgtagtatttataaatataaaacaaaaataatcatatcatatttaatcaaatataaaattatattatatttaacaaaatataaaatcatttacacccaaatatatatatatatatatatatagaaaaaatcaaacaataataataaagtggttaaaaatttgaaatccaataaatgtctaacaccgtaacaaatatattaggagatcatcaatgacagaaataaattaataaaacatcgtgaattaaaacaactaatctcggttgtctctctcaccattcgattcaattttaaggcggtattgtaaagtcatcaacaaaatctaaaacatcaaatgaatttaagaactgaaaaaacttctaaaaataattgaataaagtctaaaatcccatattttattgtaaaatcaagagaactttttaaaacccacacccgaccggttcaactggttcaccgggtcacgggttaattgcgagtttttgtgggttttttcggttttgaacttgttgggttttagcactaaacccaaaccggaaaaatgttcggattacgggttaaccggtcggaccggacggttcgggtcgggcgtgaaaacactgattgaggccatagctatgtctttaaaatttattcggccactaaatagcttttaattcatttgaaatatacagtatgcttttctagacttaacatttttgattatccccttttttgttagtgtcaacaacagttttgattacccccctttttttttgctagtactgtcaacttcagttttgattatctgaatatgtattgaatcaaataatcatgatgattgtctagtccggccgttggagtttatttttaagaaaattatatcaatttaaaaaaattaggatattaaagatgagcatgttcttatttttggtaaatttcatctattcacatgtgtttttaattaactgaataaataaaataccaaattataattgattatatttataatatttgggttggttaatttgattgttcagtttaatccatttggaagcttgtaatctgcgattattttttattttctgaattatttgagattaggtttacgtaatggcttcttgtgattactctgatgtcatgactactttttgttgttggtgttgttaagaatttagtttttgaagatagatccctgaaaatattatgagtgtataaaacacaaatgatagaatatatagtggtgacctctaatataatctcattgtttgttttatggcttaaccattcaatcgatattttacacacatatattaaaatctaaggtttaatattctattcttatttaatactagtagtcactgacttactgtgacgactgacgacaaatgtataagattctatatctaattatctcacgttcccactacaaacaataattgacaacaactccgttatttctacataaatattgtttcatagttttagattcatttagagaaaagctaaaaacaaattcttatttgtcttttcctttctgtggttaaccacctgagtcacgagactcgagtcaaatctcatagctaataagtcaacaactaaatcaagttatctaaaaactaagtcgcttacaattaacatacaaaaacaagtcaattaacataaactactaatataaatacatacaaataatttatattatataaagaaattcatccaaaatataacaataaaaagtctgattgagactttgagaggtattcataattggctacaaatgtaataacgaattaacataaactactacaatacataaaaagcatttctattatagaaaaacaattattctgataaagctttgacattttattttaaaataaagttatagaataactaattgaaatatatattttaggatatttaatttggagcattttttctacatacaatagtttgctcaatatatatttcatggacttaacaatatatacatatcagataatatttaactgaagatgctgaaatttcgtgttgatttttagatatatattctcattaattttaaagataagtttttaaattaattttcttttaactgcgtgctacagtgctactgcaaacgtttgagaaaccaaaacttttaatttagagcattttagaacaatatggaatgatacgaaccatttattatgattgaagtcaaaaaccttaaacatttgcaaatgattgcatgaaaaaccatgaaacccttacctctgaattaaataagttcaatgatgtgtcaattaatctcttactcactggtaaacttcggaaacagagatatatataaatcacaaataaaaagaaatttatgcaagaaatattgaaacaaaactatcaaaccgttttctctatcacttgtcaattccttaaaataataattccatatacagtttatttggactgaatctcagacaaccaaaattagtatcactagatccaaatttatggtaaaccaacttagattttaatattttatttaattagggttttaggcttttagcttgtcgccattagataatttttcaaaattgcataatttgacctatgaattacgtagaccaacttgtgcttcattaatatacacatgcaacacaaacatacgtatacatatcagatttatatgcaaaagttgattaagatgaaaaatcgttgtcccataattggttacgtttccaaattccaacctcctccaccatccaagcaccacttggaaagttcatacaacttgagccattgctttaaagaaaggccacacaccaaatttcctttaaaactctttttctattctaagataattcatagcaatattaagaattgttattatttgtgatgatagatattctgctaaattaattaaatgtagtggattagtcctcatctaataatatctttcaaatcatgatttatgtaaaatacatataaaaaatttaactacaagaaatataaaattgtgttctttagggggtgttattcgttaataaattttaatagaattgaaatccaacactaatccactgttattcaactaatgattctaaatccagctttaaaatctagtgttattggaactcatatttgtaaatcatgcttaatagattttaaagtttggtgttattcaattaagattttaaatatttcattaaaatctaatgttattcaaaattaaaagacttgtaaaatctttgtatattaattgatttgaaatgaaacctctttggagtttcatgagtaaatcattagaatcaaaaatccaagacatattgtagagattttgaaagtcatacaaacatattcttaaaagcaatatcagaaaacaaatctaaggtggtgttattcaattatggagttaaagtcaattctttaagctttagatttgttttctgatattgctttttaaaaaatgtttgtatgaatttcaaaatctctgcaatatgtcttggatttcaattctaataaaatactcgtgaaactctaaagaagtttcatttcaaatgaattaatatacaaggattttacaagtttttaagttttgaataacactggattttaatgaaatatttaaaatcttaattgaataacactaaactttaaaatctattaagcatgatttacaaagatgagttccaataacactagattttaaaactggatttagaatcattagttgaataacagtggattagtgttggatttcaattctattaaaatccattaactaataacaccccctaaaacttaaagaattgactttaactccataattgaataacaccaccttattcttgagatttttcataaaatattgtttatatgtattatttttcaaaactaccttaagtaaaaataagaaaacatgtagccttagctacaaatagcaatatatctgatcaataattatcctaaacctttcttattttttgttttatttattaaataaattaaaaactgaactgacaaaatggcaaaattaagagaaaacactaatttggaaacttaagaaacactaattttaaaaaaaaaaaaaaatcacaattttttattaagaattttatatgaaatctttctagatatagaagccatattaagttttttaaccccttttcataaggaaagctggctgtatgatttttttttttgtaacttatgaaagatttaaaacttctctattcgctctgcccaaaaacgttgtggtatttttttttgtggaaaaacatattttatgtaatatatattcttcaggaaaaactaatgcttccatgctgaaaaaaaaattaaaaaccacttgacaccgaacatcgtattgtaaaagcaagtaagcaacaacataatgaacaaaaagattcacccattgttatgtcaaaccgccacgttggtccaaacaatcatataattatatgtgacataaattaagtgagtaaaaaattagggtcatggccgaggtaagtaacacttttagagacaatttttccctgataatctactaacgagtaacaagaattttcaaatttgattgacggaaacagtttttaggtgagaaaactacggttcacaagtgataaaagttcatgttgctaagtattattcatcacgagtatgtggttatataaaatataaattcttgaacttattaaagagtcattaattatctaaaactattcaaaacattagaacctcttatcaattaattgtttgataagtttctaaaacattagaaatttttgttgatctatcttctttttttcaagcaaaaccgaaaatgattttcagaacaaaaatatataatacaactttgtgaaattaacataagtttgtaaattgtaacataaaattttacaaaatactagtattttagctgcaaaaatggtaagtatgattaataggactagttcgtcatagtatttactactagctctcttgatttcttttgtttcctcccctaattctgatgactaaatttttgtcaacgcatgggtaaacaaccatttgagccgtcaaacacaacaatgactcagataaattagtttaagaaataaaaaaatcagtaagccgtttatttagcatttgagttcgtaaattttaatgaaatttttcaaaacaggatatttccagctcgttatactagttattttgaagatttttctacgagatcatgtctcttttgtcaattttttttcttctaataaagacggaattcggattgccggatggccgaaaaataatgaatacaaatgataaattagttaaaagaaaaaaaaattaaaaaagcaaaagaagagaagaggagacacaacaacaaaaatgtggctcttctattgtacgtagttgctctcagcctcctccatccaatctccttcttgccatattttttccactttcggtatctaatttctctatctttccattttcatttttaaaaataaacatttatcaaccaacttgcatcctattcgtatgaagatacatacataagtggtgtcggtgttgtttgcattcataaaagaatatcaaaaaaaaaatgttgtctgaaattttaatccgtaattatcattttataaggttatttaggcatataaccaaaattctatatcataattatgtatatgatatgatgacaaaatatgtaaacagaacgaatataagtttttcgtggaaggtttttttcacttttgtgaaattgtttaattatgataaaagtgcattattgattaaattgcatgccataaaaagagattaatttctacaattacctgtaaaacgcttactgtcaattggtaattaaccaagacataattgtttacctttttaaaatggataaatttcatctacttaatttataagaatatctcgggtatcatatataatgtatgtatatatattctaagttttatatttaaaaatagtacacgaaaacatataaaccaaagcatattattgcaattgacttagtaaaattgattaggaatttttgaaaacaagatatttccatctcattatactagtgtgtatatatatatcctactgaaatttatgcaaattttgatacttgctagaatcaatctaatagttttccaacataatcccgcaagttacgttagacattgattgatcacattaacaaaatatatatatatatatatatatatatatatgtatatattaatgattgactcaatgtaaatcatacaattacttttcattccaatacaatggaaagaactactcgaaacagtgaaattccattaatttgttatagtgatgactgatgtcatcattggttttttactccaacctttttggcaaatcatggctaaccatgtccatcgagactcgtgatgtgcgagttcgtttcatggaaaaatcatatttttataagatacgaaaatgaaaaggaaaataagcaattatcaaacaaaaagagaaacaaacatccatgaagatagcgatcacgtcggctttatctagagatcgtataaaaagagaaagattaaaagagagattggagaggatatgatatgattggccacatttgttattgccacttaataaaatggattattttttcatctttaaaaatgagttgtgtcaagtttcttcttctttccatgcagcccctaacctcatatacgtagtcggataagaaaattcatttgattttatatcttgaacttacgaaaactttgttatctttgaatagaatcagtaatcacataagtggaaatgttgtactatagaacaagtttttgggtgcgagttagatatatattaatatatttttttaaaaacgtaatcgccataatagtttaaaagaccaattcatttttatatatttattcaaaaacaaagtattttcttaaactttaaaatcaagcaaagttattatatgaaaaagagttaaatcgaatgatatttttccattctttactacacgtacgtaccaatattgacttttacttcttcgtacatatattgagtcttttttatgatgacggcgtagatgtgagtcatgtgaccattgtcatccgtacactactagattccaatggaactgaagttgccattgaaggactttgcaatgaatgattataatttagaactaagaattaaactttggtagagaaaccacacaagtagaagtgtagaaccatcatgttcagcagttatttaatcgaatttgcaccaaactctagatacattcatgatcgataccgtaggtataagttcttataatatttttttcacgattacggtttcattagagggaaattactttgaaaagttgtgtattttagtacacattttgaactttacatatataattgatttagtgtgaagaataacagttgtgttaaatcaaactcaaaatgaaaaaaaggctttcggcttctttttgcaattcatttatacatgcaatgtatttttttcgttttaccccaacaaaaataaaaaatgtggctgcttcgatttgcacaagccaaatcgatcacaactataaactgacgtctgacccaaactcgtgccctatttgctatttgatactgttttcataggtatttgactgaaacaaaattaatttaaaatcattgttttccttattttaaaagaaatatgttaagagatttattaatcatcgtttgggataagactatacatataagtaccaagttgttgttttattttatttttatttaatcttatacttgttcgcatgatagagaaattattgaaggctttattagcctttctatgagtgaacattccactcttcttgaaagagaacaagatagataatatcacagctttgttttttttttctattcaattcttttctctcctttttcttttgtttttagtttttaatatttcttcttttcttattgcgttaagaagaacatatctgatttttatggtcttccccaaatttggtgcaacacttggcaacttgggtagttgcatactttttactcatctttcctaattttcaaatctttttttttgggtgtgcatataaacattgaataataatatataactgtgtatatttatttgctagaataaaataatatagatgactaattaagaaagaagacaattaacatttaaaattatttttgcctttttattattttaatcttcacaatttagtaatggaacatattacacaaaatttatatttatgcattatccagatatcatattgcctttaatgattaggaaattcttgttagaaacgaaattctaaaataaataaaacacactcgtcatccattaagggcaaaacgtttaaaagatttcttgtcttgtgtacagttggccggcagctttggtgcaccaatttttgtccctcttttttcccattgttattatgctattaatttatctcctaaaagattatgaaatcatacatatttacacgtaaaccacattctcttaatttagctagtattttagttaagagtgtaatctcttaaatgcattacgataatatttttctaagtgtgcagatagtatatatagaaacaaagtcttatctactcgtaaactaattcacattaactactacttgagattaaaccaatataagtttgcttcggtttgaaacaaaacaagagcttgccactttgttgcgttttgacagttcttctcatggttaatattttttgatcttaaatgaaaaagtatgatattgaataatccctatatcttagataaaccttaaaaaggtatagcttatgtagtcaacagtttatagtaagaggcctataggagtttatacaaaatttatacggattaatgtaactcactatctcatgtactatgaaatatcattaaggaaacaaacagttttcgatttttgttgttgatgttaatttgctcatttttcatactaaaaacgactttgcattgtatttagggatatttgagatattgaattattttttttcgtttccaaggagagtctctttttagtgttaataatgacatatcctattgcctaggggccttgcttggcaactagagaggaaatatcgaaatcttcttcttcctttcatttcccttttcttttttcttttttttctttctttgttttattttcccttttctttttcagtacagttgttttcgatatatatatatatatataattataatgatgtaatgagaaaattattgattttggtgaaatatcaaaatatctatatgattttcaaggttgacaagcgcatgagatttagttatgatattttagcagtaaagttatgtctacatttcataaatgtgtccgagtatttgctatttttagcatataagattaagccaaaaactcatatttttaaacgtaatacaaaaaatgacaataaagtgtatatatagatgtttatgtttttttttactaaacaataaaaataaatagaagggaaattaattaatactatattgtaattgttctcttatatcactttaaaaaatgaaaaaaatatggtcacggttaaaaaaatgagtttataggaagaaatggtaaatgttttttcaaaaactagttttatagattttagaaagaaattaaaaccaattttctaaaattgtaaatggatagttaagtaattaatttctacgaaaatataaaaccaatacactttaatttaaaactatactattcgtaaaagtgttatgtagtgtctcatttagctactctagatgaatttattttcttgttaatcgttttcagtaaccggtatataaataaaagtttcgtatgtgaaccactcggttctatggtgtagtggttagcactctggactttgaatccagcgacctgggttcgactcccggtaggacctttttttgctgattgactatttttttttgtcactgccatgtttcttttttctttgagactttgacgacatttcaattattttttttgtttgggccttcaacttctgttttttttttgtcaggacttacgacccaatacttacaagggtgatttgtagatatagcactttttcactaaataattaactaactaacaccataaatttaaaaatgtagtaaataaccttcaaggggtgtgaaaagacatcactgtcctgctgttacgtttggcagcgaagaaggagaatgtttagtgtgagctgacgtggctttattattggtgttgaggtgagaaaagaaatcaggtggtaggatagaagttccattttctcttacttttttctttaccccttcccaattgtaattcatattatctgatcttaaaaaatttaattcaagttcatgatatatcaattaaaaagttgtatagttttctacatatatcatgacttaaatttttgaaaacaaacataaaataatttagatgtgaatagtgttgtcaatgaataacataaagttctatatagataaacaatatttttttatagaaagatattaaaccctaaaggataatatatagagaacccaagagtttaaatctaaaccaataattaaatcacttaacatccttaatcaaaacaaataattcattttaaaacgtatataaaacaaagtatacgtaaatagtatatttacaaatagaatagtatctctcaaattgcaacaacgaaactcaatttcatcaccaagacaccaagcgcaacaacgaaagtcgattccctgaatccaaattgtgttcctccctctgtaattcgaaacccccaaatcaaatctcacccaaaagtaattaagagactctgatttgaaaacaaaaacaagtaacgaggtaggtgtaaagactttactgggagaaagagagagggagagggaaaaagaaagagagagaaagagagagggggagagagagaaagagggagggaagatagaagggaagagagaggtagacggaaagagaaatggagaaaaatagataaaggggtaaacttggaattaatatacaaaatatagaggatatcagttctttttccttttgatgttagtttcttaattataaactttttgttggttagttttgccaattcccttacttacaactgataaccgtatagctcttttatcagaaaaaactttatatatctaatctcccaaaatatacaaatgtgagaaatatctgaaaataaatcaattctcaccaattatatatatttgattacttaaaaatgttaatatatggcagttgcttgttcagagaataacttaaaaaattgatcacgagatcggcttatgtttaatatttttgaactcttgggataaaagttttgaagatatatatatcgtagaaaagttttgtgttctttaattagttacaaaattttgagttttttttttttctttcataaagtatcagaatatcagggtgatttattgaatagtttattttttctcgttctactcacgttattcttgcaagtattaattttggtttgtttataaaaaaagtatttggaaattttatgtgagcaagtgcgaaataaacgaggattttgggaagtatttttttttttgtaaaatcggttatattgaacgttatactatatatattattatataaatataactgctaaagactaaatttagatactaaaatcagcattgatgaagatccacatgaataagactcgtctcttaactcaacatttaacatatgattttcatattattgatcatttatctttgtgttggtccaaggtgccagactttattatttacattaaatgttgagttgtttactgacatattttttaattaaaacaactttcatattattgcccatttatattttggttggtcctccaaagacttacaggatacatatgtttctccattttcatttttatgatctaaaacgtctttttctaacttagattctaaatggttacagcaaaccggacatacaattttgcttgtcaaatggatcgttgagatagacaacaatccaatgtaaaaccaaaactcttgatttataattggtctgcaatgatttttttttggttcatataccattttataagatagcaaaccattttcatcataaaagatatatttttttatcattgaataccaatcaaacccggtataataaataaaattgtaccaaattaatgcggttaggtaaattcaatttattggaaattaaagaagagaaaaaaaaaataacgaacaaaatttccttgacacaaaaaaaaaaaaagaagaaagaaaaaacccttactctcaattagtcaatccccttccctagtcctcctctcttcaagcttttcacagaaaaccaccacccttctctctctactgcctttttaccacagagaagagagaggatccgtcggtgtgctagtctcactgacactacatccgatcgtcgccggtaagttgatttcgttactctccgatcaatttcttttccggaggaggaacttgttttccgtgcgaaattctgacttgaactttgttgtcaattcatcaaacgctttatcttttctccatcttcaattatcttactgcttcgtcgctgatctctacttgttttcctccgttttgcattttcagtggcgtttcttagtgtttcactagatttagactggttttgcttgtgtgcattttgtcatcagtgtttatgattgttcgctttagctctatgtttctatggatttgataatatatgagttcgctgctctggattcagctggcttgtttgattgttcattttcataattctgtccaaagaatcaaatccacagtagctcggatctgagattgatttgtttctttgcgtctttgtgtagatttgactttaattttgagattgttgtgtgctgatatacagcttaattaatatagcctctgatgtgttattatcgatgtgtcattatcaatctacaggtgacattttataagtgtggagtttacttcagctttattattcaggaattgatggatcaggttggtgtaaatagttgtttcagttcttactcttttgacgagagtctctgttaatgtgctcttattaatgcagtacgagaaagttgagaagattggtgaaggaacttacggtgtggtttataaggcacgtgacaaagtgactaatgagacaattgctttgaagaagatcaggctagagcaggaggatgaaggtgttcctagcacagcaatcagagaaatctccctcttgaaagaaatgcagcacagcaacattgtcaagtatgatgttaataccattgttgaaaactgattcagcatgatgactctggtaaacaattttgattgatgttttttgctacacagattgcaggatgtggtgcacagcgagaaacgtttgtatctggtttttgagtatcttgacttggatctcaaaaagcacatggattctactcctgatttctccaaggatctacatatgatcaaagtgagtgctaagaaactttaggcattgttttatatatgtgcttaaactcaatactcaatataagctgatcagagctgttcatccactattttcagacatatctttaccagattctccgtggaattgcgtattgccactctcatagggttctccatcgtgatctgaagccacagaatttgttgattgatcgccgcacaaactcactgaagcttgctgattttggactggccagagcattcggtatccctgtcaggacatttactcatgaggtaccaaagagctttattccttgttcatatgttcccgttatgaaatcttttggctggctgcattccttatgagtgtaatgtaaattaagtattataccacttatgtgtctgataaatgtgatgaaaaggactaagccatttcacatagacggttgaagtaagctagttcaagatactgtaaaatatttcaatgctacatccagatttcagatctcttcctggttattcacacaatttttgcatattgttcctttaggttgttactctctggtaccgagcaccagagatactcctaggatctcatcattactctacacctgttgatatttggtctgtggggtgcatatttgctgagatgatcagccaaaagcccttatttcctggagactccgagattgatcaactcttcaagattttcaggtttaattgctaacttccccagtccaatattcctctatatattacaagtgcaaagacttgtctgcaatgatatcacaagggattgtggaaacattttcaacttgatatcacattttggagaagtagtaaaggacacagaaattgaattgttaactgattataaatctgttactgccttgttttgttgtcttcttctagaatcatgggaactccgtacgaggatacatggcgtggggtaacttctctaccggattataaatctgctttccctaaatggaaaccaacggtacttcaaatgtctttattcgcttgtacatcttgtcttcagtagtcaagagttcacaacatatattaattcttgcccttgtttttttttcttataccacaggacctagaaacttttgtccccaatctagatcccgatggagtcgatctcctttctgtaagttcactgagctagatatatacacacacatatatagacacactacttctgctattagagacctgtatgcttgattgtgatggatctggtctcatgtttcttactaaaaaccttttaaccatttgaggttttagatgtcttataaagtcatcaagagccggcgtactaaaaccaattcgattaggcttcatagtttcaaaaccacatgaagccaaaaccaaacttgtttgaaatatgaacaatcttcaaaaaccaggattcttgaaattcctaaccaaaccagacatctggatagaaatctaagattttgagctcctgtgaaagcaaagatgataatatatctctctgcttgatttgtttcagaaaatgctgttaatggatccgaccaaaagaatcaacgcaagagccgccctggagcatgaatacttcaaggatcttggaggcatgccttagaaaggcataaaaccagtaatctccttcattctatatataattatcaatcctaagaaaatgaagaacaatattaatgggttttgtttattctttttctgagttcgtttcctacttatattctattacgaaaaaaaagaaagaagaagatttcgagtgtgtttttttttacttctaagcttttgagatcagtttcttgtatcttattttacccagaatatagtatttccctatatgaaatatggtttttgttttgcaaaatgaccatattatgcaacttctcagcttcttgattgtgccttgatagtgatcttttgaaatatatcccaaaaaacatcacttttttcgatttcattagtacttatttacgagttacgacgtcatttgataactagtatatatggtccgtcgatcttaatttcctatttataaagggtgcaccgtttttaatgagacaagagggtccaagtagccaatcattaatgagaccaaagttgaccagaaaaagctgacaaataaattgacgagaagaacaattcaacacgtattcgatagtttggattacattttacagttggtcgaaattcgaagtagatcaaatgtcaataatctaattcgaaactaaatgaaggtacctgataaccatttcagtgttagttagcagtggtttcaatctattcactaagcaaagacgcttccattctgaaaatcaagtccaatgggaggcataaacttaagtgtctgaaaaactcaaaaaagcatagcctcgtgtaaaatagaccgatctatttattcatgaatatatgtatgattatcaaagtgcatttatactttttacgttttaaaatttcgtatataaactttccttagtgaatattataacataatttctaatgaaaacttgttatatattattattttatatatatttttgccaagagttattatcattttaaagttttagacatttttacttattgttgcagagcgcattttctcttacaatttatctattaatcaataaaataattatagacctttttaaaagataaatagtaattagtatataaagttatatttaacaatagtgtattaatcataaaatcaaaatactaaaaaaaaaaatcaaattcaacagaaataaatagcacattaatgataaaatcagaataattttattaaatcaaattcaacagcaatatgtcaccccaaaaactatatacttattaatttcaatcagtttcattgtcatttacctaattagtttaaaatatatagaaaattataaacgtgtaatgtcaagactgattcctcaaaaaaaaaaacccttactgaatctattacacatcaattattctgtaacagaaagaaaaaaaaatcattaactaattaccataaactccattagaaactgatatctttgaaattagttgactcgtaaaaagggaaagctgcattattaagaaacaaaaaacataattctctttctctgttccctcaagtcaataattccttttttgatttttattttctaaaccaaatttattgctctgaagactttgtttgtgtagcaaaaaaaaacgcgattttttttctgggtttcttccgatgttagatttgcagccgtcagatcggcgtcatggagctccgagtagtagcggcggtgttagtggtggtgatgagctgatcagaacttataaaggctggaaaggcaataacgtgagcttcttcttcttcttcttctttatctcttttatgattggtttttgtttttctgggtcagatttaatgtctttgaataagatctgaatcaaaaatcctaagcctttttggtggaattactcagaagttgtggaataatcattctctctgtttttttgctgggtttggtcatattttcagaagtttagagtaataagtttgacttgtatgtataccctaattttgagatttggtcttgtttacgctgtcaaagatgctggtctctttcaaaattagagctttttgatgtttaacacaagtttgagtaaagatttacctagatgtgtgatcacatagttacaagagtctttaagttgttaattcaactagatttgtaacatttgtcaatatgttactgatctttgatttattcttttttgtgtctccaggtgttcttccttggaggaaggctcgtgtttggacctgatgctcgatctattctcatcaccgtcttcttaattacagctcctgtcattgtattctgtatttttgttggcagaaaatttatcgatgattttcctcaccatagaggagtatcagttttagctgttgctgttggtctgattttattagtgagttcctttttctcatgaatgtttgttcccttctgattctgattcagctctctactgcaacctttttactcttggcatcttgataataaaggtttagtatttgtttgtctacaggatctagtatttcttcttctaacctccgcgagagacccagggataataccacgtaatctgtatcctcctgaaccagagagtaatgaaggcaatggagaaccacgtcttgctcatactcctcagagtcggttgcctcggacaaaggatatgattgtaaatggaattactgtcaagatcaaatactgtgacacatgcatgctttacagaccgccccgtgcttctcattgttcgatttgcaacaactgcgtcgagaagtttgatcaccactgtccttggcttggtcagtgcattggattggtaatggatattttttttcctcatcaaaaaccaattacaattgcatatacctagacgattcaagagtaactaacagttatttgggggttttgattgcagagaaactataggttctacttcatgtttgtgttgtgctcaactcttctctgcatttatgtccatgtgttctgctggatctacgtcaagcggataatggatagtgagaacataaacatctggaaatcgtttctcaagactcctgcttccattgcactaataatctacactttcatttgcgtctggtttgttggtgggcttacctgtttccacttgtacctaatgagtaccaatcaggtaaaaatcattactctctaaaagctccttgttttgaaactgttggataatttagctacttgttaacattgtttctctgttgtttattatgttgtgatttggcagtcaacttacgaaaactttaggtatcggtatgatagacatgagaaccccttcaacaaaggaatagtggggaactttatggaagttttctgcacaaatgttgccgtatctcagaacagtttcagagaaaaggtttcaaaggagccagcaataccaccaaggacagtaaatggagggatgtcaagcccgagcttacagaaagtttccaacgacatagagatggggagaaaaccagtgtggcacgagacagtagaagaagagctcggtgacatcgaaaaggacatggaagcaggggttgcatcacgggatttgagcagaatgcttcctccagaagaatctgaaggacgagggattatgcattcaagagagtcaagcaggggacgcgggattatgcattcaagagagtcaagcaggggaagaagaggagggagctgggaattgtcaagccgtgtaaacgaagatttaagaaccagagatgagtctgtgtcaagagtcggtgaagacagctcagagtcttcagacaatgatgcttcaagagatttacatgttgagatatatgatgcagtaacaagtagaggaagaaccggaactggtatagggcggttatagtctccggtttaaagccaattacactaagaaaaaaggttactgaaaaaagtaaggagattcaagattgtgattcaggtttgtttgtttatttacgacattgtaacgtgtttgtgtaaagtatttgttcaaaggataaaagctttcaaaattgctggaaaatgaaacaactcaaatatttcattttgaaatagaaactttaaaagagtcattatgttgaggtgggtaaaagagcctaatgcagcctgaaaccaaattgagctgctgcccacatgaagtccgaatttgaaaaatatgatgtgtttcgagttctagtgggttaaacccgataaatagaacgatattttttgatgtaaactacctaaaatatgctaacaatcaagagtttttatggcactgatcaaaatgattacattatattggttacagttattaactagccatactataatctccgaaaatgttactaaatggaaacaccaaaagccaaacgcaaattgatcaaagttttctactgttcttcattacttcaaattattcaacataagacataagttcgcaagaaaacttctacactcttcacatactcagcaatagatgatagatacctggatgaacctgcaacatacaaaaaagttaaaatgaaagtcagatacatcaacaaaaaccagtactaatcgagttgtcattctcagtccagttttcagaattgtcttacatgatataatgctagaatctcatactcctgacctccttgctccttgctatcgtatcctcatcatcaccaaacttgaagataaatgtactagctattactgcaaacaccaaatgcaaaactttatttctgagactaataaaacctgagatatcaaactttgttgcactaaaagagtaacaatttcaactactagagctatgcattttactatttgtgctaagacaaaagaacagagttttaatcacagagaggcagaggaaacatacttgatcaagaccaaactccaagaaacgttgcaggttatgtcttgagtagacaaaataaatagagactagccatagagaatacttgtgatagaagaagaaatctgcaaaagagaagataaaatattcttacttttacagaagcagaataaattaacagaggacaagtaccaaaacactgaaccatatcgacataccttagtttacttgagagaactcatctgagattagtttctcatcttcttcatagacctgaaggttcttagacttcataagaaactctaaagcctcttcatcaaactcaaccaagtaagccatcttcacaagctctgataaccgtccgatcagatcctctctctcccacatcacacccttagcaatcacctcagcgaaacacgtggcgtactccaaaagctttcttttaccacaagttttctccatcttctctgcataaaccactcctttctccctttcccatcttatcatcctcttagcctttgcaatcagcttctctccctttgaaggtagactcagagtatactccgttgtgatagtctccgaagtttctttaacgtcgatgtcaacaaggctatgtatgattcttaaacgttcagcagtttctaccttgagagatggatcagagaggaacgcgagaatgagcttcactagccccggtccaatcaggttcttctttggatcaacaacctcttgcagctcggttttgaatccggttagatcagcttctgcgatctcgacgcatttggagacctctttgacaccgatgtttcgataaatctcaataagtctggttcgggacaatgtaggaatgcttggagttggataccaaacgaaaacaggagaatcaataaacatatctttcaagagcaagtcatcagctatgaacacgtcgcttatgctagataacatgactccgtcgttgttgttgcaatccggtgagtgtacaggcaaacgcgaaaaggactcagagaggagcttctctgctttcaccgtgtcaccatgtcgcacaacaaagctccagaacgcacaacactcatgactagacaatctgttcttagttttctcccaatatttccacaactcgcagtaatcttcaatagacggattaattctcacgccaaatgcagatgagaagaaaccaagaaggttatgatccttaccactacaatagtggttttcaagaacgttaaactttgatccaaagagcttatctttgtcaaagagcacacaactagaaatatcagcccatttctcatcacttggtatccaaatccgacctgaagaggcacctttctcaggtttccattcagcttcactaagaaatctataaacccgggaaatagcatcagtttctgagagtttatagacatttcttgcaagcaactggcaagctttgtctgaatcatgaccaactcctatcgcaataagctcttctctaaacgaattaatatctgagccataatactcttcgtcgatgaagggaccatcacacggctctaacttccaggtcctatcaaacaagagacactcctcgggactgcggtaacctgcatgtgtcttcaaccattttactgagaccttatcaagaagctctttagggagttgctgaaatctgtcttcacgcaagaacttgatgcacctaaaaagagacaaggcgcttgaaggagcgatgcgagatggatcagggagacttaaggagctgatcacatggctcatgcctttcctcagctcaactgtaactcccaaactctcgagctcttttctgaactcgtgtatgctcttgccataccagttcggaccatcatcgataaagggaagattcgctatgaggcggagaggttcccattctgaatcaaagagaatacagtcctttggtgcacgaaaatcaccaagtttggtatgcagccattgaaactgtttgaagcttttcataagttcttcaggatatttgtacaaacttcccatcagcttcttgtagcaagataaaagagacgatgcggtacatcgtgttagcccagaggagatagctttctgtttaaatgtactcacaaacattttcacagcttcttcaagctgaagcttaacaccaatctgcttcagttctcctttgtaggcaaagattctgctgccatagaaatcatcatcgatcaaagggaagcaatcaaaaacagaaagaagacaagtccactctggatcaggtatgaaacattcagcaggagatttatagccattcttctttgtcttgaagcactgagaagaattccacagggcattgatcagcctatgtggactcagttgacgcatgcagtcaagtactaggaacattgcatcaggtgtcaagtaagtcagctttgcagtattcaaatgtgaaacgatgaggctgtagttatcaggaaacttaactacaacgccaagcaactcaagctcttccttataaccattgaggctaactacaccatagaaacctctgtcaatgaatgggatgtcactgatcaacgacgcagctttccattcctcgctgaacaaaacagctccatctggagatcggtaaccagaaatagtcttcagccaaggaccatttttgacagcagtgatgaaatcagctggtgagaggcgcttctctctcaagtacctgatgaatttcagtattgagaacacgtttgcgcttgactgtgttgacgtctcagctaaactcatcaggtggttgccaacaaatctacatacttcactgaactcaaacatgacaccagcaattttcaactcttctttgtacttctcaatctcgttgccatagtagcttcgatcaacgagcggaatatcaacaagaattgaaccgttctgaagaatacttccccatgatgaagtatgataaaacgactgagaaggcggccgataatcagaaaccccattcattgttgttctcagccaacttcctcctctaacagaattcaaaaagttggaacgaagagaatgtctgttacacttattaatccactctaacagcaacaaaacattctcctttgtaagaggccctgacaatgcaggtatagcaacattaggaggttctatgtcaggtatatctccagcctcaacagaagatttcaagaacccgagaaggtctttcttgttagaccgaagaccagcgaacctgttcgacaacaaatactcttctgaaagttcaatgtagccactatgtctccacggattggaaccaactaagctaacccatttacctgcactagctggaacaagaaccccattcctgcttatgtttacattcccatagttgtccacaagcggcatgtctttgcagcatttacccgcttcttcttttgataaaaaatcctttgagattgagtgatgcagaaagtgtgcatatgcaacaacaagcctcttatctccattaagattctcacggagatgttttgcatagtcagagacactaagagtaatgactttaacgttctctttgagccaagtatgaattatctccttcttggagcacactttcaacgctgtccgggttgttggtggcatgaagacgaagttagacatacatctgaactcatcgttccaatcaagtagccatgcctggttcttctctgtggacaagcataaagtcctaggactgaaaccacccaaactgctgagagaactcactcccttttggacaacatacttgataaggggaactttccccatatttgtattctgaaacctgcactgccaattctcagcgatgaagagtagaacctccacatacgtagcttctgacacacttgtcacgagatcacagccctgaatgcattttacataccattcgttgcttacttgcttcagacccaagaagttcaaaacgttgtcatattctgttctgtcaaaagcggaattcaaaatgtagatgccatgtgatgatatgttctgcagactcgcaccttcacttcctgctttctctaagatgtcccagaaagtaggtatgagacgaccaacttcacacggcttgtaaaagaacttctgtccttgatgagatatgcttggtacaatttcctctgcacaaacccttgccctgatagattctcggaccacattcagctttgcatagttagattcttttacaggcaagaacctaaaagcaggcagcaaactagacactggagcatcagtcgttttgaccaaagacgtgaatgcattcaaaaatgctagaggtacacagttgagaatcccttggttccatatatcatctaaaaggatcatttctctagacgatgctagaatgaaatcggcttgaatgatgaagggaaagtttgttaccatttctgtgggaagaaacgcatagataccaggagagttatttccatggccaagacgctctccgaatggaaacgctaaagtgatcacccactcctcaacttcgcttctcctgtccacacggttctcatgtttcactggaaacttttgcctccacatatagtaggagcattcttgttcagagtttttccctttctcagaagctgagagatgtatcgtgtatgactccgcatcaatgctcttcctcgtcacaaagttagtctcactaacaatccctattgagttcacagtactgagcttaggatctaggcaatgttctctgatagagagacgtttgatctttgacaaaaacaacagaacctcaggatgaacattggaaagctgttctttcaccggctttactttgtcactcttcaaaggcaagataatggttgtggtcggaagagcagaacccgaaccatacatcctttgtatatcaacaagagaaggatgttggtcaacccactcaggaacaatgtagccaaggctgcagtggctgcaaggtgcctcattgaagcgaatctgatagccattgctgaagatataaggctgcgacgtaatcagaaacacactcttgaaaccgattcctatcaagattgaaacagaacacacaagtaagaacaagaagtgtctttgacatttgagttcgtcttgaggtcacacaagcaaatgcgtgtacctttctctccgatgtaaccgcattttcgattgcctttctttgtagaccgtccaacactgcagatggactcaatgtttttctcagagaaacctttctcattgttgaaaataagaagagtggctggagctccggtgtttgtgatatcctcagatgttatcacaaattcaagagatggatccacaccttctggatactcgttatcttccgcattctgaaaaccagaggaaaaatacgaatgcttagcattagcataatgctaaaactgtaggaggaagccaaaaaaccataacaacatgttctatgtatcaatctcaagcacaatataattcgatttaagagcaaacatgattctgactgtatgcatgaaaactaggtaacatcatatgaaaacacttgaatacatgaaaatgaagcagaatagaaacggtttggttcggttttgttctggttctggttcaacattcgattacattattaatttattacacatcaacgcaaacaaacatatctaacacaaactacagaggaaaatagtgcgggaaaaaagtagatattcaaaatgggttacagattttctcgggaacagagcacaaaaccctagagaagacagagcaaaatctcacagaaaaaacacagaaacagtgacatataagtgataggggcagtaagagaggagaacttacttggataagttccataagaaagtgaacatcctttgcatagagctcagcggagagattcttcacagcttgatgaagatcctccgtcaacggattctcagctccaccgattgaaaacttagtccgacgaattcgttcaatgtgttgcttagccgattccgtcattgtctctattattactggttttgttttggtttctctctgcaaaagtgaagcgacagacaagagagtgaggaatttaaagagaagaagaaggaaacttcatggggaaggtaaaacttgagaattaagtataacgatgatgtgacattagtacgggaaaaaccaaaagactagaatttaattggctaaccaaaagacaaatcttcttgtactgtgtagtttactttacaagaaaaaaaagttatgtagcttcgtaaatgcaagtatcttttaaatcttcatcttcaacgtttgttattgagataactccaaattagatttagataatgatgtaatatatctttatataattaaatcttgtgtggtttgaatttgtgtttcttttagttcatcaataatgtaattcaaaagtcataacataaatagcaaatacaaaacaaatttaagatataacttactcagttactttgagatagaaatttagataaaattttaaaaacagaaaaattctatcaaaatattatttgttatatttgatgaaaaagtatataactattttggtttggggaaaaaactaaaaaaaatccccgtttatttttaagttgtccgtttaatacatgcattattaaattttcccgaacaatacatgagttaatttttatgtcctttaaaaaccttcgtttgtttaaattttggtaaaatcagatatccgagttaacgtctgttaagttttaacataggttaagtttaaacagccgttaactcggatatctgattttaccaaaatttaaacaaacgaaagtttttaaagaacataaaaattaactcatgtattgttcggaaaaatttaataatgcaggtattaaacggacaaattaaaaataaacggggattttttcgggttttttcccttttggtttgtgtatttagttgtatatttttacatatataacattttaattctaaaaacggtctagctcaactcatgagcaagctcattttcattaaagctcgctcatatatcccgcgatctaaattaaattcgatcatataactcatttattaaataagccttaaaaacagaattagcgctaataaaaaatttgagtcagattttgacaccctttgataaatttaatcttctaaactctactagaaatacaaatgtaagttgatatattaacctttctttttcgatttgaagaactgaatgattgaagagaactttgaccaacatttacttcattgtcttgcatatcaagatcaacaacaattatttgcttcagtttctcttcggtttcttccaatgattttctcatcgaatgttgaaccttggaagaaaccttttgaccattataaaactaatgcaattttcataccgttccataaatcatctcttgataattgctatacataattgatcatgtaatgcatattgtgtttaatctttctaaagtacaaatgtaagtcgatactaacctttctttttcgacttgaagaactgcaagattgatgagaactttgaccaacatttacttcatcgtcttgcatatcaagatccacaacgattattttcttcggtttctctttgttttcttccaatgattttctcatcgaatgttgaacctcggaagaaaccttttggcatgcacttctattattcaatccagccaagtgatgtttcattctatttatttcacttccaacgtattgtttaccacaaaagccacaagttataacttttctccgtcttgaatcaatagcttctctaacatagttccaagccaaatcttgtttgtgatgactggaacggttcgacgatttctcttgctttatattgcttgtatttggtgaaaaagccttctccattgatgagtaaactacaaaaaaagaagaagtaaaaacctctacacaattaacatatgtatactctttaccaataaaaaatgtatataactcttacaaggattaaattaaacgaacaaaacaaaagtattcgaatcactcaaagttatattttcatttgtatatattagctagcgataagaagactaggccaaacgaataaacacataaggattggaagaaactcgacataatctaattatactaaatcaacagtcaattttataaaaactgcaagcttctctttctgccacgtatgcttaagtctaaaattttgctctttcaaaatcgtaaaccaattcacttctttttactattcaataaaattcttgtttgacaaaaaatgaaaataatttttttttaccactttttcagcaactgcttcttccacgttcttaagattcttcagtttctctcccatctttcaaaaaccctctgccagttaatttacgatctcaatggcaaccgtataagccattctcagaaagataaaaacaggttcaaattcttcttcttctctcctttctcataaccttaaatcctccattctttcatctaaatacgtctaacagagaaacgaaagtatgacgtaaataatgaaagttgagacttttgtgatgcctaatgtgatggacgctgttaactcctcacgacacactgagtttggtccacctaatcgctggtatgaatatcactaaacctttggccattttgttgcgttttacttggtcttatcttcttacattttccatgcacaccagctgctcgacaaaatgaccacataagtttacgagaatcgtatagaaacaaaatggatgcaaatgttttggggctttcaattcaaaagaagaagaagataaccaatttgagagatgggtggcatgacatggcatcttcttctacggtttagtgtgtaaaataatttaaatgtgaaagcatcttatatatttcgagttaaaaaaagcgttttgattagaaggtaattcatttctccattattattattgttaagcttttggagaagaaaaaacggttctatatattttttcttttcttcatctattccttctctttttctctatgtctatgagagaagtttatgtatttatgtaagatcatttgatgtttccaataaaagttttctccaattttgacacatatagatattacaatttgagtaaagttgaagaggatttctattgagagttatagagcaatgatacacattgtattttgtgaggttgtgatattcatcatttgtgtatagttgcagatttcaaagaaacaaaatgtattattggtattgttgttttcccgtgcaaggcacggcacgggctgcctactagttaagatatgaatttggaagatgtcaatgagagttattttccatttccaaaaagaaaagaaagaaaagcatatgaaactgacggataacgaatggtgataactatttaaaattatggcatacccataaactcgtgacgaagaagatgacaacatagaattggtgaagacaaagacatgcttaataatattataaaacgaaaagtgagtttggtcgttgtcttacgggttttgaaatcgaagaacacaagttgactgattgactctacgttgaagtgaaaattatattgctatatcacatctcctatactcgctacattttatttttctctccctacttctctcaattgcaaaggatacaaggaaacagtgtgtaactaaattgaaatacaaagagcccatacctctagttattgttacgaatccctatttcactggttaacagtttgaatctgctttgaatctaaagctgtgaatggtaaacaaaaccgcactcaaaaccgcaccgcaacagtgctgtaacagtatcaaaatctctacatatacatatgtatctatgtattttcgttactatttgaatcgcaccgcacttctcgcgtaccgcaaaacgcagttattattcggagctaagagtcactcaaacccaaaaattgtggagaaacaatgtcatgaaaaaaaaaccaaatgcgttaaagaaccctaatcaattgtttttctattcatttttaaataaggaaaagatgacagcacagtaattaataaaatcttccatatctctattttaagctatatataaatattcatttttgatattgtatagtatatagtattaattagatctttactcttcatagtcatcgatcaatacacataacattccctaataagttaaattagtggctacgtttgacgaaaagccctcgtttaaaaaaaaaaaaagagaagaaggaaatcaggaatgatctgattcttcgacgaaaggggaagaggttgttgaattcaaaatctctctctcttctctgtctctctcgcgtgagctagttgcagatttttccagatctcaacattgaaattcaaactcaaagctagagagggagagagatagatagatagagggagaagaagaagacgaacacggagctgaaacaatgattacgatcccataccttaccgctgtatcaacgtatttcagctacggcttgcttttcgcgtttggtcagcttcgcgattactctcgcctaatcttcgattggtggcgcaccaacaatctccaggttttgtttgtctcccacatgattctcgatttgatgatgtttgtgaaaatctcttttaacgttgttttctaatttcgcttctgatttcacatttcgtttagggatacgctccgatctgcttggcgcatgaggatttctacatccgacgattgtatcatcggattcaggtaccttctcaattcggcgtttgttccttttgtgaagtctttgtttcaatgatttggtgtttgattcttaaatttatgtgtgaaggactgttttggacgtcccatttcaagtgcacctgatgcttggattgatgtggttgagagagtctctgacgataacaacaagacgttaaagtgagtctgtcttcctctgcttttttttctgttgaacaattataatttctttggtcacattaagagaatatgaaaccaaatgtaaaggttggattcatacggttgagaattggtttatcacttaggatgtcaaagaataaacctttggttgcaactctgtgcaggcgaactacaaagactagcaggtgccttaatttgggttcctacaattatcttggatttggttctttcgatgaatattgcacgcctcgtgtcattgagtctctgaagaaattttcagcaagtacatgtagctctcgcgttgatgcaggtacagggtcgtctttgtgtattaggtctcgaacaatctcttctctttgtggttgcctgacactagttgtttctgttatcaggaactacatctgtgcatgcagaacttgaggattgtgttgctaaatatgtcggacaacctgctgctgttatttttggcatgggttatgcaacaaactcggctatcattcccgtcttgattggaaaggtaagtatatgctgctacatcttgtgatggacacttatgttactcccaaaacctatgtttttgtagctttatgtgctgccatctgtacagggagggttgataataagcgattctttgaaccatacttcgattgtcaacggcgctcgaggttcaggagctactatccgtgttttccaacacaacagtaagcatttcttatgcttcattttccataattttttgctagtaaattgggtgacatgtcatctttatgctcttttgttaaattcttcgcagcacctggtcatctggaaaaagtattgaaagaacaaatcgccgagggacaacccaggacgcatagaccgtggaagaaaattattgttgttgttgagggtatttacagcatggaaggggaaatttgtcatctgcccgagattgtttcaatatgcaagaagtataaggtgaggcaacataataaatcatcttttatgttcaacattgatgagagattaagaaactcaatcaactaaactatcatttgcaacatcaaagttgtctagactaatttgattgtctgatgcgtaacttaacttcttcaatattcttgtttcaggcatatgtttacttggacgaagctcacagcattggagcaattggcaagacaggaagaggtgtttgtgaactccttggagttgacacttctgatgtggacataatgatgggaactttcacgaaatcttttgggtcttgtggtggctatattgcgggatcaaaggttggcaattttatacttcttttgcatttactgatcttttgtttgcattccttggtttatttaattttggtaaatcagaatttgaacctttcagaaaaacttagaactagaaaaccaaattacttaatcataagagatctttcagaattgcacaagaaagatacggccagttttttcacagatgaataaagagctgatacactaaggcgcaactgtatctacaatagacatggtgattgtttaggctagtacacttcatttcgaaatcaaccaaaggcgttatagcatattgtgtttcattttttgtaggacctcatccaatatttgaagcaccaatgcccggctcacctttacgccacatcaatttcaactccttccgcgacacaaatcatatcggcgataaaggttatccttggagaggatggttcaaacagaggtatcttgatagcttatttttgctctttcagctgtaactcttttgctctatgagcttcgtaatctcaaacttttataatcacctgggcaggggcacaaaagttagcaagaataagggagaacagcaactttttcagggctgagttgcagaagatggggtttgaagttcttggagacaatgattcaccagtcatgccaataatgctttacaatccagcaaaaattccagcattctcaagggaatgtttgcgagaaaacgttagtttctcttgcttttcttaaaaaatatttttttttgcttccacacaagagactcacctcctatgttcaacggataatgaaatttgtgaacagttggcggtggtggtcgtcggtttcccagctacacccctattgctagccagggctcgtatttgcatatccgcatctcactcaagagaagatcttataaaagccctacaggtaaatgaaatcttgcattgagttcactggttctcactcccatatcatttaccacgaagagccctagtagtattagtataaaacacgagttctcgggtttctagataggtctatgtaaataaagcctttctcagaaagggaatctgcagttcatccacaagatggattcacacgttttaatattctccgtgttatgataggttataagcaaagcaggtgaccttaccgggatcaaatattttccggcagctccaaaaaagcaagaagtagagaaaaatggcatcaaattggattaaacccgtaaggcaacagtttctttccaagagatgtttggctagcaattagctgtagtgtacaattatctcgctgttcgtctttgtcttgtcgtgaaacatgtgattgttgtcattcttctctctttattatttttattgtttttgtcagagttaataattgtatagtgtccctctatatattgttgccccaaaatttttacaggtgttatcgcagtcatctttgctccacgaaattaggggcccaattcgttggaccaggtccagaagtatttatgaattgttttgttttggtcttccagaccacgaatgtgctagcagaagagtggttctcacagttaccaaataaacttctatcatgttggaattgcattcacaattatccttgaatttaaaagtttgtatatgcaattcaaggggacgttccataaagaggtttgtgaatactgatgcactcgttagtcatttcatgtcttcgtcccagcaaaccacatacaagtattgagtaattaataacttatgtcacactcctcttctgtaaaagctttgttgatggtactctgccattattgatcttgctaggagcatgaggctaaagcatatatccttgggaacctgagaagtgagaccaaccggctctcgatccacaacttcttcggtttgttctgctacgagatctcatgcttcttctcaaatttttgtccatacatgtaactatttaaaagattcgagttcaaatattttagaattttggatatggactaaacatgtaactaaaattagatttgaatataaagggattaaaatctttttcgaaaggttgccgtttttgtcatatacgaatactaaaaatagtaaggtccagtcaggggggccaagacttgagagttagaggtaatttctctctaaagtaacatccgagggaccaaactggtataaaccatcaggtgccttagtttgggttcctacaattatcttggattttgtcctttcgatgaatattgcacgcctcgtgttatcgagtccttaaagaaattttcagcaagtacatgcagctcttgcgttgatgcaggtacagtttcttttcttataaggtctcaaacaaactcttcccttttgtttcctgacatatgttgtttctgctatcaggaactacagctgtgcatggagaacttgaggaatgtgttgctaaatttgtgggaaaacctgctgctgttgtttttggcatgggctacttaacaaactcggctatcatttctgtcttgattggcaaggtaatgcatacaccttgtgatatgaacgcttatgttactaccaaaacatatgtttttagtagcttaattacacagccatgtatacagggagggttgataataagtgattctttgaaccatacttcaattatcaatggtgctcgaggttcaggagccactatccgcgttttccaacacaacagtaagcatttctatgcttcactctccatattttcatgacatacatatatatttatgccctcttgttgatggcttctcaacacctgctcatttggaaaagtattgaaagaacatatcattgagggacaaccaaggacacacagaccgtggaagaaaattatcgttgttgttgaaggtatttatagcatggaaggggaaatctgtgatctaccggagattgtttcagtatgcagtgagtataaggtaaggtaacatggtaaaccatctttcaagatcaacattgatgagtgattaaggtactctatcaactgaattatcattttgtttcaggcatatgtttatttggacgaagctcatagcattggagcaattggcaaaacaggacgaggtgtttgtgaactcctaggagttgacactactgaagtggacattatgatgggcactttcacgaaatctctcgggtcttgtggtggctacattgccggatccaaggttagcaatcctatacctttgttctcacttactgatattttgtttgcacatgagttaagtagaaagatgatgcactaaggcccttctgtatctaataatctacacaacagacacaagattgttgaggcaagttcacttcacctcaaaatcaaccaaatgctttatagcatttttgtgtttcgatctctgtaggaccttgtccaatatttgaagcaacattaccctgctcacctttacgcaacatcaatttcaactcctgctgcacaacaagtcatatcggccataaaagtcatctttggagtggacggttcaaacagaggtatctgctctttcagcatttcataatctcaagttatactctcaaacttttctaaaaaaatgggcaggggaactaaagttagcaagaataagggagaacagcaactttttcagggctgagttgcagaagatggggttcaaggtccttggagtttatgattccccaatcatgccaataatgctttacaatccagcaaaaatcgcagccttctcaagggaatgtttgcgagaaaacgtaagtctcttatttgttttccaatatctcacttgcttccgcgcaaaagagattcacctctatgtttcaatgaacattttaaactttgaacagttggcaatcgtggtagtcagtttcccacctatacctctattgctagccagggctcgtatttgcaattccgcatctcacttaagagaagatcttattaaagccctgcaggttgagttcactcgctttctcagcatagtagcaatgatttgaatctactccaaaaggtgcttatagttcatgcacaaatggattcaccgtgttatgacaggttataagcagagcaggtgaccttaccgggatcaaatattttacggcagctccaaagaagcaagaagagaaaaatggcaatacttcaaagttcaaactaagaatatagaattttgtttttctttcaaaaaccaagttagagcacaaattttctatgctccatggttgagtgcaccacttcaaacaaattgacagcattttgttacttatacaaaaaccttacaagtaacacatacgaaactttccctgtttccacatgaaaagtctaatttctttttctcaattgctcttgttactacttattgagatagctgaacacttcacactgtaaataaattgctagactaaacacatacgttttcttccctaggaacttctattgcaaatagctactacacctattcgattgcaaaatccttaacatcatcaagaaaagagagatcaaagagttttaaaaccttcttctctcttcttctactcttcttcatcatcctcttcctttcccacttctacttctactaatactactgttcctaacgcaacattcaaactacaaacatcaagataagaaacaatagagacgagacgaatgaaagatctatagcgttaaaaaaaaggctttcatggtttcagacattgcaagcttacactctgccatggctttcactatcatcaacaaaaaacaacaataacaaaaacaaaaaaaaccattttcttttcttcttaaccgatcaaaattctctcacacacgctcatgagaactccctaccaagcttttgaatagcacaaaacatcttcctcctcgatccaacagcattaatccccatatctttaagatcttccaatgtcaacaatggtaaaacctcttcatcaacctcatgtatctcaaacataggccaatatctccctaaccctaactcttgtagccaaatcttcaccccttcttttcctcctccatccatattcgattcgaattctctgttgccactactattgttactctcataccttcttctaccataaaacccaccaccatctctatccaaagactcttcctttatcggactctcagaatcttctctactaaaatccctaaacccaccttccaattcttcccctccactaattttctcatccccatcaccaactttcgatacccaattggatctaactctcttcgctgctgctgatgacccgacccgtttcttaacccgccaactcccaacaccaaaagaatccacatttccttctctttcatcatctagggttcctatattctcatacccagaactcaaattcgttagggttcgagtcctcgacgatttactcgtatcttttctattaccactcgtcgtcgtcggtgtccatttcgatttcctcccttgtgaatcatacgccgccgccgccgcgtggtgatgatgctgctgctggtactggtctccgccgatttcgcctaatctaacgcttggtcttctcaatcgtttcgatcccgcggctgcaatcgccgtcgcttcggctgaagttgacgcaggaatagtaacaacgccgccgtttgtttgctgaccatccactggttgcaattccgccatttttagaagttttttttatttcagattggaaccgccataggcaagtatggagctagtagagaagatgaaaggtcgaatcttttggcttaggctatttaggtttatctggaggaatcagaagtggatgtgagagaaagaagagagaatcgtcgtcatcaggagaatcgaagaaggaagaagaagagcgatgttcacttactgacacgtgtgtgtttctgcagtcactaacagtatttatacaataattgctcaacaagtccctcaatttccgtcagtttctttttaatgactcagggtaaaatggtcatttgctaatcatcttcatcctcatcagacctgcgattatttttcagaaccctagctttggcagaagattgttcgttgtcatgtacttgaaagaaggatgttcgttgctattgaaagttcaaaaacccttaatcccatttgtcctcaatacaaatctcaatgtgaatcatctcctcacagaatctccaaaccatgcggagatcaaagaattagatgtggtaaagaggctgagacaagagtcatgtgttccattagctttgcatttcttcaaatccattgcaaattctaatcttttcaagcacacgcctttaacattcgaggtaatgattagaaagcttgcaatggatggtcaggttgatagtgttcagtatcttttgcagcaaatgaaacttcaaggttttcattgttctgaagatttgtttatcagtgttattagtgtatataggcaagtgggtttagctgaaagagctgtggagatgttttataggattaaggagtttgggtgtgatccttctgtgaagatatataatcatgttttggatactttacttggtgagaataggattcagatgatttatatggtttatagagatatgaagagagatgggtttgagcctaatgtgtttacgtataatgttcttcttaaggcgttgtgtaagaataataaggtagatggtgcgaagaagctgctcgttgagatgtcgaataaagggtgttgtcctgatgctgtgagttatactacggtgatctcgtcgatgtgtgaggttggtttggttaaggaaggtagagaactcgcggaaagatttgaacctgttgtgagtgtttataatgctttgattaatgggttatgcaaagagcatgattacaaaggggcgtttgaactgatgagagaaatggtggagaaggggatatctcctaatgttatctcgtactctacacttatcaatgtgctttgtaattctggtcagattgagcttgctttctcgtttctgacgcagatgttgaaacgagggtgtcatccaaatatttatacattgagttctcttgtgaagggttgttttctaagaggtacgaccttcgatgctctagacttgtggaaccagatgatcagaggatttgggttacagccgaacgttgtagcgtataatactttggtacaagggttttgttcccatgggaatatagtcaaggctgtgtctgtcttttcacacatggaagaaatcggatgttctccaaacatcagaacctatggctcacttatcaacggttttgccaaaagaggtagcctggatggcgcagtttatatatggaacaagatgctgactagtggatgttgcccaaatgttgtagtctatacgaacatggtggaagctctttgtaggcactccaagtttaaagaagctgaatctcttatagagattatgtccaaagaaaactgtgctccttctgtgccaacgtttaacgcatttatcaaaggtttatgcgatgcagggaggcttgactgggctgagaaagtgttcagacaaatggagcagcaacacagatgccctcccaacattgtaacatacaacgagttactggatgggctcgcaaaggcaaaccgaatagaagaagcttatggtctaacccgagagatcttcatgagaggtgtggagtggagctcatcgacttacaacacgcttttacatggatcatgcaatgcaggtctcccggggatagctctgcagctagtaggaaaaatgatggtcgatggtaaatctccggatgagataactatgaatatgataatattagcatattgcaaacaaggcaaagctgagagggcagcccagatgttggatctagtttcatgtggaagaagaaagtggcggcctgatgtaatctcttacacaaacgtgatttggggtctatgcagatctaattgtagggaggatggagtgattcttcttgagaggatgataagtgcagggatcgtcccaagtattgctacatggagtgtattgattaattgttttattctcgatgacatcgtgagagcccatgatcagtttaccatatagcaaatcagacttgttcaattttgctgtgaatccatttgcttctctgtatgaatagaagaaggatcaactccggtgaatatacagaaattttgtgaacagatggaagcttggcttgtgggtcttcttcactggagccttctagaactcaaagaaaacattttaatccttgcaagaaaaatcagacgactggatttggtacctgacaatacattgctgagatattggtaagcaagagagatactctttagtcatgcttctgttgtagcatccatttaattttaattatatgtttggttacagactgatggttgtagactagaatcgttggacctttttctacaagaatctgctgaagctgctctgataactattcggttcctaacgatgttctctggccaaggttggagtttattatattcatttgtgtattgaagcactagatgatatttggaattaaaggtttggcctctaaaagttctaactgatccaagcttctaacgaacatataggaggggaatttcgagccgctgagagatgaaacatcctgcttcagctacctttctgtttcaaaaagatccttcaggtaatttctaagctcccttttccttgtcttttaggacttctcagatttcactgacagattccatttcgtttcctcttcatgcagctcgtagaaagtagaaacaaagagaggaccaactgctttacactattctgcttaatataattttgtgactagtacaaggtaagacatggactagaggaggcaagaaaagagaacaaagaacataacatttgcttatgtactaaaattagacataatcaatttctagctttgttctctttcagtcctctatgattttacctacatctctggtgaagaaaattccggaaaaatagataacaaaagaattaaacctaacctagagagattacgcatataactgtcaccttgatgatcttcaactcctaacaatggcgcaaaagcagagggacttgtttttgaaggaatgtatcgtcgtcctgttttgtgctttagtgtgtatggtgataaatcaattcctagatatgcagtttcttagtcagctggtgtaatgcaaagctgaccatgtcctggactgtgctccactgggtacatgctcgtgcttctcacaaatttttgatggtcgctcacaggttttctgaggtgtgagaccattggacgcttgtttttgtttctcttctttactatggagcatgaagctaatggatctgcagatcctgctccaactctcctgcacatagaatggtttttattattagagaattgatagattttggcaaagaaagaagatgaaactgtgttattgatgattaccttaagagcttttctgctgcaattcttgcagatctaattgtactgcggcttggcacccatttcacgacacggtttggatcagctctcatgggagagtgtattttaatgagctaaaaaagagagaaccaagttaaaaccaaaaaccttgaagagatctctgaatctctataataagccaatgcaaatctattaaacacatcaagtggttattgccatctaacaactagtattggataactggataataaagaatgatgggaaaccagagacttacacccaagcattccatcatctggtagtaagctcttccatgcaaaggagtatgtccttgtcgggattctgaaaaatatcttgtcctgaaagaatattacaagagattaaacgtaaaccatggttgataaacagaaataaacatggttagtaagtagacagcaagacaaaataaatataggtagactttataccactctttatagcctggatccactgtgaatccatacatatccactgaatcacacgtcgagagagcaaactcaagagccttgagcccagttcctttggctgctgagccaaatgaagcaccgagcattaagtacacaggattttttattgggacttcctgcatagaaagaaaaatcctcaaataagtttcaaagaccagggggagtgtacagatattcaaaaccaaaacagctaagagagaattaagtgcaataaacaaacccgaatcatcttgttcataatatcatgtattgttgttttgacgagcaggacctcttgctttttttctgcataatttcaaaggatcagagagattggattatctatttgcaagcataaaaaatgtgacacacacaaatgaatatatatatatatatatatatatagagagagagagagagagagagagagagagagagagagagagagagagagagagagagagagagagagagagagagagagaaacagtggtgatgataaccatgaaggagtgaaaacaagagaacagttatatagtaccatccaactccacgactttgtcaagggcttttgctgaccctctattaagaagacggaatgtacttttctctcccacatattccttgtagttctgcaagaagaaattccaaaaaacaaaaacaaaagtgaagatacgtgagtctacagcgggaacaaaagaactggaagttatataaaagaagtcattattaacctgaataggagcaccattttctcttagaaccgtatcataagtatctatctcctttccgaactttgtttttaagagatcaccagagttaccaataacagcacatcgcccaaactgccgggggaaatatggtggtgtttcaggaagcaccaatgaaagcttctcaatgcataaagatttattctggcaacgattactgcaccagaatgcgagtctcattaaggccagaaaaggaagaagacaacacagcattttacactacttggtatattgcgactgagaacaatcaactaagcaagtgttgagctgttgtctgtaaaaaacaataataataacaaccaatgatcatgcacttcatccttggtctaatgtgagtcaatacttacagttgaattcctttattgattctgcgccatgcataatcctcccatccatttggtaaggcatcaatgtattccttggtgagtattgtagagctattcctgacctagtcaaccaactcgccaattaacccatcactataaagactaaaacaaattatatgaaatcaaactttacacactttaagaactgcaaatacccacttgttcccatgtagctactgcttcacacaggtcaaactcatatgacaatccttcaagctctccagacttgggatctttctgttgttgtacataatccaagacataataataaggtagaccatatttgctagacactaagacaaggattatgacaagcttaactatgataaacaaatagtcagaagagagaatttacccatttggggacagtatccttagggaagtttatagaaactttgcaataatctctacccatagcagcttgtagtcccaaaccatttgcactctgcatcattagatcagttctaatcagctaagctccagattcagaggtacgatctataactccaaacggatcaagagggtataacacaagataaggaagctaacacagatttacttactacgcacttctggaatccgttctgcaaagactgcaacgcctctaaatcttcattggtaaaacgattagactcgtctaaatccacggaatcatcttctttatcattaatcatcttcatacttcagaaaaaatcacgaaatacaacactacaagcatgggacaatgatggagattacttacagagattagagacgccgataatgtagattagaacagcagagattccagtagtcaaagctaataagaatatcagatgcaagagcttcatcgattccccagtagaagcttcagcttcgtgatttccaggagaagacgatgtgaaattctcgatctttcaattcaaaagtatccaagttccgatctaagcgagtgagtatgaaaacagcatgtagttctcattctgaagcttaagacggcttacagttctttcactttataaaacgctgcgtagataacttaagacaagccagcgaacgccgaaatgttctagtgagtaacatgaaacggcatcgatttgacggaacggtatttcaaatgagaactggccacgtggctataaaccccttcattgttcatcttcaaaaaccctaacatttctgaaaaaatctctgcttcttcaaattccatcaaaagcagcttgataaagcttaaaagcccatgatgaaatggtgaaactttttgatttcaatggcggttttaagtgtgggtttcttcgcttgcagatcccattttcctgttcttcccctgttttactgtttctcgaaggtaacaactacgacagtataattctatgtaattcgttctcatatacttaaaattcttcttcttttttcttaaatttgttgtttagcttacaggttcagctcaacactgttgctgctgcaatggagactgtggatgacaaagacagtgatcatcatcatgacaagggttctaataagacgagtaagttactttaaacgaatttgatggatttaattgaaaactgtgcttctttttattcctatttatctttttaagtgattgcaactcatcaactagtttcaatttttgtcttttatctgttggcttaatttgatgttttagtaattttgggtaatttgtattgaaaggtaaagcaccagagtggaagaaattgaattcaaaagaccttgggataaccacttctatgatttcaaagcctacacgaatagtgctaaatggccttaagagtaaaggttgattctttttttaatcatttgattgaatctaacgatgaaattttatctcttgctggtttttgatagttgctttcttttttccgtgacctgtaggatatgatgtttaccttgtgggaggctgtgtacgcgatcttattttgaagcggacgccaaaagacttcgatatactcacttctgcggaacttagagaggttgctttccaatctaacaaagtcatctcttgaacattgtcttatgctgatttcaaaatggattttttgttgttgttggaatgtgtttaggttgttcggagtttctcaagatgtgaaataattggaaaaaaatttcctatatgtcatgtgcacattgggaatgatatgatagaggtttggctttttcttgtcgaggattttctttcatattaccaatataagcatagcaaatgcaaataagaacagtttcttagctttctcttataattcatttatatactttttgagtaggtttcgagttttagcacctctgctcaaaattctctaagaaacacaagaacgggttctggaaaatctaatggttcctatgacgaggacagtatccgtttcaataactgcttgcagcgtgatttcacaattaatgggtatcttattaatcccttgatgatatcctacactcctaagtattatggagatcccatagttttgttacttttcttcacatgtttatgttgtgttttcaatctcaggttgatgtttgatccatatgccaaagttatatatgactatcttgggggaatagaagacattaaaaaagctaaggtgtgaacatattctgttatacctttttcccccggtaaattattttcaaatatcgtttttctcattgtggttctttgctcacaggtacggacagtgtttcatgctggcacatcatttcaagaggacagtggtgagttttctggaaaaataatcatcttatgtaacatttcctccatggattcttttccaaaatcctgtagagtctagaaaaacaaattcttgtatgattaccattaagagtctagataatagaagcttatcagtgctttaccgattataacatatccagccaggattcttcgtggaacaagaattgctgcgcgtttaggttttacaatttccaaggaaacagctcatttcttaaagaacctttccttcctagtacaaagactccacagggtactactactgcttcacttcacaaagaaatattttctccacattatttttacaacagtgtgttcatgaatgattctgtattatacatgtagggaagaatcttgttggaaatgaattacatgttagcgtatggatcagcagaagcttctttacgattgttgtggaaatttgggatactagaaattcttttaccaattcaggtgagtgtttccactcatctattgttatgtcttaaatgtatctttgcgtctatctaacttcaatattcacaggcagcatatctcgttcgcactggtttcaagagacgcgacaaaaggagtaacttgcttctggtaatatgcagatgcgcattctgcaatattcgtcacagagaagtttctattgcttaaattattgagtacagaacttatagttaacatttcgtaatgcagtctctcttcggaaatttggataaattgttggctcctgataaaccttgccacagcagcttatggtacggtcctcatcttctataagttcctgaaaacacaatccttatcatatacagtggataaaattgtaagacgcaacactattgtattggaaatttgtaggctaacaatcttggctcttcacaaagcacttgctgatcaacctcgatatccttcagtggtagccgcgtttagccttgctgtccacaatggtggagatgttttagaagctgtaaaaaataccaggaaagtcacaaagccacataatagaagcttctttgagctactggagccagaggaaatggactcccaaaccttgttggatgaagtcatggattttgattcatctatcaaagaagccttgggacagatgactgatgggaggtttatttccaaggctatggcagcgtaccctcaggccccatattccgatatggtaaccgctcctatttttcttagcttcatataacaaagtttcagtgacacaaatgcaaatgcagattctcgggagtacgcctagactataggtggttatggagcttgatatatgttttgactgaagattagaaacaatatttcctcggtttagctgttgtcctaactctcttatatcctttgctgttttacaggttttcataccgttgcaattgtacctagatgcaagacgaatattcgagtgtgtgaaagaaaatgggcagaagggatttgtgcctaagcaagacagtaaaattgattatacctcattatcttcaggcaaccttccagaagttagacacgtatttgctagggttgttttcgacacagtgtttccgttaaacccacctcaagagttgtagtccctcttggattggttgggcttaaactgagatacggtagaaagcagaaatgatatttgccatacctttcttatgtaaaaacataatagctaggcgtcgtgaacaccatttttgtactcttacaagatagaaataaaataagaaaagttgggagtttttttcccttttatttctttaatgtgatggcattgtgaggaatgtccttgtacttttatgcacttacagatggagcaagcgcagtagctggagaagcaccaccagtggctggccttaagaaaatgagaaaattataggtaattgatggatgtcttgcatatgttggttctacaatggttcgagtattgattagactatctttaagtgcaggtgatgaaaactttaaagttacaatccagctaaaactttgacagcatcatagataacccacttcgctgcagttagtgttcctatcatgaaaatgcgaagaggaaggtcccgggtaaacatgtctctaacattttcttgactgagagtatatgtcttccctgctgtcagaaacgttatgttggatctgatttcctggttctgtttggcattcagctttagatttgagtttggtgatattcaggaaatgctctggttactatgccgatgctcaaactcatcagctgttaaaaaatattcatagtccatttgccaaggacaagtcctcaagcactaaagagcatacagttatttgccctatttggcaaggagatcctgctattccgtttattgctctgccttgccagcacaggtttgattacctctctctctcccccagatatgtagtaaaagtaattctactagaagctaagtaactgcacatgattgcttaaattgagtatatgaagttagacaagagagcagtgatgtcattggcaatggatgaagaattcagagtatatgatatagttgttacctgcgcttttaagaatgatttgtggcatgtattaaaaataaaaacatcgctttcttgttgatcaggtaatctggaatgatgtaatattgatattttgggttatttaaaaagtcaacagaaaaataaaattgggccgaagcttattaggccctaaaggcccacgaagaagagcgaaaccccttaacgtgtgaaaacccaaaatctcgctctcttcgtctcatcatatttctcttttttgcggctctcaacgtaaagaactcttcccggcaaataaaccgttcgctgttttcatcttctctatggccagttccgacaaagttaatttattgggtttgttttgggtggctctctctcttatctactgttttgtaaatagacatgtcttggctactctagctgaagagtttttttttttgttgttgctgctctgctttaaggtaagcgagagccagaagatgatttggagaccaaaccgattctgaagaaacataaggaaaattccgaggaggagaacaaggtaaccacttgattcttcttctttgggaacaagtttctttacacactttgttatagtagtggctactcatgtaacaggagcagatcaaaggaacggtcgagttgttggagacaaaatctgatcaggctccagtgaaggtatgatttttttaaaaatctaaaaatattgtacaagtttatgttcagttgttcttattgtctccaaactggctactcatgtaacaggagacagtggaaggacttgatgaaactcccgattctgttgaggtacctaagaagtatatgtctggtcttttgattcgttgctttccctcaagaaaaaagacgctctatgtttgctgtctccctcgcgacactaaaatgccagatatgtaagtagcacctttagtttcctctttcgttcttgtagcaaggttttcatgactcctccattttttacagcatcgatttcttcaaagatgttggacaagttgttagtgttcaacttactacaaaacgcaacggtttgcgtttgtccactggcttcgttgagtttgcttctgctaacgaagcaaagaaggtgagactagtttatagtttaatgatgaaatgtattttactagtcatttgaaaagtaccctatgcttatgatgcaaattgttattcgaaaatacctttgctaatcaaatcttttaattatactgtaggcgctggatatgaagaatggtgaatatttgtgtggtaataagcttattcttggcatggctagctgcgaaaatattgcacaacccaagtaaattaattttccctgttatagtgattttgtttctggcatggttgctaggttttttttatgccattacagattactaatgctattactttttgttaattaggtattgcatatatcacaaggtttggtaagggattcaactatttgcctcttgagtttgttaccatgagcacattaggtgaagtttttggtatagcaggtacgaagactacattcaacaagaaagccttccgattgaagaagaggagacacctcccaaaattgttcaggtacctttgttcttattatcttcgaaatctgtcaggctcagaagaaacgcttattctgtctcggggatgagtctacttttttgttgttatgcatatttaagcccttttctccttaagagtggcgctaacacacttggctgttccattcaggcagctgctgtaagaaaaaatacgctctttgttgccaatctctctccccaaactaaaatattacatatgtaagtagcacctttaatttttgctttcgttctcggaggaagttttccatgactgatattttatccttccacttttacagactcgatttcttcaatgatgttggagaagttgttagtgttcgacttattgtaagccccgagagtaagcatgtgggctatggctttgttgagtttgcttctccttgcttagcaaacatggtgagactagttttgtagtaatgatttaaaaattatcaaagtcatttgaaaattagtgtatacttatgatgaaaaacattcagcagttattcgaaagtaggataactgattaaatctcacacactgtaggcgctggaaaagaagaatggtgaatatttgcacgatcataagatttttcttggtgtggctaagacagctccgtaccctccacgaatcaagtaaattgattttccattttatggagatttaatttgtttcagtaacactagttgtaacttattgctagagttgtgatgccattaccgaagactaacgctattatttttgttaagtaggtacaaccttgcagagaagctttggtaagttcttttgcctttgagttttgttatcaagagcacattgggtgaaggttttggtatacatggagagatcacaagggtttttgatattccaggtacgaagactatcttctacgagatagccttctgatagaagaagatgagacagtggaaggacttgatgaaactcctagttgtgttgaggtacttgttcttattatcttcaaaatatttcattacccttaaaaaaaatgactttattctgaggatgaatctttagatgaggctacttcttgttatgcaattcaagtccttttctccttagactcgtgctaacacacttgactgttgaattcaggcagttgccttaagagaaaaggtgctcattattgcgcatgtccctcgccgaacaaaaatatcacatatgtaagtagcacctttaatctcctctttcgttcttggagcaaggctgatattttaccctccatttttacagcatcgatttcttcaaagatgctggacaagttgttaatgtccgacttattgtagaccaaaagggcaagccttttggccgtggctttgttgagtttacttctgctgacgaagcaaagaaggtcagattagtttatagtaatgatgaaaagtattttactagtcattagaaatttagtgtatacttatgaagaggaaataattactagaatatgtttatttttataatagaacacatcttttttttattattcgtatgttttcggtacttgtgtaattacacttaagacccttgattagttttaattaaatattattattaaattcgtttttaattaaaaaataaataaaaaaacagtgattatccatgtcatcagtccatgtcatttaccctaatccacgtcatccgaaaccaaaaattcctttaaaactttcagtttctcattttttcagcacatcttactattcatccgcgcaaaaaaaaaaaaaaaaaaaaaaatgtcgctctcttctctcgttcagtcgacggaaccctaatttcatcgccgttctctacttatctcgtctctttcggccgaaactctttcggtggtgtcgaatttcaagtcatcaaaaatcaaaacccaaatcaaagagatctgtggaattttatatgatttgttacaggttttagttgaatcaagaataactactcttttactttgatttaatatgtctatcgtttagttttcctctcaatcgatctatttagagatatttctacttctatcaatgttttgattcatatggtttcgtcttcctcctatgtatccctcaaacagattattacgttttttaatttgattgttgttatttggccaataaatttcatattgtcttccccagaaaaatgttgctttccgatctgtattataaatcagccgtaaagtgatgtaactcagccgtaacgtgatgtaactcagccgtaacatataatttatacaacctttcgtcttccctaaatgataactcagccgtgacatgtaatttaccgaacctttcgtcttccctgaagcatataactcagccgtaacatataatttacactcatctttcgtttgcccttgaacatataactcagccgtgacatgtaaatttatagatgtcttcccttaaacatataactcagtcgtaatgtaattttaccgaacctttcgtcttccctggaacatataactcagccgcgacatgtaaattgactgaacgtttcgttcttccttaagcatataactcaaccgtaatgtaattttatcgaacctttcgtctttcctggaacgtataactcagtcgtgacaagtaaattgactaaacctttcgtcttcccttaagcatataactcagccgtgacatgtaaatttgtcgtgaaacaataagagatacaacatttcgtctaactttatcatcgagcaccaacttcacaaatttgtcgtgcgttgttttcgcatctatctgcacaagtttacaccctctttcatcagtgttaaatatgtatttgtgtttctatacccaattcctggaaacaacaattaccaaaactagatcaaccatatcgggagaaagatgaaagaaattgaagaaaaatgaggaaaatgatgaggaattagaagttccggtgatgtgaaaaattcaagtgaagaagacgagttgaaaaaattttaccctatttttttatcctttgatgatgctgacatggaatgatgacatgaaatattacagccgacgtcgttttgaattgatgaggtagcaactaagccaccaaacgaacatttgataactcagccatcaagcaaatctataagtcagtcgcaacatgaatactattacagtaattaaaaaaggaaaaaaaaataaagttaagtcagccgtgtaatgtcgtaactcaactaactcaaccgtaacgttcaacaactcggccataactgcatgatattatagtaattaatcttttaaaaataagtcagccataacatggctgagttatatcgtaatccagctattggcggctgatttatatcactcgactataactcagccgtcacatctttccataactaagctaatcaaaactataactcggccgcgtcgaggaaataagtcagcctttttctcataactcagccatattgttggctgggttatcgtataacttcttataactcggccgaacatccttaactcaagcatactgttgcctgagttatagtataactcaggcaacatttttcaactcagccgtaacgtctggctgagttatactcatacttcgccgttttgttatgactcatatatttttgacgtaagtcagccgcaacataccgtaactcagccggctgagttcatttaatccacgtcagcaagttctgacgtggcagtggcattccctgtaattatgtttttttcggtaacgtttagtaggggcacgctgggtaataaaaaaactcgaaaatataacagtaattaaaaaaagttctgtcgtgttctggtaataacacctaatttcttacccacagttaatctccctacgaagaaaatgataaaagtagttattttgaaagttgattgctgactaaatctttaatactgtaggcgctggaaatgaagaacggcaaatatttactcgatcgcgagatttatcttaagactgctccataccgtccacgacccaagtaaattgattttccttgttatggagatttgtttctgtaacattgatttgtttctctttaatcttctttttcttctgtttgttctccaaatcatcagcttctatcaaaaggctttcttctcgaaggtagtcttcgtacctggaataacaaaaacccttgtcatctcttcatgtttaccaaaaatttcacccaatgtgctcttgataacaaaactcaaaaggcaatatagttaaatcccttaccaaagcttctctgcaaggttgtacctaattaacaagaaacaatagcattaaacttgtacaatgacatcaaaactctaataagcagttagagaaacaaatctcaataacatggaaaatcaatttacttgggtcggagagggtatggagctatctcagccacgtcaagaacaacataacgattccgcaatcttcttaggttcttcttttccagcggcgcctaatagtataaaagatttgattagcaatcgtgctttcaaataactacttgtaaatttgacatcatataagtatacaaaacttttcaaatggctacttatatacttttcatcattaaactagtctcaccttctttgctttgtaagcagaagcaaactcaacaaagccacagcccacatgcttacccctgtggtctacaataagtcgaacactaacaacttctccaacatctctgaagaaattgatgctgtagaaaatggaggataaaatatcagccatgaaaaacttgctacaggaacgaaagaggaaagtataggggctagttacatatgtggcatttcacttttcaaagggagattggcaataaagagcgtcttttttcttacagcaacttcctgaatttaacagccaactgtgttagcacgactctaaggaggacgagaagagaatttaaattaacaataagttgattcatccccatgaaaagtcatcttcgggatttgtggcaacagttctgttctttaaacgctaagcatttcttttggagcctagcatgttttgaagagaattaaaaaataaggtacctcaagataatcggaatcgggagtctcatcaagtccttccactgtctcatcttcttctatcagacggttttcttgtcgaaggtagtcttcgtacctagaataacaaaaaccctttacctaacgttttgtgaaatgtgctcttaaaagcaaacttatgaggcaaatagttaaatcccttaccaaaccttgtgatctatgcaatacctaattaacaaagataaccgtgttagtcttcttgcaaagaagctttggtaagggatttaactatttgcctcataagtttgttatcaagaggcacactgggtgaagtttttggtatacatggagagatcagaagggtttttgtgttattccaggtacgaagactaccttggacaagacagccttctgatagaaaaagatgatttggagacctaaccgaataagaaatgaagctctatggtgtttataagacggaaatcttcagggtatcttgcggtaagaagattaccttctctgacgacagttgatggaagaagatgaagcttttttgtgtttttaacttgtgatacaatgcaacttttttttgttacttcggttttcggaatatgtttaataaattggtagaagcctagcgcctagaacaatggatcagggcatgggcatatgtaaattatttacctttttatatcattttcataactttataagaaaatatgtattgcaaatgatggaatgctaaaaaagttacacaaatctttcaagtaagcccatctcaagagttgttgtccctcttagattggttctatacttgtattgcaaatgatattttaaatgacttccatattagctagatgtatgtagtgaacaccatttttgttctatactagacaacagaaacaaaataattaagaaaaataactggtagttctgtttcccttttattgctctaacgtgacggctacgcgaggaatattcttgtaattttatgcacttacagatggagcaagcgcagtagctggagaagcaccaccagtggttggcctaataaaatgataaaattatagttaactgatggagtgtctttcataattagttcttaaatgaattgagtattgatgatgaaaacttacaatccagctaaaactttgacagcatcatagataacccactgcgctccagtgagtgttcctatcatgaaaatgcgaagaggaaggccacgggttaacataccccataaccctagcctctttactgcctgtagcacatgaaagaatcaaaccaagtcagtagatcatataaaaagctctgtgttgtgtatccacaagtttgatgttgtggtgaagagtatggagcttttttacttacatcagcaacggttgctcctttagagttattgaggaaagacaccaaattatctgcaggatgtgagatgatggcgcagaatattccagcaatgtatccacctgcaaagctaactccgagctgaactggctttgagcactcttcttttggggtaggcatcactttcttgtatatgagctccacagtgttttcaaaagtagcaaatttcatcatcgtatctgcaaagaagtcgaattttcttttagtaactgaaatcatcatctcaatgactctactacattttcttgtgtatagagacttacatggaatctggcgtccccagagaggaacaagtcctttgtgtaacccgcggaagccttcggatttgatgatctttggtaaaccatcagataaaccgcgggcgaaaccaggctgagtctggaccctgactttgacagcttccattggacaaagagccacatcagcgacgatttctgcagaggctgagccagcgaggtaaatcaaggtcttgtatttagctgcgtattctggtccaacaatgtctgagtagtatttcttggcgtactcatagagaccgtatttaaaagctccttgggcactgtaaccaagaagcgttggtgaccagcctctggtgaaacccttaagcccttgctctttgattgttgtcttgaaagctgaagttatgttcttgtacttcagtggatcaatctgaaataacaacagaattaagggtcttttttggaaattcgtggaatattctctctgagtgaacatcaaaatcatgcatgagattgaaaagtcttcgacggcgttgaagagtcgatgccgtgtaaaacaagaaaacgtaaaagttgacaaaaacaaaaattgttattcgctgtttttttttccgctaataatttctatattcaagtttttctcactaaatattttacttatcacacacgtattaaaaatgttaactacaaatagagaagttggcttggaactttcacctgcatgttgcatttgatgacatcaagtggcgtaatcgccgtgtgggtgataccgcagctcagcatcccggcgaccgtacacgccgcgaaatacgccggcgagtacatttccactttttcattcggcgtcgcgatggcgaaactggtaccgttggatgagactgaagaattagtcggagaaatcaacggctgtgatttaaggtgagtactcatggtcgtcgcctgaaaaagacgatgatcggacgagtagagaaagctcgggatcagcgatctgcttgagtcagacatttcgagagaggagatgagaaattcaaattcttctgttggtttttcgacttttctcttcgagagaaaaaaatgtcaggttgagttttgctggaatctaatttgacgtttttataggtgctgagtttttggttatgaaatgtcatttttaccccctcactatttgcatattttaccattgactgacgacggcgatagaaacagtcaaatactgatttgtcacgactctttacttgtcaacagaccgaataaatcactgaaaagaaacatatatttctaataatactaacactgtatatagtaaagatatactgatctttgattgttggttagaataatcaaaattagtaaaccgtttctaccatgcgtaaatggtatttgtatgtaacaagttatctctccatacgtgaacttgtttaccattacccaaatttcgaaccttgagtgagcactttgttaattacctttgagaaaacttagccaagcatggctagaacttcatttgttgccactgccagctccaagaagattagacttggagtaacagtttcctttgtggattcttgtcaagaggtttgaggattttgaatcccataattagttctccaacattgttgggctagttatatatattatagtctttgataccaaaccatgtgcttttgaataattgaatttgtaaaattttcttccaaaataaaactaaacttggtcgaaaaaataacctggacaaaccacgaatcaggggggattttaatttactcatgtgatttgattaatatgtgtatataaattttctcttagaagagaaacaaatctctttataaactgtattaaaatatcacagataatatgattcagaacagatacaacataaacagttgtatatttttgtttttaaatggtacgcagattaagtgaaaatgattaaagattttgttaactataatcttatcattaatcacttacctttgaaagctcgcatgtgtttctcttctccgtgttaaacgctgtcgtttttggcgtcactgttatttcaacacttttctccaatctcaccgaacgtttattttcccttccgttttctcgagaaaatctacctttttccccgagaaatttcattttctctggttcacctgcttgttgctcgcttaaatacagcgatttcatccaaccaacaagtaccttcaccaacacactgatggatcggaggagggcgggtagcccagtgtatggtcgccagtggagcgaatcatcgaacagtacggaggcaacatcaccggcgatgtctcctgctcaccggaaacagctcggtggtatcggaggtttctccaccgttaaacggactcagaacgtagctgccaaagccgcggcacagcgattagctaaggtcatggccttacagaacaaagacaacggagacgaagatgatgaagatgaagatgaagatctaagtctcagattcgcatctgcttctttaaaacctgctcgtcatgcaccttcttctatctcctccaccggaagcaatagcagcaacggaaataataatttgccggctgtttcatttgctccccgaactagatcgccgtctcctgcggtgaattccgtttttctagctgattgaattagctcagattagcttgatttgattgtagttgtggtgaatttgattctttagggctaattagtctctctctttttttgtgctttgattagttaggcaggaacttcgccgagcaagtaccttcttcagtgcggtctgcttcagccggaaggccgtcaatgtctgctagatctacgactccgactccgattcctaatctaatgccgcctagtagggtgtcggtgaaaactccggtttctattcctccacttgatcctccaactcggagcagagataaaaggtgataacattttgaagttcttaaaaattgtgcttcttattatagttctcaaatcttggtagtcaagggaacgtgtgacttagtggaatatgtcaaaaccagtttggttgctctttggagttggtgtataatatgatttttcgttgactaaatatttatcctcaaagcctaataatagaggttgctataaaggttcatgagaaatgggatccttgctccaagaattagagatccctgctggtttttggttgtgcgtcttgcgtttgatttcggatatttgatgtttttaggttctttgctgatgtaccatcagtaaattcaaaagaaaagggtgatcagcgggaagcttcagctcttcgtgatgaagtatgtgattgtttcttttgaaccttttgcggtatctcgtcaatttagttattgtaaattttagtcaaattagaatttgtgtatgagtcataagagttgacttggggctgattcatttttatatgcagctggatatgctacaagaggagaatgagaatgtactggagaaggtttgatctctgcgattgaattttatattatgtaataaagctgtttacttctgttgttcataaaatttattcttgattacagcttcgtcgtgcggaagaaaaaagggtggaagcagaagctagggctaaggagctcgagaaacaggtttttgaactggttgtcttgagtagtccatttttcacttatgttgcgtcttgaaattctgactgaaaaaaatactccacttgtttaaatctctttgtatatcttgttgttatctttttgaaacagcatcccacctcgttgtttaaatttactttaaatcatatatttctaatgtattggcatctgttcaaggtttcatttgtttttatttttggttccaaaaggttgcctctcttggagaaggagtttccttggaggcgaaattgttaagcaggtgggagcctgtgccttctttagcttctcttttcttgctctctttttcagaaaccaaggtggtagtttttaatcgctcatgttgaatatgtctttgtataggaaagaagcagcattgcgtcaaagagaggttaataccctcaatctattttgctgctcagatgtagtcttcttttaatcgagtcattatgtaaaacatacaatttaagctgtgcagaaaatttgtacctgttacaggctgctctaaatgttgctaaacaaaaaaagagtggaaaggatgaggaaattgtttccctacgttcggagcttgaggtaaggttcactgatgtactgttttctatgagatgtaccacttttatttgcattatgaaaccatgtcttatttttctctgctatgttcagaacttgaaagatgaggctacaactgctgcagaacggcttcaagaagcagagtctgaagcgaagtctcttcgcacaatgactcagaggatgattttaacacaggatgaaatggtttgtcaaaaaatcttgggtctcgtaatgtaccaataattgataaggttctgaggttctgactttatgaatgattgaattatctaggaagaagtagttctgaagagatgctggcttgctcggtattggggcttggctgtgcaacatggtaggtgattcatccattcttaagaaaaagagtttatattctgaaccagagaaaatattatcataatattctttgtatcttccgtcaacatggcatatacttgtggtagtaataaatcaaatttacagatatttgcttttcctatggtgtgcttctgtaggcatttgtgcggatatagcaccatccaggcaagagcactggtcaaagttggctcctcttccatttgagctcgtcacttcagcagcacagaaggcgaaggagttatcttgggataaaggctcgtctattgtctgctatagtttaaaaaaattctttgcttgctgttgttgtaaatttttttacttatcaacatatgaaataatgcaggtgggaatgatcggagtaaggcggctagagatttgagtgatctaactggagaaggaaatattgaaagtatgctttcagttgagatgggtttgagagagctagcatcattaaaggtatccataattctttctgagttacctacaagtgttgtcacctagcagatatctccaaggactacgttttcaaatcttcttctctcttttgaatatcaggtggaggatgctgttgtgcttatattcgcccagcagagaaagttgagtttggttcgccacactgtttccggtatgtaatgtatttgcgagctataacaccacaatgacaaatatatgcttctttcgcttctattcttaaaagtttaaacgatggatgagtaatctgttttctgtttagatacttaacgcttataagctcttaataagaaggcataactaaaagcaatttaacttttgttttctctgtatcttacagactccaaaggtcatggagaatccagatttatcgatgcatatggtaacggaaaagtctcactaactcttttctctttgttttccacccttatgtagaggttcttggggtcgaaccctcaacaccttgaatgttgtggaagggtttcactagtatagccacatctttaacccaaaaaaagagtctagccacatcctctcggtctttgacatagtgcatgcgttgttgatttagtaggagtaaattgcatctatgtcccctaccttgaaggattttctgtggtttcaaattttacctttactcaacgcataaaatcatcttctgtagacgtaatcaaccatatcgtgaaatcttatacaatgttctcttgttgttataaatgcagaactgggtgaagcggaacaagaagatgttgcctttaagcaggtactttaacacttacactcatcatgatatacaccttccagctaaaagcctaaatcatccatcgagtgacttgattttgagacgaccacacattatcaatgttgtatatcatcacatagaaagaaaatatccgacaaaaagtaaccacaccgaaacatcttttgaaacgtgtctagatctatgtgctggatgacgaaacttatgaatccaaacactgtagaaccgttacttatcagtttaaatcaagatatcgtcttgattcctacaattacataatgcaggcatggctgatgtacttctggggaagagctaagttgcacggtgtggaagatgacatcgcagaggaacgtgtccagttatggatcagccgtagcagtgggaaatctcagacgacttctcatgatgccttggatggtaaaaccggacttaagccatttcgttataatatctgattcttttgctttaaagctttagcgaggagtagatttataatgatgataaaactaaagtttcccattttgcttgtcttcagtggaaagagggttgatagagctacgaaaactgggaatagagcaacagttgtgggaagcttctcgacgagaaatcgatcagcttccctcgcctacttcttcgaatcacgatctcgatgctgattcatagtaaagtctcttccttttctttgatagaagaaattttcgttttgtatatctctcgtcatgtaagtttcacgaagaatctgttgtgtcattgtattttttatgttttcccttttcacacttaagtgtgtaagcttttggtattcttatttttgcaatcaattccaaaaagttttggaggacgatactgggtaaaaaataggatatcgaaaacactgatcacgaaaaattcatgttacccttactgtttttataaaccatgttttgaggatgggatagaagaattgaacctcgttaatctgtgattagattctcaattttgacacttatatgactcgatgaaattctaaccaaatcctgctttctttttttttgtgggaaattctctgtggttcccgaacagtcattatccagaaacaaagagattagagtacaaaatacgaatcataagagactcaatagtcaattcaataacacttaaaagaaaatcactagaaaaccccttgtttccttctacaatattggaataggatcttccatggcttcttcagcagcaaaaccaccaacacgtccagtggtaccactcaacacaaccacacttccttcggcatcaacatcaacaatcacagaatctccttctttaatgtcccttgaaagcatcttctccgccatactatcctccaaaagcctcattattgcacgtctaagtggcctcgcaccataactcgggtcgaatccttcatccaccactctctctttaaacctctcagtcacctgaagctcaatctctttgacctcaagtctcgccaccacttctttaagcattatatcagcaatctccttgacttccagctttgttaactgtctgaaaacaatcatctcatctaacctgttcaagaactctggtctgaaatactgttttagttcctcagtcactaagctcttgattctgttgtaactgctgtctttctcgtcgtggtcaagatcaaacccaattcttctaccacctttttcgatcacgctgctccctacgtttgaagtcatgatcagaagcgtgttcttgaaatcgacagttcttcctttgctatcagttagtctaccgtcttctaggatctgaagcatcatgttgaaaacatcgggatgtgctttctcaatttcgtcaaagagaacaagagtgtagggcctgcgtcgaaccgcctctgttaactgacctccttctgtgtatcctacgtaaccaggaggtgaaccgatgagtttcgaaacagtgtgtcgttccatgaactcactcatgtcaagacggatcattgcttcttctgaaccgaagtagtaagcagccaaggccttagcaagctctgatttcccaacaccagttggaccagagaagatgaaactggcgataggacggtttgggtttttgagcccaacacgggcacggcggatagcccgactgattgctttaacggcttcatcttggccaatgactcttgtgtgaagggtctgctccatttggagaagacggctagattcatcagacgagactttctctaccgggattcctgtccaggtggcgacgatgtgttggatgtcagattctgtgacagtaggtcctccttcctcagcttcattctcggctttggccacttctttgcctcgagataaaacattagctatctcagccttgagctctatttcacggtcacgatgagaaccagcctgtcgaaagaagaactcaggaaatgtaaatattagtcttggatgtatagagagtaagaaatacttgaaatcgataccatctcgaagtcttggcttcgcacagcttcattcttctctttggtgatttgcctgagttgcttttcaagctctctagcttcctcaggaagctaagcaaacgaaactttctctgaatcagctcaagtagatataaacacacatagttctttggtagttgagatacatgcaaatattaaacctgagcatggcgtagtcgaacccgagacccagcttcatcaatcaagtcaatcgctttgtcgggaagaaaccgatcactgctcattcaagagaagaagctgggttgagataatgctgcaatttgtgtaaagacaatgttctgtgttggtgaaagactgaaattgaataaaataaaaacctgatgtactgatgtgacaattgtgcagcagcaaccaaggcttcatcagtgtatcgaagtttgtggtggatctcatagcgctcacgcagaccttgcaaaatctgtatagcttcttctacagttggttcaggtactttcacaggctggaaccgtctctccaatgcaggatctttctcaatgtgtttcctgtactcatcaattgttgttgcaccaatacactacaaccgtaaaaaaagaaaaaaaaaacatttcgtaaatcttgagtttacggttctaattgacatttcgacagcattagactgataaaaagaattgagaaaatttacctgcaattcacctcttgctagagctggctttaagatgttagcagcatcgatcgcaccttcagcggctcctgcaccgatgagcgtgtgcacttcatcaataaacagaattatctcatcactttgcctgatttcctccataagcttcttcaatctttcctcgaactctccacggtatttcgttccagccactagaagacccatatcaagggttataacctgacaaaaaaagtaaaagtaaatatttatacatatttatgcactctaactaagcctattaagttcattaaaaatgatccaacgggagaatatttaccgtcttcccctcgattgtttcaggaacatcaccactagctattcgctgtgcaagtccttctgctattgccgtcttaccaactccaggttctccaataagacatgggttgttcttggttcttcgagccaagatctggaccattcgttcgatctgtggctgccttccaacaaccggatccagtttaccctgccatagaaagagaaaaaccaaattttagtagaaaccttcaagcattaacatgacactctcttcaaaatgagtacacatttttagtacctcctctgctagtttagttaagttagtcccatactcttcaagtgttggcattttgctgtttccgctgcttcccccaccaacgcttgctgtgacttcattgttttccccgaccatacgtataacctaaaaatgatatatgtatctcaaaatgttataacgaaatggtttactaagacataacattaaccttagaatccagagttggtgcatttacctgtgtccgtatattactaggatctgcacccaaattctccaagacacgagctgccacaccctccccttcacgaagtagaccaagcaaaaggtgctctgaaccaatgtagttatgccctagatttcgaaatagcaaaacatttcccaaatggagaagaattagttagcttcatcagtcaagaaagcttatgtattgcacaacacataacaagctccaaggctaaatattcataatagaaatagacccataccaagttgtcgagcttcctctagtgacaactccagcacccgctttgcgcgaggagtaaatggaatctccactgccacgaatccactgcctctcccaattatcttttctacttccacgcgtgaatctttaagattgatccccatggatttaagaaccttggcggcaatcccagtcccttctccaattagacccaacagtatttgctcagtcccaacaaagttatggccaagtctccgagcttcctcttgagacagcattatgaccttaattgctttctcggtaaaacgctcaaacattgctttgggtacacatcggctagctttttctctcccagatgattttgcaagtttatacttaacaaggaaacctggactaggccttcccaaataatctaatgcactgggggcccttaaccctgagaagctctgaattgtcagaagaggtgcttgtaaactggacatcatcttcacacgccctcttggttctctgtattctgtggcctgaattctcagaacaggtgcttttaaactgctcatcttcatcacacaccctcttggttccctgtattctttggcctgcacatgccttccgggaccaaaaaaaggaggtgtaagaagagctatcgaccaagccatgatgcaatgttggaggctgcattgggtaatggtagaacatcagtattgctaattctcttaaacacgtatacagaaagagctcaggcacaaaaatacacaatttcaattcaccaactaagagcagaacaatgtcacaaaagcttgagctatgtttcttatctccaaactctccaaagcaaaacaagcaatcatctttgaacaaatcgaaacgcgaatacacaaccctaatctcaaagtaagcatttttgcatatcaataaaaccaaataaagagtacccagattcagaaaactcaaaatgaaaccaccaaaagaaacgaaaccaaacgccatgagaaatagaagaaaagaaaaactcaacctttaaaacagctcacacaacagagaagcagaaacctaaaagcttcttcaatgaaacacaacaacaacaaatgaaaaataaaaacagactgagaaagagagtgagtgtagcaaagaaaagggttttatgtgtagcaaagaaaagggttttataccgtcgacgcctttggatagcgaagttggagaaagcgagagactccttttattgggaaagagataggaaagtgaagaagaagatacccaagagacaagagatttctctattctctctctctttatcttctctcgcatcgccgcccttcatagattaaacacactcacctaccaaagttgcataccagccgttagattactcataagtgtattccaccgtcggatttaactactttttaaagagtcaacctcaataagaatcttgttcccaaagataagggtttgtgttgagtttaagaccggtttaatctgaaaactccgtcaaaccaaaaccaaaccgatttatcataaaaaaattcatatcatctacttccattggctagagacagattgtaacggtgtcgtcgtcgccaaacgatttgcctcttcctaaaggtaggttcttcatttctctcagtgcccctttgcgtgtttcagcttcttctttatgatctaattcatgtctatgtttcgtttgattctttgttcaattctgaattgagaaaatggcgattcgagatctgtctcttcggttttttagttcgactgatttgggaatgtgaagagatcagattgatttgttgacagagtcttgggggttttcaatcttattcctctagattttcgaaattcgattcctttacatcagatttcgcttaattctctgtcctagtgagttttacgatctttagtcttctggtttgtcaaattctatgtcttttcatgttcttctgagttttaatggttgatcttcaattacttggccacaatctctagagtttgagactcttgacttgtcttgcatatattcctctgtagattggttttatgtttggtttcaattccttgttgaactattctgatacggaagttttcctttctaaggtttggtgtttcctttttctgataaatagtgatgaagatcgattatgatgatcatgtaagaatataatctagctttggtgtttgtattggtttacctgagggaagaaaagtctttctctttgggactttaaactttgattacttaactccaacattatcatagttgggttctgtagttcatttcacttatagcagtaataactcattgattgatgcaatcaatcaatcctgtgatggaaatggaatcatggaaattgagggattcagggaggattgattgattagaatttcatatttatgagagaataagagaactgatgtgtgtttcttttcctacttcttaaagttgtgctctttcctatttctataagctcttgtggataacaacagttgattaacgttcttatgcttgtttagggtacaacaagaatggaagaagagtatgagagtcgtcgattgaggagatgggaagagttggacactgacatcttagtaagaattttccagaagtttagcgtctttgagttgacttcgggattagctcatgtttgtagaggatggagagctgcttgttgcgatccgattctttggaagacggtggatttgtcaaacatgagatctagtttcatcaagatcccattagagccttatgtctatgtggaacgccgatctgatgaggccctaacccgcatcctgaaactctccatgaaccttagcggaggaagcacgaggaccttgatttttcatttcaacttgttcttgagtgatgatcagcttacttacaccgcagaaaggtatgtccttttcgttcttccacttatttgtcttccaaattgtttcatcatggccgtaaactatggttttttagtcaaaagttggttcagtttttggtttggttaagttcatgtacccactttcagtcaaaattgctgaattacaattaagctgaatctcgcaaatgctaaaagttgaaaaatttgttgtactgaatattttgcaggtgtccagggttgagacgggtcgtcctaccggcttggaacagaataaagaagactggtatatgcaaagcgataagaatctggaaagatctagagtcactaacaatgccaagcatcgcaaacccgccttatctcttaacagaaattgccaagaactgcaagaattttaaagagctgaagatcatgggtccattcgaggtcttctttgcaaacacgctcatcacttgcctcccaaacatcaaaacactcagcatcagatgctcggcgataaagcgggaagcactgatgaaaatccttgacggattaccaagccttgaagtgctcaacatatcacactctcacctagtggagtacagcggttggcagcctcagcagaaggtgattgttagagagctcgataagacgataatggagaaaacagcaaggctaaagaaattcttgacttgcatggatcacaagacgtgtgtgatgtgtcagaggactgaaaacgatgaagggattgtgagatggtacaagtatgaggaaggagactggaaggttgatgaagtgagttctcttcatctttgatgtttctgctgtgatcattctctgtgaaggacttaacttgttattgttctcatctttgactgttgaattgtttatttctttgtgttgtttgttttgatttgaatcgtattatgtgtatatatctgtaggctatgccaatgaatgtctgtagtgatcaacttttgatcaccaccaaccttgcacaccaaataggaaaataaaacaatattgttacaattatttgtcttgatattagcattattagtcacatttgttttgcaaatcatctaccttttttttttggtctatatcttattcttcttagttcttacctaccagtcttctccggcggcattaacgacaccgttttatcgagctcagccaccactagttaggtaacgatatatattcttaaaaacgtttagaaaatttctatgtatgtttcacacgaacaaaaagaaaatatttttcagacatcaacggtcattatggacgacgactgttaaacaaaatcgtttaaaattcttgttgcgtaatttgaccattttattttattttataccaaaaattgaagatattatatatatgttttaattcgatcgcaaataaatctgaaaattaaaacacaaaacgttactcttctctctcattctctttcgcttctcgatagcttctcaaatcatggttcagcaaatatgggagacgttgaaggaaacaatcacagcttacactggactttctccagctgcgtttttcaccgtacttgctctcgctttcgccgtttaccaagtcgtctccggtttcttcgtttctcctgaagttcaccgacctcgttctttggaggttcagcctcaatcggagcctcttccaccgccggttcagctcggagaaatcactgaggaggagcttaagctttatgatggctccgattctaaaaagccccttcttatggcgatcaagggccagatctatgatgtttctcagagcaggtatttcttgtgaaatctttacttgttcattaaattatgattgaatccaaatgatcactagttaaattaccagtaataaacgattcaacccaatagtttcgagatttggggtttaggttagttaatcatggttgactgtttgatttataatccgaagtttccaattactatctatcttatgattctagtatatctactgatgctcgaactctagtttaagtgattctttattgtaaaactgaacacttttagtaaatctttttgatgaatattctctcctttttgttcataatcttatgatgctctttttattgctttttgcatcttagtgtttgttttttcacttcttttcttggaacaataccattagaagcactgatacaattgtattgtattcaagttatcggaaagatctctactttttcttatactagaaaaacctgtatttagattacatcttggattagtagagattgataacgtacaaactcgtcaaaggtttggcttctaatattgctattgtggcgaaagagatcgttcactgattaattatccacatttgcttgctatttgtgttccatgacgtttgtaaattaagttttggcgaacattgttggtatgtaaccatgctgcagttgtctagatccctgacttgtcaactagacagttcttttacattccagttaccgaaaacttcgttgtggtaattaggttttgtgctagatgaaataatcacttcagtgatcataccgttttgcttgttcatagtggcgacagacacagacacactcatcaacgcatatacatgtcgatgtatatgtatgcataacttttagtttttttcttgtacatagttcatcagctgtactacatatctagatgaatcatattcatatgtgccaagctgtagtttttcattcttcaaactctacttaactcttactggtcgctaatttgcatgaccatctgttctttttatgcaggatgttttatggaccaggtgggccatatgctctgtttgcagggaaagatgcaagccgagctctggcaaagatgtcatttgaggaccaagacttgactggagacatctcaggtctcggtgcatttgagctagaggcgttacaagactgggagtacaagttcatgagcaagtatgtcaaagtcggaaccattcaaaagaaggatggagaaggcaaagaaagttcagaaccttccgaagcaaagactgcctctgcggaaggtctttctacaaacactggagaagaagcttcagcaattacccatgatgaaacttctagaagcacaggcgagaaaatcgcggaaaccacggagaagaaagatgttgcaactgatgatgatgatgctgcaaaggagtaaagtcaatgtaatgagaggcacagtttctcttgagaaattagtgagatttttcagggtttaagtatgagtcgtatatagctcaataaaaatggtgaccttgtgtgtactttttggatcttgtataatgacatctaattctggttatggaagcttcaaaatacattatttctacagtattaatcgataaacagttctataattcagggtttgttcacttgttgtttatgcttagttcatatttgacatcctgctatgtgcctggtaattgaagatggttcaattcctaaaatcgaagcaccaacttacatttgatggtaggtctgttgccgaaccgaagtgaagaatttgcaataattttggtttcggtttggaaccttcaaaccgaccggtttcgaattattattgaaccaaattttcaaaattcaaatatcttgtcaaatcattttcttccctctttctgtctctgtctctctctctcgctcgatctcgaaggtgaagctatgggagtgaagtatctttgggatgtcttggagccttgtaagaagactttcccactcgatcatcttcagtgagttgtttcttcgtctcaatttctctttaatttttctgggtgtttaaaaagaccaagtctttacgagatcttcgtaatcgctgtagaaacaaaagggtatgcgtggatctttcgtgttggatggtggaattgcataaagtgaacaaatcttattgcgccactaaagaaaaagtttatcttcgaggattttttcatcgtctccgagccctaattgccctaaactgctccatcattttagtctcaggtaatttaattctaccctactgttgaaaattgccatcagaagagccaattagggtttatgtagtgttgtattgttgtcattgtgaattgatttgagtaatagaagcatgagtggtcaaatcagttcttatttattgatgctttgctctaaagtttagttttttcaatgctattgagcatacttgacttgttggaatgtggcatgtaattgtagatggtgcaattcctggaatcaaagtaccaacttacaagcgtcggttaaaagcaagattcgaggtacaatgatgtcaaatgtggcacttgtggtttcatccttgcatatgatggctagtttttggattgtttttttcgatttcgtgctatattggttcagccagatcgctgacgatggtgttgagcctagcaaagagacttcactcaaaagaaatatggggtctgagttctcgtgcatcataaaagaggcgaaagttattgcatcaacactagggatactttgtttagacgggtagggcttcaagacagttagcttagattgacaatgagactttggtttgagtgtttaactttgcttatgagactttggtttgaatgtttaactttgcttatgagaaactgattctgttctgtattttccatcaaatgcaggattgaggaggctgaggcgcaatgcgctctgctaaactcggaatccttatgtgtaagacgcatttttcagctttaatcagtttcttgttcgtcatgctgttaacccaatattcaatgatcatccataggacgcctgttttagctttgattcggatatcttcctttttggtgcaaagactgtatacagagaaatatgccttggtcagtggaaagagactctttagtgtgttggtttcttttaccgtctgatatggttaatagtattataagtcctaataaatttgccaatgaactaggtgaaggaggttatgttgtttgctacgagatggatgacatcaagaaaaagcttgggcttggacggaactcattggtaaattaacaaacctctttaagtgattagctttatatacttaaccctgatctttcgtttctataaagctgcaccacgttattataaaatgattagattggtagaagcatgaatgcaatgcttgcaaaaggtggcctttgatattttataaactcaggtgagatagatactatgtgtatgaatggttctactgcaacgttgtagctttaagggctcaattcctttgttagcatcagtagacaagaaaaccagctacacattgttgagtgttgactattattccatgcgtcaaagaactttaaaatcttagctatgtttcatcaaatggtaaggtcatgtatacaatgttttcttgggtgatgttacagatagctctagcgcttttgcttggcagtgactactctcagggagttcgtggtcttcgacaggtgtgtagataactcaagcttttaaacctccatctatcggggtcatatgttattcgaggttgtctgttttatttagaattggattacaaaagactcacgattaaacttcttctgtgtacaggagaaagcttgtgagcttgttaggtcgattggagacaatgttatccttgaaaaagttgcatcagaaggactttcctttgcggaaaagccgagaaagtctaagaagcaagttaggccttctgtgtgcagcaaaaaggggaccttacctttggtggttataaatggtaatgaaagcaacaacttctttgtgtttttgatatgacatgattttggtgttaccccaaacagaatgtttgtttatcattgaaaagctctttccataatttcaacttgttgcaggaaataatcgtgatccagaaagactggaagagatcaagcaggtgatcgatgcgttcatgaaccccaagtgccaccaagcagactctaatacagtttccaggttaacccttctttccatttctttgttgtcagtcctgtgatgataattcttctccagattatacctatttgtagagctagcacgtgcataagcccatcgttagtagcaatcatctgccacaaggaatcacatatttttgtcctgaattaagtcatggaataatatgcttccccaaatgcatgaaagaaatcaaggaatttctgatgagtaataagcttataataggaatgtctgttaagcctggagattggtgaacttgaaaaaaatttgaatgttattcagattttttataaaggaagtgctataatttatatactggttttgcagggccttagctgaattctctttccagcgcaccaagctt

SEQ ID NO: 1067 - DNA, 85109 bp, Arabidopsis thaliana
aagcttcacaaagccgttatcactgtgtcgtaacaagactttattaagatatagagtcttgaggtttggaagaaaaacatcttccacatcaatgaaggcaccgtttccagtttctattctcagatgaaccagtgccttgctcacaaagatatctggaggcatggtaccattatcccaatacacaatacaacgtagatcaagatccgataccccgcgttccatcacatttgatatccaacgagatacacaagttggatcagtaaaatctcggcatgttagagagaacttgttgataggataatcaccctgcaaactcaatactctatcaacgaaattctcaaatattgtctcatttctttctccgtcaggattaagatatactacagcgtcatcaaactcaagatttggtctgaaagcaaatagatgctgccactttttcgaaagtactgaagtcaaagccgaatcttctatgggaaggaatgacaagatgtggcaaataagagcttctggtagatcactaattatatctttttttgaatgatcactaattatatctttgcaacatatatccatcctttttgaatctactttgacagatctcaaacagttacaacctgaaaaatgacatgatcttgagttatgtaatttattttaatctgagagttttagatgtatgttcgggaaaaaacacagttacgaatgaacagaagtcgttaaaatccgacacgacagaataacaaaaccatgaaggagaaaattgggaaactcacataggtagtaccccacggtattgagaactttgaacatcttttgtaatcgtggcggaacgggtgacttctggtttgtctaaatttctttctaaaggtcaatttttatgagaaaatgtcgatcatatatgtggaacaatgatcgatcgagactagtaactgatggatgaaaagaaggcaaggagacttggtctctctctctctctctctctctttatttattttactttactatgtagtgcaaaagaatgttctttgttctgatagacatgattgtcactttctcattttcatatggtgttacttaattttgatatcaacttttcaataagaagtacaaaaaaagatagacaatacttctatctttcttttttggggcaaaaagcaaaaagcaaaaaatacttcaatctatcaataaaagtcctcgatttatatttcaaaataaaacaattctgaaaattcttaaatatgtacttggtaaatttaatttttccccagaggaggagttttacataaacctcactgtcactgcaacttttactattaaccttgtgactgatttacaaagctcaaagatgacttatctaaaccaagttttaatgactcatatattattagatttatgttgttaaaaaatcagatatataaacccaattggtcatgtaagaccggtctgatccggttcaactatatatgatggttgaatctctataaccggcttacctacacatattgttaccgttgctatttgcgctcgctagtcgcgctatatatataaccgttgatgttagtgatgaggttcgatttcaaagctcatgaaacgcatcaatgtcgatctccatcttctccattttccgaaattcagaaaatttcaatcacgaaaagtatcttcgtccctacccaaattggaactcgatcagaaatcaccacaggagacagttttcttacttggtcaggtacttgacacttacccagatatcagaacacttagaacagtccactcaagaatcattttggaagatctacgttgtaattcttctttgggtgttaaacttatgagagcttatgcttctctaaaagatgtagcgtcagcacgcaaggtgttcgacgaaattcctgagagaaacgtaattatcattaatgttatgattagaagctatgtgaataatgggttttacggtgaaggtgttaaagtgtttgggacgatgtgtggttgtaatgttagacctgatcattatactttcccgtgtgttctaaaggcgtgttcttgctctgggactattgtcattgggaggaaaattcatgggtctgctacaaaagttgggctctcttcgactttgtttgttgggaatggtttagtttctatgtatggaaagtgtggatttttatctgaagcaaggcttgtacttgacgagatgtctaggagagatgtggtgtcttggaactcgttggttgttgggtatgcgcaaaatcagagatttgatgatgctttggaggtttgtagggaaatggagtctgtgaagataagccatgatgctggtacgatggctagtctgttaccagcagtgagtaacactacaactgaaaacgttatgtatgttaaagatatgttttttaaaatggggaaaaagagtttggtttcatggaatgtgatgatcggtgtgtatatgaaaaatgcgatgcctgttgaagctgtggaattgtattcccgaatggaggctgatgggtttgaacctgatgcagtctcaatcacaagtgtattacctgcttgtggagatacctctgctctgtctcttggtaagaaaatccatggatacattgagaggaagaagctgataccaaatctgttgttagagaatgcactgatcgacatgtatgcaaaatgcggatgtttagagaaagctagagatgtgtttgagaacatgaagtcacgtgatgttgtgtcttggacagctatgatttcagcttatggattcagcggacgaggctgtgacgcagtggcattgttttcgaaattgcaagattcgggtctcgtccctgattcaattgcgtttgtcacaacgcttgctgcttgtagccatgcggggttactagaagaaggtaggagttgtttcaaactcatgacagatcattacaagatcactcctaggttagagcatttggcttgtatggtggatcttcttggccgagccgggaaagtgaaagaagcttacagatttatacaagatatgtcaatggaaccaaacgagagagtttggggagcattattaggagcttgcagggtgcattctgatacagacatcggtctactagcagctgataaacttttccagttagcacccgagcaatcgggttactacgtattgctttctaacatatacgcaaaggctggaagatgggaagaagtgactaacatcagaaacataatgaagagcaaagggttaaagaagaatcccggagcaagcaatgttgaggtcaacagaataattcatacattcttagtaggcgacaggtcacacccgcaatccgatgagatatacagagagctggatgttctagtaaagaaaatgaaagagttaggttatgttcctgattcagagtcagcgcttcacgatgtggaagaggaagataaagagacgcatttagctgttcacagtgagaaattagccattgtgtttgctctgatgaacactaaggaggaagaagaagacagtaataataccataagaataacgaagaatcttaggatatgtggagactgtcatgttgcagctaagcttatctcacagataacttctcgagagataatcatcagagacactaatagatttcatgtgttccggttcggtgtttgctcttgtggtgactattggtgaaccaaaaattaataaatgttaactttacaaaaacgcagcgttttggtgaaagtgaaagttacactttttagacaatatctagttgggtttcgacgaatgagaatatgacacgtcatcaccggtaaggaaaattcaccaaatagatgatagcctaatctgcaaatctttgtccagcttctgagctcagagatagagagagcgagaggttagagataacagtagttttaccgatgattgagtcggttatggccgttcgtctctccaccggattttgctcgtcgacggcgttactccgtaagctctatttatgtctctgttcttcaattctatcttcattgagtttttgtttttcttaaagagtctttgttcattcgtctgaatcgtctcatgctaaatttgtagagtatcgtacagcaccgagctcggaggagggaggaaactgcttccattatgcgtcccgccgcgtttttcagcctcaacgtatccaccatattgatgggtaatgaaaaattcactttgttccgtcattaaattgtaaaatagttttgagagttttcgtttcaccaggaggatagattctagtatttgagtgctgagtgtataatacgagtgcaatatgtttcttgtcagctgtgaatattgaatttagtgtgaagcggatgttcctcgattatatgattatatggagatagagcactaagttagatgcttctttagtgagccgtggaaacattcaaagatcgattcttttgaaattacagattctgaatattttggttttctttatataatgtaaatctcacattcatatatgcacttttctaggagtgggtttctgaagtacaacagtgactatataacaagaaaacacctacggaagaatcgaactcaagccacagctgagtatgtagattcagcttcagatccagaaaagcaaactggcaagtcaaggtatcatccttcagaagaaatcagagcctctttgccacagaatgatggagattccaggctttcacctgcagaaactactagaaccatcattgaggtgttatattgcgtctttcaatcagcataagctatctttttggtgaaaatattgttagaccaatgccttatgttacatgcttgttgttgcagtcacatgttagtgcatttagtagttttgcttggtcctattataggttgcttcaacattcatctatcaattttcagtagtcctctaatcctcttctgtagagaatagtttttttttttttttttatcttctcaaagtctatgtaagtctgcattacatatattgcctttatgaatacatgttcctccattttcagttttcctgtcattatttttgtccatgatccgtttttgtgcatctaacatttcccgtagtgtgtcttgttcaggtgaacaataaaggaaccctgatgcttacaggttctattggtgatggagttcatgagaatattctctggccagatataccttatataacagatcaaaatggaagtaagataaaatttaattatccttagttccatgtcattgtttaatctacctaacatcgtcacgattaaagcgaatcaccctaatgccttgcagatttatactttcaagtaaaggaggatgaggacgtcatgcagtccgttacttctgaaaataattatgtggtatgttgcacaagacattgatatcctatttacattattatatgttccaagtgcttcaaatccaagctttgtctatgagagatctgttattttttctgttgcagttgctaaagcatgtatcttctgacggtttattttaaattgaaacgcacatccatacatcaatatgagccttctagcttcaatatgtttctcttgattataactgactatactgatctgtgtagtttttatcctctatcttattctgtactaacctttaagatgttatggatgcattgcagcaagttatagttggttttgatacgatggagatgatcaaggaaatggagctgatgggactttctgatagtgactttgaaactgaagatgatgaaagtggagatgatgacagtgaggatacaggagaagacgaagatgaggaggtttaacaaattttatttcttcttttatattaagtcactaaggaattctatgacaggaatactgttgccatgtcttagcatatttcactatttattcttgacttcaggaatgggttgctattttagaggatgaagatgaagacgatgatgatgatgatgatgatgatgaggatgatgatgattctgattctgatgaatcgctgggagactgggcaaatttggaaacaatgaggagttgtcatcccatgttttttgcaaagagaatgactgaggttgacttttagaattcattaaaaagaaagtgttttggttctttataaaaacgatatgcaagatcattttcaaacctgaggctaaaagagaatgactgaggttaacttttaacacatttgtttgttgtcaaatttaggttgcttcaaatgatcctgttgattggatggatcagccgtctgctggccttgctatccagggacttttgagtcatatcttagtggaagattattcagatatccaaaagaaacttgctgatagcaattctacaactaacggaaacaaggatgcagaaaacttagtggacaagcttgaagacaatagtaaggcaggtggtgacgaatctgagatagattcatcacaggatgaaaaagcaagaaatgtggtggcgttttacaagctggagatgataagaattcagcttatcacagcacaaggggatcaggtttggaacatagcctccatcttttctgtgtaaatttattcatgttcttgcaaaactctcgtctatctaaccattgtcgcatatctggaaaactgtgttacgcttgctcttgctttgtttcttgattggcaaatctcatgattctcgttttcaagcttcacttcttatgtaaactcttctttttgttgcaatcttatgcttactagtatcttttaaacttttgggaacagactgaagttgaggtggaagatgtcagaaaagcacaacctgatgctattgctcatgcatcagctgaaatcataagccgtttagaagaatctggtgataaaataactgaagcactcaaatctctgtgttggagacataacagtattcaagcagaggtaaatagcttcaacttaactctagaagctctggaatataacaggatatctctgtaggttttggctgtgtacgaatagatgatcgacgtcattcctttttgtttgcaggaagtgaagctgattgggatagattccctaggttttgacctcaggctttgcgcaggagcaaagattgagtcattgcgatttgcattctcgacaagggtacatccgttcttcctttcatgttttaagatcttgttcctgatctatgatattttaagaaaccgtgctgacataataattgatggtattaacatatcatgccaatcaaaactcttgcaggcaacatcagaagaaaacgcagagggacaaataagaaaactattattcccgaaaacgaaccagtcgacacaaccaaaaccaaaatgaacaagtcagagggaatgttgacgctgtagtaatcttctgtgaagctgcagagaacagttccatgaaccaaaatccaaacaagcaatgcatatgtttctggaacaaatatgaacaagttcttggagatctaagcaaaagagtaagatcagtgacttcaagcaatttttcaattgatttttgaacgctgtaatttcgtgttaaatattggtttcaagtttgtgggttactctgcacaaattgggcattgaagttccaacccattattggtttcaagtttgtgggttatcttctgtttgagttaatgtttttttcgtataacttacaaaggaattctaactataacacaaataactgttgtttctttatgaatgaaaacgcattcttataacatgcaagtgttaagcaaaagagctaatacaaacaaacaatcgaaactctgtgacaatttcttgtttgaatggaagtcaataaacctttcttattgccatcgactgtgacgccttcgaacagccccttctggattaagagctgactcgtcaaacttttgtctctttgcctctggttcctctggtcgtgcagtttgcatcatccccattgaagcgtctgcagactgaccataactataaagataaggaggatacatacgctgatattccagtggaagccgcataaagcatgcaaatcaaatcacagcttctcaaatcgaagacagcggaaaaaatccacaagaacggtctccgtacaagcatcatcagaaggctttactactctagaatacgcatcaacaacaacattatataaaccgaacacgctatttgttggctccatgaacttaaactgaggtttcataacaactttcttcatcaaatctcaaaaaaaatgcatcccgtaacacgccacaaacagagctgtgaacttcataataccaagctctttgagtgagatcccgccaccaaatgcataaggaaaattatagctacgttttagacacttctcatgaggagctggagcattacgttggatttgtgttagctggttaatcatcatcgaaggccgttcgggtggatccatgatagcagaatagttgtcatctgccatgtgagcaaaacagtcaactccatacacaaaaccatgcaaatcaatcatagcagtttccactccctcttccagcttaaacaggtgaagacggtggaaaaacccctcaagcacggtcgccgtacaagcatcaaacttcttcagctttttagaaggctttaacactctggaatacgcagcagtaaacccattgtaaaaatcggaacggctatcggaaggattcaagaactgaaacaatgggttcatatacactctcttccataaaccacaccaaaaatcaaacccatatcgcaccgaagactgcgctgtcagcttcataacaccaagctccttgagtgtaatcccctttgcagggactcttaatgttagtctttttagagtaggagacctaaaagaatcacctacactttatattcactagtaagctgagatcccagtggaagctgcaaaaccatatcaggctgtgtttgtgctactcggttcatgatcatcaccgaaaggcgttcaggtggtggcatggcagcagaataatcttcatcagcaatgtgagaaaaacggtcaacaccactcacaaaagcatgttaatcgatcgcagcagtctctactccctcctccaacaaagtcaaacaaatcaaccataaccgtatcccttccctcctccagcttctccaatcgaagatggtcgaaaatacgatcaagaaaggagggagaacccttggaatgttttaatactcgtgaatacgaagtaacaagggcattaaaaagaccgaagttgctattagttggcttcaaaaagtcaaactgctcatggctcttaacaattatcgccttcaaatcccgttgaaacaccttcccataccccgccacaaactgcgcaatgagcttaataatacaaatctgcttctccttgagtgagagacacctagtggtggcgtatatacacttctagaaaaggagagaactaaaataaatgttctcaagtaaacgtcttgagagttttattcattaatatatatgtattcttgtagccacatattgggtaaacaattctcacatagagctaacaaagtcaacgatatccaccacatcatggagcagagagttggagttcacaactctacagttcaatctgatttgtccttgagttcctgtagttggtgtaatgtttcccatcctattcattgcctccacaaatgcattgaagaatgtttgtgtgccatcagcatatgctctcaccaaggggattgtgtcagtggcattggggctagagaacaactcttggtcgctctggataagaccttttcgctctttgagattcacgtagtatttgttgtcgaaaaccgtaggcgtacgtagatcaaaatctaccaaggcacttcgattgccattaagggggcatagtccacgaagagtttggaggtaagtagtgttgagtgtagggtcgggtaaacctgtgttgctgaaattgtataatctgtcaagaataaactgacattgatttttaccaaatgtgtgaccacctaaacaaaacaaataccataattagattagtaataaactatcgctaattgatattgtatcaatggtgtttaattttcttttgttaattaccggagagagcaacgagatcagaaggacgatcgagaccaacatttctgaagctggctttaagttgtggaagtgtaaagaatggagctggaagatttgcattagcgagttccaggaatgcttgtaaactgtctctccttcccaaaggaaccctccaagaaggacctcctgcctatagtataataaccattatattacaataatattttcttgagattatttttaacatgtaaagagaaaaagagagtcatgtaatataaattcattgattagatatatatacacaaagtaaatttttatatatccactatttcttgagaaaaaagttgaatattattcttttgggttaatatgatatcaaagctagtgatatgagacctaattttgtcaaattttcttaacgggaccacgcgcttttttcaattaatattgaatacttttcatattgaaaacagtgtttgtaaatgaatatgggacaatggagcataccaaagtgacagattgttgagctgcaatggtgagcatatctgcgcatgaaacggttcttgggcatgccctctccaccgcagctttcattctatcaatcactggaaatccccgagccgaatttgcgtttccaaacgcatctttctctgttcgaaatgatgtcgtgttgtctaacaagatggatgcgtcacaaccctttcaaagtccaaaaatttatttaacaaatcattagtcatgaatgtattaaaaacttttttgccattcactaaaaccatttgttcctctgaagcaagtaatcagtgaaggtatatctgtaaatatctaaattataatgaaaacaaagtgatagagaaactcctttaaccaattttaactcaatagaaaataaaccataccgaaataatatttgtataccgaaatacttatatataatcacattaaaatatttaaattcatcaaaattttaattgaattataaaaattaataatcatgattttagaattattttttaaatatatatccctcaaccaaaaaagaaaaatgattgatggatcttaaatttctatcgtgtttggtacggcaccatgcaattccttagactgtaacacggatactttattttcgtgaatccgattgcataaatgttttggcatcatcattgtgtaagaaattaacaactaaccagtaacatcactgtcgatgagtaatattaattttcaatatagaaaaagaaaagcagttaacaactagtaacatctaactacgtgaaatttagtctttgagcaaaaagagtattaactaagacaattgcgtgtgctgaatctgctgatgacaaaatacacttgttatcacttttgtttcctactttttacactgctttactaatatttaaaagatggccctcagtaatccgcaacgctatagatatataaaaagtaatatcttacattaacaaagcagtcgtggaagtgaagacgaaggatgctcgcagcgatacgagggtccgaccttaactcatttacaatggtttctcgtacgatgttagtgacattaggacatgacctatcgtagaaggtaggggtgagttgagcagcggacaaagatgcatgaagcataagacatcccaatgtgattaagattgtccaagtggacgatgttgaagacgaagagaaatgcatttttgaaagaggaaaaacaaaactagttgattctgtttacccgagaagatgaggaaagtccatatcttagagaatccttttataggcaaaacgggtcaaagctggaggcattttctttttctcaattaaaggcttttatctagaacagcaaacgaatagtttccttttgtcaattatttcaactaacgatacatataaatgaggtattattccacgctatctacatggaaagtaaaaaaaaaaaaaactcaaatctaaaatgtcagtttatctattggtataaccgtataagttttttttttaacaactataaccgtataagttataatgtctttttgacaattgtttaaaatttatttatacatatttactatcaaaaacttaagtattcaatataaattgaagaataagggatgtatttttcggatgtcaaaattcgaccataaaatataaccaatatgaaaaatgcttaagattaatatctagagtatattcaaaatgcatatcttgtctttttaattatcacttaaatctttctcgctctttacaactaatgtggaacgctaacggaaaacacaaatcaagactcgtccaaatacgaatattctcttacaaaggaaaattattttttgacactcccatatataaatttttttaaaaaagaaatagaatttcaactcgtcttcaattttgataaagagaaataaaaatttcatagatgcaaaataatacaattttacagccaattgtctctttatttctgatagtttatatgaatttatataaattgtctgaaacaaagataattggttataaaattgtagtatatatatatatatatatatatcagattaaaatgacttaaaaacgtaagcgtgtctatttctagcgtaatagactcagaataccttacaaagttttagcctttggatgaatttcgaaaaatatataataactcagaaaactattgcactaaaactttagtcagaagaaatccataataattgtaagataataaactaactcctcgacgacctttcaaaatctcttggtcgtctccactaaaagacgaacaaatatcaacatcgccaatagcttttttttccttccattttctctctatctctctttatttgaaaatgagaccagcctcgtgtccgccacgttattcacctatactactaaacggtgccctcttcctttgctcaagttcctcatgatctctttggataaagacataagaatttaaagtggagattatatcattccactagaattattggttctgacattatgatgtaatgttagtatttacaaaatgtaaagtttcatacaccaactcttatataaagaaaataaaataaaaaattaaatatgtttgtacaagaatgcatggagatctatagactatttctttgttcatatatatgtgaaaattttagactttacgggttcacttatttatcgccttatcggatttaattataaccggcataaacgttatctttttgagacttccggttaggctactgcagaaactccatagctaataatgatattttgcttcaaaaacatattaataacgagatcgaatatgaacggtgtcgttttctgctgacatgcctgaggcaataattgtcgttgaagataaaaacaaaagaaagaaatatcaaacgagattttaagtatacacgtatatgacgtatagcgacttaatatcctcaccgcatgcacgtcaacaagattagttgtctaatctatctgaaatttaacaattcaaccacatgaaattgtccacatttgggcccaatatgcttctgaaaaaatctctcaagatctctgactattttgttttgtgaaaatatgaagaaagaaaaacaagaaaaaggccacgtgagttatcgtgagaggagagtagcagcaacacacaatcctcaattatagaagtgatcacgtcaagatcttccgaccacagatccaaccaaaagtagactttagcagccgtggtaccaaccctagccttcaagtcgtttgcatcacccatactaatttattaatatcaaatgaagtaataaaatcttaagtcatttgtccaaaaaaaaaaaaaacagatcgtaacgcaaaacacaattgaaataaagaaattaatttgcgttaacttctatctttgacataaaccagcataatataactgcatatacagtacattcttttctttcatataaacaaaatataatgtcctattaaaagataacgtataataatatatctctatgtatgcattaaagatacagcatatattaaatggatttgaatcaaataaactctatgtgatcatgtgaccgacgacagccaattattttcatacaacgtaaaaccgaaaagttagctagaattcacttgaacacggaaaattaaagaaaggcgaaaacacgtttgataaatgtgaccaaggaaagccactacttttacacattcaacataattgaatgcaacgaaaagtcctaaaaaagacaccaactttatataaaattccacaaaaatacacgaaatatttgagagcccaaaaaaagaatatacagacaacacaatttctgtttcagattctgcactaacaaattgaattctacggtagtcagatatgaataccaattcaaacaatggaaactaaaccaaggttattattgaaattttaaaaagtatttctacaacacatatgttacatatttgcaccctcaaaacttaatgttctagtatttttttttcccccgttttaaagctatactaacattgtcaaagcccaagtcacactcgttatatatataaatattacaagaaaaataaaaaaaacagaagaatagctagtgaccgatttgtttgtcaagaaatggttgtatagtaaatttgcgacgttatgtaatgagagtgtgaaggttttcaggatcattacaaccaaaatggttgtcggatcatgtgcatcgaaaacggctgtgacaattttgcgatatataacgagagtgtgaggttgttaggatcattacaatcttgtcactcatcacaaatgagtggcaaataagatagttgtcaagccttcagatgttagaattgatttagtgttatttgatatcaaatctttcgaatattgctaattcgttgctaatacatgcatgacgatataaaatgattctgaggtacattcgcaaggaacattagattaaaagcttttgttgtttgccaattatttgggtaccattatccttaaggaactaaaaaagatagcaagacttcctttgaggttaatgtgagatggttttataggcatggagatatatatttctttagagatatacatagtttgtacctcttggatgtctaaagcatatatatgccagcctagaaaaatcttgtcatgcttataaaactactcacattaacctaaaggaagctttactatttttttttgggcaaacaacaaaagcttctagcccaatgtgaccatccttagaaattgtatgttcttcttttacccttcttcaatccatctttagttatgtagttaggggactacatacacaaaatcctcagcagaatactccattacattggagaaaacgtttgtctttgtaacattttttgaatggtgattcaaacttgggaataaatgggtcaagtaacgtacttgtctagacatctgtttaattggttcaagctaagtaacgtatttgtctgttttagtttctatttaattaggattttaatttcaaattattattggacacaattgtatcataggttaatgggtttcaattacgttttcttttctataaataaattcatataaagttcacttgtttcacctacaaaatgatttttgatgaacttccgtagtatccagaaccaaattcttcttttccctattaaaattgtgcgcatgttccttttgacatgttagtcgtgagtttttttttttatgttatgcatttctaccaaatacaatatttgatctagatgtacttaattagcttctttgttataactcgtaccaatactcttcttctctcgcctctatatgctcaaaaaatttatatggattatttgttacaccattgagaatccttgttttattcaagttctccaaaagttcattctttgaacagcttaggtttttttcttttcagctacaagtttctttttaagctttgctacatacataataaactttgtgattatcatttttgaacacacatagactcttctaaattccagcaagctccatttgtaacttacgcgattcatctttctcatcagttaagtatttatgaagcttccatatctaagtttctagccgcatcctctcccctccaatgcttgagtttctcaactgatcttaatttaatcttcataaaggcctctcagcttgaaattagacctcttgataaccctatgaatcgcttctcgttccaccagaattattgtgtgttcggagagactcgccaggctcatatttgtcgcgtcctttttttacgtatcataaatcaatgcaaggccacaaagttagatacgttttattctttatatatctgactatgtatcacgacaatcttgaaccatattcatatttcaattttgctagatcacacattcttcttttatatacatcactagagaaatggaaacgtaggacaaaatattttcaaataacataaacgttttatcttgtcatatttattaggataaaacagtccaaaaccatagaagcttagaccgattaacaaaacgctatcaaaggccaatataaaaaaaaaacagagaactacttggatactataaacaccaatacaatctgctcctgctcaagtaacaacttgagatcccgcttatttatcttaacatatagtctggtcgccagatattgagtcaactattctcacatagaacttacaaagtcaacgatatccaccacatcatggagtagagagttggagttcaccactctacaattcaacctgatttgtccttgagttcctgtagttggtgtaatatttcccatcctattcattgcctccacgaatgcattgaagaatgtttgtgtgccatcagcatatgctctcaccaaggggattgtgtcagtggcattggggctagagaacaactcttggtcgctctggataagacctttttgctctttaagattcacatagtatttgttgtcgaaaaccaaaggcgtacgcagatcgaaatccactaagacgctttgattaccattgcgaggacattgaccacgaagagtttggaggtaagtagtgttgagtgtagggtcaggtaatccagtgttgctaaagttgtataatctgtccataatgaatcgacattgatttttaccaaatgtgtgagcccctaacaaaaggaagaccataattagatcaacgattaacttgctaaattacaactatatcaaacaaggtttcatttctttttaataattaccggagagcgcaacaagatcagaaggacgatcgaggccaacatttttgaagttggctttaagctgtggaagtgtgaagaatggagctggaagatttgcgttagcaagatctagaaatgcttgtaagctgtctcttctccctaaaggaaccttccaagaaggacctcctgcctatagtataataattaaccattatattcaaaataataattcttttcttagaaaatattattaccctgaaacatgttttataaatctattgattatatactcaaaactcaaaggtaatttccatggtctctttcttggatgaaaaggaattttcttctattttgttaactaaaaaggtacataaatcatagtgatgagaccttattttctcagtgatattaaaattatcaaaaaatatcaacgggagtgttttgaatgttttccgattaattttgaatacttgtctattttattctaaacatatattgggagtttgtgacattctaaaagacataaaatataccaacaattttattttcgaacttagactgtcatgtttaacatgtacgtaaagcgactacttgacatatttatatcgaacaatgtgtgtaatgaataaaagaatatgggacaatggagcataccaaagtgacagattgttgagcagcaatggtgagcatatctgcgcatgaaacggttcttgggcatgccctctccaccgcagctttcattctatcaatcactggaaatcctcgggctgaatttgcatttccaagtgcatctttctctgttcgaaatgatgtcgtgttgtctaacaagatcgaagcatcacaaccctttcaaaagtccaaaatattatttaacaaattattagttaatgtcatccatagtttacatctttaccaaaggtaacagtttaacgttgaacttttttcatccattaaaaccatttgttcctctgaagcaagtaactgagttaaggaaaacaatgtaaggaggaattaactcttctaagttctaacccattttaattcactaaaataaattcagtaaaagaaaaatttatattaccaaaatatggtggaaatttaataagttccattatactactacgtgattccaaaactaattgattctttgtctgtttgattaattttgacgtgatgttaaattactttttcctttaaaatttgcattcagaatccaaattttgaaacataaaagaaaagctaaaatgacattaaattgaaagcaactaagagtacacctaaaacaattgctaatgctgacaacaactataatcttttttacactgatttaatcaatatttaaaagatgaagagattaagtacagtaatttcataacgctatagatatatgaaaagtgatatcttacattaacaaagcagtcatggaagtgaagacgaaggatgctcccggcgatacgagggtccgatcttagctcgttgacaatggtatctcttacaatgttggtgacggtaggacatgaagtgtcgtaaaaagtaggggtaagttgagcatcggagaaagacgcacaaagcataagacatcccactgtgattaaaactgtccaagtgaaagaagtaatagaagatgaagagaattgcatttttcacaaggacaatgaaaactatttaaatgggtttaacggagaagatgagtaaggtccatatcttaaagaatccttttataggcaaaacgggtcaaacgtggaggccttttttctcaattgatggcttttcgctagaagtataatatctatgaaaaatacttgggttaccaccctagggaacattgtcgttgaaaataaatgaatattattacgtacatgtatagtgtcctttatttgtttagttgcgatctatgttatagtgactttttcttttcttttttcacaacgttatagcgacttaagatcctcaccgcacatcaaagaagactagatgtctaatctatctgaaatatacgattcaaaccacatgaagttgtctccaattgggcccaatttgctagtgaaaatctctgtttacttttgtgaaaatagggcaaaaaccaagaaacgggccacgtgagagttattgtaggagagtcgcaacaacagggtaatgcaacagaccctttttttttcttcttctaaaagtagactttagcagccataagataataccagctttcgccatcgagtcactcataataatatatttgattaactatttatcatcaaatgaattcataaaatcttagttgtttgtcagtaaacaaaaaaaactacagatggtaaaatgcaaccacaaacgaaataatcagcatgaggacatattctgttttcatagataaatcataaatggaatcaaacccaactgaagagtattattaaaataaaacgtgtgatataagaaagacacatcttagatcaattggatgatcttctcatctaggatttgaatcacacacaaactctacgtgatcatgtgaatcagtggccaaggcccaaggcatgccatttatttttgtatacaatgtaaaaaccgaaaacttagatagaaaaaaaatggaaacacgtgtgagatatgtgaccatataagctactactttaacacaacataattcagtgaggataaaagtcctaaaaacagaataactttacataaaattcaagaaaagtatactaaatgttttagacccaagaaaaaattattagtatagtcaacattattgttccagaatatgcatttacaagtggaattctaattggtctaatatgtatacccaataaattcaaacaatggaaaccaaaccaagcttattattgaaaataaaacaaacacatatttatacaacacaaaagaaacacaaccataaatgtattaatcttcgtcatattgaggattcgaaacagacaaaaaaaaacgcacattgtcacataagaaaaccgcttatttccacacaacataaaagattaaacggagaaactaaaaaaagaacttgcatagtcgtatagttctgatcaaaagagatgtattgttaaggaattaagaaacaacgtgatgtttcatcaactcaggatgtgtgaaaatgtcagtctctttgtagaaaacttctacgaccctcgagaggtttaggaatcacatgacgatagggaaaggaaaaggaaaagagtgatctctcgtcattagttctttgattaattaagactcttccttgaatcaaatgccatgattttgatctcttcttaagctttttccccatgaaataccatattgcttcatataacaatcaatggatgttcctacgtgctttctcttatgttcaaaatgtataagatagataccagatttaatattatattttgcactaacgttgtgacacaaaatgtatttgtatgtagggtgtcaactaaagcttaagttctaaggtctgatattattctcgaatcgtattgtatcgccccaaccgcccctaccagtgggtcccacaattcttacatttctaaatatacttaatttattttgtggaagtccccaaatcttgcgtgcatagtaacccatgacctcttcttgtgagtgtgtgtacatgacagtcatgaatgcgagttttgatggtactttggctggaatacggagaatcagcgagtgatttccattgcttgcaaactagtttggaagtggtgatgattctttgcggtaatctcgatatgatatttgctgatagatcatcggttaagaaaatcatctcgtttttcttctctgtctccatcataattgaccaggtgtttttctcttttcaaagactatctttagtcttcttactaatcaagctataaggagttggccaactttcaaaatccaagttaaaaaggttagcttttgggtttaggctaatccaaaagtgattaatcgatcaaagtgtaaaaaaaagtcgtaagctttagaacgaatcttgacaaccctaccatctcaaaatatcaaacaaaaatggatcaaaatcttgataccaagacaaacggaaaacaaatcttgagacttattgcttccttcctcttcctttcttggcaggctgtgtctccatctgttctttcccggtgacttctgagagatcgactgcattatacaaccaacataaataaacaaagtaagctataatacacccaatgttacacagcacaaaaggagctttccttttaaaggttgtgagatgatgcacattcaagttccattctttcaagattggtaggagaaaagcgatgttttgagaaaataatagccggtgacgatgtgatacattgtctcataatagaaataacctcatagctcaataaaacaaaggaggtttttttctcaaacactaagagatagatgatgcatgttctttctttaagttagatatgcagaaaatgaaatttttaccatcaggtcctctggccatgagggtgaaaaatatgttattcagtttctccatcttcttcgcttcttgtgcttggtctgtcttgaacttgagacactaagttaaaggaaaagtagaaataaatctatcatatatatacttcacataataagaatggacaagaatgaaaacaagaagactacaacaaggacatctagttaaccacagaagttgatacaatgatttacatcaaaactcagcccagcttaaagagttctaaagtatcacacttcaacctccaccaagaactattgctctgaagagaggactagatctgcttatctaacacatcgccatgcaagacatgttaaattcatcaagacgtacgaaaacataacctattagcaatcacattgaccaagccaaaacaaaagtaaccacataactacgacaaggtacgatgaaaactcaactaaaaaccaatatctctagtaatcaatcatcatggaaccctaaattacattctccaaaccaagcatcataccatcaaacctcgacgaatcagatatcaacttcaatagcaaatattgaattccatactattatataagataaactcaaaagaagcagtgatcatagagaaactagacacagtcaaattacctctttgttatcagtaaccttaagaaccaacttgccgtcacagtgtctatacttcatcacataccgagtctgcaccacaacaattgaaacattagattgcgaccaacacgacttgattcaaatcaattatcaaggttaccaaaattcccagtacaaaaatcgaggaactatgttcaattaccataaatcaatccaaatatctcaaaatcaaccgtaaatagtgaaatcgaaagaggagagcaaaaaaatagttaacctacagattccggatcagctcgaaaaagctgaacagatcgatcaacgaattcgtcccacgatgcgatataaaccatcttgattcaactagattagcgattcgatttgaggcgattggattctatgaaatctccgggagactcgacggagaaacagagaagcaaaaagacggctttttatttgtgttttcagaagaaagaaaaaaaatttgagtgatgatcaaaccggaataaaccgactaaaaccgaaccggttccttagtgttaagatttctaaaaagaaaaaccctaaccgttcttcttcgaacttctgcaactttgtttctcccaaatctgtgaatctcaagtgttcgtcttcaccatcatgctctctcgtttattccttagacattcgaatctccgtttcgtaaccctagtttcatcgaaatcaaattctcagatcttctcttcgtttattcgtccgctttcgactaacagtagcggcggcggaggaaatggtgacgggaatggtcgtaatcggaatgatgttccgtggagtttcactggagtaaacgatgataagtctggacctttctcttccgatgattcttttggttcttctggagttgcaggatctggtttacctggtggagaggggaaatggccggaggagcctaagagatggaatataaaggaggaagaggaaaaagttgtgtttgatactggtggtgaagtaggtcaagggattgagactagtcgcgagaggaggggtaatgaatgggaggagactaagagatgggatatgaaggagggagaggagaaagttgtgtttggtggcggaggagatgaggtggatgggtttggaatcaggggagaggtgaaatctaatgaatgggatgtgtcaaagccatggaatttgaaagaggaagaggagggagttgtgtttgatactggtggtgaagtgccgtttagctttgagaatagcttggaaatggcggaggaagagcgtgtgaagaaggagttgattgagaaggaagagaaggagcttcttgaggttatcaagggtgagacttttttaatttgttttgctgattcttaagttttgatcttatatgcaatgcaccagtagtttcgatatgtgtctagttttggaatgcagtgacaaatgggtagcaaatttgatctcatgactttccttgttaaggttagatttggatttgagggttaagtcaagtagcaaaggttgtgtaatcaatctatttataggcatgcttgctgagtggaggatatgatagtttttggagtaagctcggatgttgaagaggaataagcatttgggtagaaagacttgtgtttgaagtggatagttttgtgcttactgacgctaaggaacagtttagtgcttatgtgtttttgctattaacaatgttcagcacaataaattgaagaatttgttattttgatcacattggtaatggattctgctgctagtaaaacaagcgctagaagtagagtaattgatttgaaacttactattgcaggtcctgatcgagcatttggagaccttattgctaagtcaggtataacagatgaaatgctagatagtttaatagccttgaaagatttccaaggggtcgaaggattacctcctctgactgagattgaaaacctgcgtcgtgagaaaagttcaaagaagtcatcaagagctgagatagaactccagatgcaagaggacattgccaaagcacgggtgagacaagttgacgaaacaggtagagcctatggaactggaagaagaaaatgtagcattgcacgtgtttggattcaacctggggaaggaaaatttcaagttaatgaaaaagaatttgatgtctatttccctatgcttgatcatcgcgctgctcttctacgcccacttgctgaaaccaaaaccttgggtcgttgggatattaagtgcactgttaaaggcggtggtactacaggtaaaacctctccacaatcacttcgttttcttcgacgattagtcccaaagttctctatttacactagcaagtatgatttatgcttaagctagaggatttggtcataagttaacaaattagattgccatctctttacaaaaatcaacaattatccaagcatttccttctaatcgttgttaaccatgtactcaaatatttggtttaaaggtcaagtcggagctattcaattgggtatcagcagggcactgcaaaactgggaaccagatatgcggacatcacttcgagctggtaagcaagatactacaggcatcttagcgttattaaatctgtttagtcttattgatgttcattagcagagatacaacttattgtctgaccaacgttgtcatttgatagccggtatgtgtgttcatgtctgttgaatggattggtcttgatctcgatctttttcatcttcgatatgtttcagctggtttcttgacaagagactctcgagttgtggaaagaaagaaacctggaaaagccaaggcaagaaagagcttccaatgggtcaaacgttgaatccgaaaatgcgtactatatcttctcctttttgtctctgtcattttcattagttcgtctacttatcccgggtttagaagaatcaccggcaaataacttgttcttttggttcaatcccgtagttatctttttgtaccaacacattcttctcttacggctctactcttggaaacttgagtttcgttggtttctgagtcggacacatatttttgtatgtttttttccggcaaattgtcatgtttcttcaaaaggttcattgatgtttaaacataatgatcaactccttatatggattatattattaggtgaattttgattcttttgatcaaaatgttaaggaatgtccaattctcatagactttacaagagttggttacatttgctatatacaaaaatatctaattggataaactctattataccatccaaatatctaattacaagagtttgtgtaaagactttccataacagagcaatggatagattttgacgttatgttgataaattttattcacttgaaggttctattttgtgttacgtgcaagcatctactcattgaatttcttcactcctactacaagtactaacaaaattatcaatttcccaacaaatccatagatatcctttctctagcaatcgaagtaactattttagtttcattaaaataacatatcactcttaaggactatataataacaaattaccttcttgttgttctcagtttcttctcccaataccaaaaatattttgcttcatccaaggtcttgaagatgggtataaaagtttcatcaaagatcaaaagaattctcgcatccacaggttatattcctattttcatttttaaataccgctattatttttattttttctactgcaaatttgcaagaaaatttgtaaccaagaaaataataattttgaaactttcctcgattggtacagcttcaggtagttcaaatcccaaagatggtgctgacgtggatgtccgagaggaatatgcaaacgcctttcgtacggaatcatacaatcacttttggacacgtgtcgtacagctaagccgcaaaaagtccgcagtgtcttcttcttcttcttctccaccaatcgaatcatcctccacgtcagctcgtctcatgtcttatcgcctattcgcgcacaatcttctagacccggatctgaataccattactcggatactagatgtatcccgggtcgggcgacacacccgaactcttctctctgattacttcttggagacggcaaacgctttcttgctttgcacgcaattactaaaaaacattcatcatcttcgttctaaatacgagtctttgaaaccaaaatttcattcggaaaatcataattcattggctttaatagaccaattcacggagatatcaaaatggttcgacccgtttatctcgtcgggttctaggatccagctaatcagatccggctgtttatacttgctaaaacggctagagtcgagacgagacaagacacgagccaaacttaagcttatcaacggactaactcatagctcagggcttctcgttttggctctaaccactacattgattgtaaccatagcctctcacgcttttgctttgtttctagccgctccgactcttttagcctctcaatttaaaccagccggtttaaggaataagttaacaaaaacagcggctcggctcgacgttgctgccaaaggtacttacattttaagccgtgatttggacacgataagcagactagtgacacgaattaacgatgaagtgaaccatgttcgagccatggctgagttttgggttggtagagggtcgggtcgggttcgaggcagtgaagaagttgctcgagagttgaagagatgtgaagaaagctttagtgaagaacttgatgagcttgaagaacatatttacttgtgtttcatgactattaatcgggcaaggaatcttcttgttaaagagattttggattcggatgatccacctaattgttcattcgctcccaaatccaaaaaaaaattgtagtatttctttgtttcgttttttttctcatgtcaatttttattatttcttttgtttttgtctactacggtatgtatatatatttctttttaccctcaattatataatttttaattcctagaaatattagtgtcggaacatttttatttctatttggatgatattcggattctattagtagtcataaaaatgccaaatgcaagagtcttttatttttgggcaagccaaatacaagatagtctaaattatggaatttttaacatttgtcaaaagaaatcccaaaatccattacatatgtcggaaatgtaggaaaaccgattttaacaaatattttagacgacctctttgttttgggtaggagagactattcatcaaaaaatgaaccaaccataacatttttttttcctatatcttctaattaggtaaatcggttgactcataaaccgagtcagcaactcgtccgaaccataaaaaaacgattccaattcgacggaatctcacgagtttccacttttatataaagtcacttttgcaaatcgaacaaatgcttatagaagaaagttatcaaatctagagatagagagagtgaagagggcgaaaaatatgggagaaatcggtggagaagaactggtcttagatgtggatgagacgattttcgtcgcggtggcggaagatgtggagagaagcaaaaccacggtgttatgggcggcgcgtaacttttccggcaagaagatttgcttgctttatgttcatcgaactgctcgcgctgcctcctggagtgagatcttcttcttctctttctcactttctaaattagttctttgtgttgaattgtggtttttggtgtatagatctgtttattgaattgcaaaatttagaataaaatcgaattttgtttgtttagaatttattctgagaattctggaattttttaaaatttctgggagatattgattgtttctttgattgctaggaatatgttgagaaatgtgtaattttattctctatatgaactagaggaagataagccattgaaagtactataacattttcatgatcagtcatttaagagtttggaagaagtacacaaggagatgatgatgactataatttagttataatgtacattgtataaaacactgtaacatatgttggtttgcttggccaatctgtcttagagcttggaaattttaatttgtttgtggaagcaggacattgtgatgactttagctgctatgtatagggaaaaaaaattattgtccattgccaaggatgttaagacttgtttacctgcagcgcacaagaaacttgttggtggtagctttaaaaagcatgatgtcaaggtgattgagcgagttgagaaacccaaagtggatgaactgatgaattcttatctccaacttttatctgaaactgaggtatcaattctctcttttttcgtgtaaggttgttattgattgtaatctcacacaaactatcagttagctgttttggtgttcaagtttaattgaagtaaggcaactcattttgaatatacctgtgatcttggtggatataatttttgttcatataatgacataacctacatggaaaaaccttgtgccgtgtgcactcgtcataaatgtagagcttagaaatctttaaattattaggcattcttattcaggaatcgttcatatgataaccggattgacatagttctttttagattcaaacagataaactttgcattgcggggcaaaatatcgaggaatgtatcgtagaactaattgctcggcacaaaattaagtggttagtaatgggagctgcatcagataagcattactcatggtaagatatgattctatattttatcttatacttttcaaatgatttgacctctgaaatttagataagcaacttaaatatgtattgccaggaaaatgacggatctaaagtccaagaaagccatattcgtttgcaaaaaagctcctgattcctgccatatttggtttctctgtaaaggttaccttatctttacaaggtacgttctttttcctttcactgggttcagaaagagttgaatgagatgtctttatcaccatctttccaaagctaaacgataaagatatatctgtagaaactttgaaataatatatatcatgtcatggactttagttatcagatttagttagtctaccaccttcacttaaactgcttctattaattgtttttgttttctacttctattcgtttaactaaaagaaaaacactctaaaacagggcgtcaaatgacgatagtaataacagacaaacaatgccgcccctagtacagctggattcagataacgagacaaggaaatcagaaaaattggaatcttcttatatgaggagaagattaagatattggcgcagcctccttgaacaaggtagcggttaccttggattttgaaaggtcccaggctcccagcatatcatttcatttgccatcagttgtatctgtctttgtgagtaaatttgttacagaattgtgcagatggtgagaaagatacaggtcaactggagagagaaaaggtagaaccaagagcacctcctcttttttcatcaggttcgagttcttcctttggagagccggttggtccagagccggttagcccagaattggttgactcagatacactaaatacctcaaatgttgaggtaggaggagtttgcttcatctttacttttctactgatgatgctgattatacagtaactattagacgcataagaacgtctgttgcctgaaaagactttactttagcaaataattacagttgatggtttgttttcaaggtcttggtatagagatttatagaacatgactttgtggaaacaatttatgatagtaattttgtctgtgcaatatattgaaagatctacttaaagtgaacatggtactgtatactctccgtatgagcaagcatttgatccacctggtaatcagtgatcctgtcaaatttcaggaaaaagagcgtgaaggggatgtagcgcgcaaagttcataggtatgataaagccatgcatgatattggacaatcagatagaacggtttatggggaggctgggaaaaaatgggaagaggatgccagtacaacagaggctttatgcaaggtaatactcttattcgtttctcagttattataattgcaaaatagttctcaaagtgatagtcttggtccatttctgctagttgtaatcactaatcagtgcatcatgttaccacatgaaaaaataagctttacataaaagaaatatttcactggggatttgtagattgctagcattaggtactgaacttcttcagttgatagatcgatgtgtgtttgtggttatacattttgctgtcaaagagctttagttgaatacttgatgcctttgctggagaatcttaagctgctgcctgctggcatgtccaactcgtttctcccggcttgaatatttttttttgtcatgccacaggctaaagctttggaaggcttatgcattaaggagtcgagccaaagaaagagattggaggaattgctggaaaaggaaaagcttgaagtaaaaatggtaatagagcaaaacaatggattcatgaaagaacttcagatggttcagggtcggaatcttaagttggagagccagatgaggaaactacaagacttggaaaaagaacatggtgagaaatttgatacagctatggagctcttgaaaagtttcagacagaaaagggatgagatccggatcgatcacgagaacgcagtaaaggaagtgaacgcactgagaagactggttaaaggagagaccggagagtcttctgggtcggaaatgcttgactactcttttatggaaatcaatgaggctactaacgaatttgatccatcttggaaacttggagaaggcaaatacggaagtgtctataaagggaatcttcaacatcttcaagttgctgtaaagatgttaccctcatatggatccttgaatcactttgagtttgagcgtcgggtaaaggatcttatgtatatggaaaaataaaattgaatatagacatgtatacatgctcgagtttgttaacgaacaggttatgtgttttggatttcaggtggagattttaagcagggtaaggcatccaaatctggtaacactgatgggtgcttgtccagagtctcggtctctcatttatcaatatattcctaacggaagcctcgaagactgcttttcatctgaaaacaacgttcctgctctttcatgggaatctcggataaggattgcctctgagatatgctctgcccttctgtttcttcattcaaacattccgtgcatcattcatggaaacctaaagccgtctaagattctcctggattccaatctcgtcaccaaaatcaacgactacgggatctctcagctgatcccgattgacggattagacaaatcagatcctcatgtagatccacattacttcgtttcaagagaaatgacgctagaatcagatatatacgcgtttgggatcattctcctgcagcttctcaccagaaggcctgtatctggcatactgagagatgtcaaatgcgctctggagaacgataacatcagtgcggttctggataattcagcaggagactggccagtcgcacgaggtaaaaagctagctaatgtagccatccgttgctgtaagaaaaacccgatgaatcgaccagacttagcagtggttctacggtttatagatcgaatgaaagcaccagaagttccttcatcagagacatcatcatacgccaaccaaaacgttccacgccggcctccttctcattacctctgccccattttccaggtgagtttctatgcttaaacagagtttgatgatcatgattaaaacaaaactcaaaacatgttttgtttgttatcatcacaggaagtgatgaaagatcctctgatagcagcagacggattcacttacgaagcagaagcgattagagagtggttagcgaatggacacgatacgtcgccaatgacaaacctgaaaatggaagattgcaacctcatacctaatcacgctcttcatctagctatccaagattggcaaaaccaatggtgatttacttttgccttctttgaaagacaacaatattgctatttttaactcccaattattttagattgtcactttgtaaatttacccctaaaggtatgaaaaaatatataagcctgacgtacatgtcacagtaattattcgaaatgaagcttacttagtatccatttgtttaaacatgtttaaagttcttaccaatctttctcctttgttatacacataaattcataattgcgttatttatacgtaatacgatgtcgttccttttgcccgccaaaaaagtaaagcgttgaagatatgttttactcttttaacattgtcagttgactgttaggtaaatggcaaatcagagtcatcagacattctttgcgtcctcacctatggagaatttcatcaatcaccatcacatcatcatcacttctcatggatgttaaagataccggaatcaaccgctcggatactcctatctccgatcaagaccatgactttcgacaatggaatcactcttcgttagactctaactttctcagtctccgaagccagatattcgaagcgagttatcggagaactgatttgataagagtgaaccatgagttgttccacgagagagatgcacttaggcgaagaaatagtgagcttgaagctggaattttggaagaggttatgattagagaggaaatgaagagagatctggaagtttctaaagaaactgtcagtgaattggaaggagaggcgaaggagaaaaccaaattactatcggatattgcggattatgtacgatctatggaagatcgcttgtcgaaattaatccgatgtttaaacgaagagaatgttccagaagaggaaagagggagaaaactggaaacaaaggaatataattccaaatctattttggagttagtcaaggaggttgtaacgaagttagagacgttccaggaatctacgaagaagaagaagatggagctaagtagaagtgtggagttcttggaagaggagaatagagatatcaatgtcttgttaagagctgctttgtttgagaaacaaactgcagagaagcaattgaaagagatgaatgatcagaagggattggctttgctgcaaatcgcaggaagagggttgcagagaataggttttggttttgggttaggagaatcagtagaggagagctcagagacgggaaatatcgcgaatgaagaagaagagaatggtgtggtatgttcattactttattcacattcttgtgattctgcgttttagtatgatcaaacaaaggtttaactataatggactctatggcaagaacaggttatagcaatagagaaaacaatgaagaaactgcggcaagaggtttctcagctgaaaatatctttggaggaatcaaggtaagcttttttctcaaactcaatagatagctacgcttcgattttggtaaatgcaatcttcttattgttttgacaggttagaagaagtggggttgaggaaagttacagaggaacaagctcagaaattagcagagaacacggtgtatatcaacaagctgcaaaatcaagagaagtttcttgctcaaaacgtaatgtatttttggatcaatagcttctgtcttccactatatgtttctcaattttgtcacaaatctcttactcgagagaggcttttatactgaaccaaaggtcgaagagctagtgaaagcaataagagaagcagaatcagaagtaagtagatggagagaagcttgtgagctagaagttgaagcagggcagcgcgaagtcgaagtacgggatcagctcgtaagtttcattcactattccaaactagaacacttattatcaaaaccaatacaaacaaacataactaacaaaaggtattgtttacaatcagatagcggttctaaagtcagaggttgagaagctgagatcagcattagccagatcagaagggaaactaaaactgaaagaagaattggccaaagctgcaatggtagcagaagaagcagctgagaaatcgctgcgattggccgagagaagaatagctcaacttcttagccgtattgaacatctctaccgccaattggaagaagcagagtctacagaacgcagacgtggaaagttcaggtatgtttggtgttggccgatgtggcgttttcctaccgctgcttctactgctgcgaccgctactggaagttcttcatatacaagcaacagagcattgttacgatatgatgcgtgatctagtactgttagcacaagagttgtgtacactaaatatgaccatagaagctgaagctcaatacttatattaaaatagaaaatatatacataaatgcttgcggaaagaaaaaaatcattataaaaacactaagactttagattaaggaacaaacatcaaagagcaaatttaatatctgtagcctttatgttgttcttgctgtagaaactgtagcgtgcttaagaagtaatacggtattgttcagaaaatatagtccattttcctcacaatgtaaccaagatttagcatcctatcgataagtaaagttgaaaattttacatttcccattggccaacactacatcatagtaaagttcaagaccttacatggattcaaacacaaagtgacatggatttgaagccctgccagaactagccaactcgttgagcatctcacgtctattttctattattttgggcattaccggttcgatgggttttgtgagaaagttgctttcttcaaccgtcttgtgtttcttaggatgtatgtggccacttctttctcatctcttcgttgccattcgtatcctatccacatgaatgtctcaagatgcaacaacaaacatcccggtacacattttggtttactccatatttggtcgatcggaattcctttgtcggatatagagagctgaaaacaatgcaatttatgtaatatagatcaacaaagtacctgaaagtaaaacaaaaaaggacatgaacgactcaaagcaacaatttgctaagatgccttctcagtgctccaaacacaaacgcaggctatatcacacgaatccgactaaaagcttagagacgattttacgccataacgatgacgattcagcttctaatcgttagcaggtctgttttattctgggttcaagacaaaactgaatttcaataggatgctaaatcttggttacattatgaggaaatgtaggctgtggcgtgtttacgaagtaagaactaaagaagcttgatttatcggcgtttgtggaaacacagacgttgtcgttttcataaattagaaagtctcttcgtcagatctcagatgggcctcacgctgtacaagaagccttcaacgttacacgttctacttaatcaaacggtgtcgttttagcgaagcagaaactagaaagtgttttcttcttcttcggcggccagacacaagtccacgaacaaagacgacggcgacgacaatgaaagaagagaagaaacaagaaaactttacagtgacaacaaagaagatagcttcatcgtgcgatgtggaagcgttgaagaaatgcttagaagaaaacaaaggagatcattcaaagtgtaagtctcaggtagaagcttttagatcttcttgtgctcttcctcaacccaacaagaaataaaccctaaaattcgatttggaagtttatgagaattcctctgtaataaaactcagaccaatgtggtctgttgtatgatgattgtaatgaacaactgttttttttacacaatacaatatcattcacatatatggattgagtagagaacatgaatcttgatcattgaggtaaatctgatttctcgaatgtcaagttaccagactcgtctcgttcaaagagatgttcgattagttcgtcccaactaactctacggtttcgtcttatcctgtaagttggtttaacagaagatgatgatgatgattcacccaccattggtgcaatcgagtctgtgtcttcttcttcttcctctgtttctacttcttcttcttcggtttcgtcttcttgagttttgtcgaatgttccgtactcataggccattgactctgcgtgaggtacatctaacgttactgctcgtcttaacgctgctctgtactccaagttgtgctctctggctaatgattcttgcctctccatcctttgcttctccgggatctccattttcttctcattctccatcattagctgtagagatccgcagaagcaaattagtgtaatagtttaccggtaaggatttagcgtctagtgaggttggtgaatacttacgttgagagctctctgagcttctcgttcgatccagatgatggcgtggtctgaagttgcgttacaagaaagaacaatgtgttcgaatcttccatctaccggcactgctgtcttcacaaccggaggatatcttcctaatctgcaagaaccaattaccaaaacgtcatcttcacaacagatttagctctatcacacgatgatcacagagcaaaactatgatttgtcttcaatgtaatggcacataagacatttgatattgcaaactaagtgagattgtgggttgctttagaaccatggtcccttaagtaatatgtgtaaatctatagatttgtgtgttatgtacctgcaaggctttctttcgacgatgtgatacatgcgaccaggagcataaagccgtctaggatctttgagcatcttttgctctggaacacatgtatccttcatgcaccttatgcatagcaaacatggcaaactgtccacagacaaaaaaacaaaacccattacaaataagcagagttatggaaggtgttctacaaaacaaagtgaactaaccaaagctatgtatactaacagctgtgaaatgtgccataagagcattcaaaacatataaaggacagatgtttcgatttttttctactatactatacttagtagaccggagaatgtcgtgtgttattgctgaaagttttgaaaataacatactctgaaccctctggatagtataactgtccaaaaacacagatgattctttgagacatgtgtcacagtgattagtgagatagctttaccagaatacagacttgaatatgtcttctagaggtgtagctgtcctaggcaagaaatcatcctaaagcaaacagaaataaacaaatactttagattccacatatacaatagccaaaaacttgtatcataaagttagacacacctgaagtatgacagagttaatcacatctgcatatctaacagccaaattcaacgacatacacctcgcaggcgcaatagcgaaacacctaactctctttctatcaatattccccaatctttccggatgtcgaaccactaacaaagccaacattgtagctacaccagacccaagtgaatgtccagcaaaagtcagagtataactcggatactttttcaccaactctttcaaaactttacattcctcatctaacacataaccagcagacttcacaagcccgttgtgcacataaccaccatcaaacttcctttcaccaagcttattatccaaaagcattgcataatcactctccttagccaaattcaacccccggattgcaacaactatatcttgatgaacatgatcaagatacaatatataagctggagcacgaccctgagtgtcttcataagtcttctttagaagcaaccaatcagggttaatcccatatccttctggaggctcccacaaaggatttcgaatatcatcctcgtaaacagctaaaatataacgacaaaaccgaggaaccggttcgaattcatcagttgttgcaagtccccaatcttcactgtcgtgaccagcagtataaagacaacgtttataaccccaacgtgcacaaccaagacagtaaacacattctaaaagagggcaacaaccacatagaatcgacatgaacagatacagagttataacaacacattcatcatcatagaccaatgaagcagcacacctaacgatcaaaacataaacttttaatgtttaaacaaagaaatttcaaaactttagtacacccaactgaagaatcttgaactgaagctaaaaccaaagaaaaaaaagtcaactttgtgaatgggaaacaatgttaatggaaatgaaattgaagattgaagttctaattgctactttatagacaaaaacatgggaagaggattagatctcactacttattctatgttctcttatgaattttgttcttctcttctctaaagctcaaatcaagatcaatgatttcgagaaggaactgaagaatttgagagaagataaagaagagaagggaagtgtcttcccgtggaaaacggaagaggaaatggaaatcatgccatagaaggaagattcaaaactcgctggactcgtgttagctttgctttctttatttgtggcagtgactttggggttaaacttgcagttgcagagctactttggagcttgctgtgttgtgttgtgtgaagaagataaaatataaataatactattttcttacaaaattttggttattaatttaagagttaaatttcgagataattagtgttaatttttgtttaatttgtcccaagtttctagatttagactgaaaaagttcatcaacattacacaattacaattaaaaatgagaatttggtggttgtagtagttgtgtaacttgtttagtcaaaataaatagtggttgattttcattagtcatattattttattgaatagattccatatacagtagaaattctataaattaataatgttgggaccatgaaattttcttaatttatagtgaaattaatttattctataaattaataaatattattttacaggataaattaatatttattaatttatagaaatatttaagcaaaatataacactatcttctttcggaatagaataaatgtcaatagcctactcgaatatctaggtgcaaatgaagcatactcaaaaattcagagtttttcgaagaaattgtgatttctgtttataatgttggtgaagaacttgaagacgataatgtgaaactttcttaaatattgacacgtaaggaagcaattatcgcgtctaaaactcttcacaacttttggatgcatatcaaaaagacaacaccaagagtttttgatgcaataaagaaaattagagatgaacttcagaaagattcaaactttaagaaaaaacaaatataactaaagtcatattgtactagattacctttaaaagtatgtttaagattagtaattattgatttatgatattattgagaccatattttgacaaagagatttcaaaaaaaattattatcttattatcttatcgattttggttaatttttacattgacccgacttggaatcgacataatttattaatttatcgtgtttattaatttaccgaatattaatttatagagtttctactgtaactgtttgtaactgtaaattctgaacattaatgtagatttcaatctaaatttttatgtaggaaaaaaaattaaggaagtagtttttttcttgacaaacagaaaatcacaatggcttttgaataattctcaattaattttctttggctggttctaatttagtattatatattaaaaagaaaatcatatatagcaactgtaaattcatttaagttaggttggtagctgctaattccatctactggctttactattacctagaggtcaaaagagtcatggaaaggaaaacaagtttatacgcctttgggaccaattgcaattattttgtgatgtgtttcctattacagaacttgcaagttcagaattttcaagcactacaataaattatgcaatcaaattcatttaagtagcaaattgccaattcagcttttgttagaaaaagcctatgtgcaatcaattcatatcatttcttctagaaagtccatactattcaaaacctaagttcagcttttgttagaaaaatatatatctacaatagtataagttcaaaatgtaaccaagatttggcatcctatcgattgataaagttgagagttttacatttcccaatggtcaacaaaccatatataatatatatatgctcgagagattaaatagattcaaacacaaaatcacttggatttgaagccctgcccaaactagccaactcgttgaggatctcacgtctctttttaaaaactttgagctttaccggttcgatgggttttgtggagaaagttgctttcttcaaacttgttgtgtttcttaggatgtatctcgccacttctttctcatctcttcgttgccattcgtatcctgtccacacgaatgtctcaagatggaataacaaacattccggtacacatttaggctggatccatttttggcctatctgatttcctttggtagaagacatatttagctgagaacagtgcaatttatgtaatattagatcaacaaagtacctaaaagtgaagttttggaaaagacaaaaaaaggtagctgactagtgaaattgcttacgtcggtgagcttgaggatttgcaacttaggagaagcttcaagcatgaacgtaagtagattccaccacttccttttatctgtatgtagttacaaagataaaagctgatggaagatgctaccactaggatacttgatctgtgcatgaggtaacattaatcagtacacaaaacatttctggctcaattgcatagaaaatatgtcgaaaaactaaaatctaaaaattacctctaagggtgataagtgtatggaaagacgtttggctgaagttagagattccaaaatgttctcattttctatatcagaaacgtcactgacttttgcctcggccagttctggcgctttctcaatcagacaagagttaagatacttgaaccttcttatgttcaagtatttcaaagaaggggcatttatcacatagcagcatccatacccaaatccagaatcctctatggttaatctctctaatgatggcacggcgatagtgaaagtttccatacattctctgtatctatgtactatcaaatcccgaagactaggacaaccacataaaaggttgtaaacagagtctttgccataaaaatgtactttgtaaaggtggagctttctaagggacttcaaacaaacccgataaggaaaatataaaagaatggaatgcttgagtgttaaggtctcaagtgtcttattattatcatagatgcacaaaccactcggaaatctggctgcacataactgagaaaagttactgtaatagtccagatccaataccaaattacgcacatggcgtgcaaacgcaattccaaccaatattccaagatctgaagcatcaagttgattactaaattccaaatccaaactctctagaaacggagctttatgtaacataaaaaatctgtaaacatcctctgaaaatgtttggtgatacttagaaacaaatttgagattttgcaccgttttccaaacatgtctccaacgtttagacaaaacactcgtggctacgacagtttttgtcggaagtgaagacattatatgaacaagcaaagcttcatgcaattcactgattctgtcctcattctcaaaaagcctcaaacaatcaccaccgctttcgttgtaaaattagaacgaaagaaaaggagttttaaggttcaaagatttattagtgttagagcttacagctaaaataaaaccatagaaaggggttcgagaaaaaaaaggacataaacgaaagaaaacaacgtaccatagttgttccatcgtcgttaatagagcgagtaaaaatccttcagagtatgccttctcagtgctccaaatgccaacgcaaacgcataaaaacacactaaaaactgtagatatggtgacgccaaaacgttagcgagacagaaaacactaaaagagtatcaacagtgagttttattttttatttgggttcgatattaaactgaaatcacaagccagaaaggaaaaaaaaaaaaaaaacaaggaatgggtttatttggtctcgacccatgtgcccaatatatataagttgagatttttatgagtatttattattgtaatattttaaatgatttgagttttaaatgattatatatatgatgattttaggtgaattaaatgaagtttttattgatttgtaaaatcatgagatttagatttagggtgttattggtttgtgatttatataaactttaaatattaagaaaaaacttttgttattcaattaatatattttaagactcttttaaagtttggtgttattagtttctgatttgaaaacaaataatttaaaattttcataaatagggaattattggatttatactttaataaaactaaatcattgaaaatttgtattattcaactaaatcaaaagtatctcaaattgttgatgatttaaattattgtgttattattattcttaattttaatatttatttttagaaacccttagcgtcataacaaaattgtaacaataagaaaatatgagataatctatatcgaaattgtcttacttataaaaattatgagaaagaaagaaaatatgagataatctcctccaaagaaagaaacaatcttataaaaaaatttaaggaatatatactaacccaaggctgaaaaagaattaagaaaaacatccgactaaatcatgtctatatcctacatggcttttgtgatttggttgcccatattacccatttctaatatgttctctctctcttttccttcttcaagcaagcgataaagtctcaaaagcttagatatgataacaccaaaaccgtgaagactcagcttcaaaacgtcaaaaatccctaaaagagtaataacaaggggaatggatttgatagttaaaccctaacacaacatcacaagccgaacagaaaaaggagaatgggtgtctgtgggctcgacccaggtccaatatatatatttttgggtatttattatttaatgttcaagtttttttatttatttaatgttcaagtttctttgtttgtttgagttctttagatttttagattgtgtaaaaatgaattttcatcggtttaacagtgatacgcaaggattattgggactcaaagttaaaaggggtgtattcaatctaatattttaagtaatttgtgtaaaaaattacaaattatatgttatttaatcatgaattttaaaaactctaatgaaatacagtaattaaactaataatttaaaaatctaccttaaaattcactgttattgaaaacagtttgtggatttgattttgaaagatttgaaaggatttgaaaatacttctttagttaaaaacaatttgtagatttgatttttttttagcaccaacgaactgtcgatccactggtaaatttcaaaaacataaaataaaataataaaaattcaaatatcatagtcttagatagaatttgaaaagattttacaataaatcatcaaaatcatattaaaactcacccctccaaactagccaactcgttgagcatctcatgactcaagtcacttttccaacttttcgagcttttctataatgtatatacttcctcttcctcaaaatgtaaccaagatttagcatcctatcactaagtaaagttgagagttttacactgtccaaataccaaacatcatagtaaaaaaaaggtacaagagactagacagattccaaaactaatgcattagcaacaattagagaatagagatcacaatcaagcagatgatcaggagaagaaagaagacgaaaagtgaagtcgggacaaaatgtgaccgatggttcaaaatcgaatcccaatcccaacattattcacaaacagaagaagtcgtcctctaaatgggcttattaactcggccctttttaagtaaggctcaatctcaagcggacaacataatacttaagtagcaattgacatacccaatcaataacatcaccttgttgtgtttgactgttttcactgtctagaaaggcgttactattcaaaacctaagttcaacctttccggtttgatcaacgaagtggatggtggactagtgggttttgaaagtgaaaactcaagtttattagttcaactccatatagaagaggggtgatttacgctttaaacgcgatattatcaaccagagctccagaacttccaatatataagattgcgccattgcattttagattaatgtctatgaaatgcagaccatcttgcttttatcatttttgtgctttcttaagtagatactttggcttattcatgttacactctttttttctctgtatttggtgacaacttctatacaaaacaagttgtaagtaagcacagttttccttagctatattaattaccaccaaacaaaacttagattttatcaatatatacatttgtaactcatacaatatatataccaaaaacgaaatgaagaaaaaatcttaagataaaagtctactagatttgtaaaagttgaaacgaaagagaataaatattattcccctacaatttaactggttatgatctttttcttttgttctagcttgtttagtcattgttaagtctactccttgaattgtcttctgaatctcttcctcaaaatgtcaccaaatattagcatcctataaataggtagagctgataattatacattttccaatggccaaaacaacatagtaaaatttcaagagattatatagaatggaacacaagatgacatgaatctgaagctctggccacactagccaactcgttgagcatctcacgtctcttttcgagattttccagatcaatgcgttttgtggagaaagttgctttcttcaacagtcttgcgttttctagtatgtatgtggccacttctttctcatctcctcgttgccattcgtatcctgtccacaagaatttctcaagatggaacaacaaacattccggtacacattttggtggattccaattctgtccatctagacctttttcgatacaagatagctgagaacaaggcaatttatgtaatacaaaataaaaaaagtaccttaaagtggagttctggaaagaaagaaaaacagagttggctaataaacttgcttaccccggtgagcttgaggatttgcaatttaggagaactctcaagcattctcgaaagcagattccaccactctctttcttttgtaagcacatctaaataaactagctgatcgaagactttaccggtaggaaatttaatctgtgcatgaggcaggcaacaatagtacacaagacagtgttagtccaacagcagagataacctgcggtgaaaatcttcaaattttataatttacctttattggcgattctaaggacagacgtttcactgaagttagagattctagaatgttctcattagctatatgagaaacgtcactgatttctgcctccaccagctctggcgcattctcaatcaaacaaaaatcaagcccctcgaaccctacaatgttcaagtatttcaaagaaggagcatttatcacatagcctcccttacctcctcctatgcaaaaatcatatatggttagtctctgtaatgatggcaccacaatagtaaaagtctccacatcgacattgcgttctctatgcacggacaaaacttcaagactagggcagccgcataaaaggttgcaaacagatgcttcgtctttgaagtgtacttcgtataggcgcagctctctaagggacttcaagcaaaccggagaaggaaggtctaaaagaatataatcctggatttccaaaatgtcaagtgtatcattgaagttaaacaaagcactccgaaatctagccctcttatcacgcacatcaccgaaactaaccaataccaatttacgaacatgacgtacatatgcagttgcaatccacattccaatattcaaaccatcaattccacgtgtgaaattcaattgcaaactttctagaaccgaagcttcatgtgaagtcaaagacctgtaaagattctctgaaaatgtttggtgatactttggatcaaacgtaaaatcaaacgtgagatttggcaccatcttccaaagagatctccaacgtttagacaaaacactcgtggctatgacattttctgttggaatatcagacaatatctgtagaagcaaatcttcaggcaactcactgattcggtcctccttcacggcatctcgaatactcaaatttaaaccatcagtttttctgtcaaaaatcaaaggaaaaaatatatataagaaatttagggttgaaaaaattagggttggatctttcagctaaagaaaacattaacgaaacaaaagatatatacaattgctgttccattgttgttaatagagatttaaaaaaaaactctctagtctctaataatccttcagatttaatgccttcccagtgctatcggctatcgcagtacgacttcagcttcaaaagtaatgacttgtgttataaaccaaagtggaaaccctaacagagtatcaaaactaatgcattagcaacaacacttagacatcacactccagcacgtgatctggtgaaaaagaaggacgactatcgacgagtgactttacgtatgagagaccgatggctttttagggttgatttaaaaccaaatccaatccagcatattcagaagcagagtagtcttttctcatgggcttactacttggaatctatatatacatttttgcagccatttttggcttttaattattgatttttttcgaacaataaattgattaacaaactaaaaatattccaatctcatatgtcacgcacacagtattcagcaactatttaaaacaaaaaaatgtttgacaaacaaaaatataattgtaatcccttaaaatgagcaaaacacacctaaatacattctttatctatccaataaatcttttttctccaaaatttgaactagattttggcaactatttaaaacaaatatttgtttgacaaaccaaaatacaattgcaatcccgtaaaaatttattttaattatatatttaaattagcggtgtaccgcgggttttttttacaggacggatttgacgagacgggtttggcaggacgttacttaataacaattgtaaactatacaataaaaataaatagatttaatttgtaaacttttatatatactaatttaaaaaataaattgtccccgcgatataccgcggattaaaatctagttttaaagtaatgctcaaacccacaaaaagcttctaggactttgcttagtggtttaattatgtcatctgcaaaaattgacaatatttaataaaacaatttttgtttttaacttattaaaatttaatatttaaataactaattcaatatttaaataactaattcaatatttaaaatttacatctaaatattgttatgcttacatatatattaacttacataattttaataccaaagcagagcaacttgtatgtgtcttaatatgtaagttctttttttttttaatctgctctgttcttaactgatattcatttgtagttttttttttttgcttcgtagagttacggatatacgtattttttggatgaaatcgaatttgaccgtattttgccatgacctaaactactatatctagcaacttgaccttccgaaatgcatcattttgcagtaaaagtaacgacaaaattcatgttcacttgataacaaagttgattacttgacttaaaattaaaaatattaaaattttcaaaaaacaattttagtcgttaatcactgaaacaaataaccaaaaattgtgaaactcatcaacattttctataacagacttgctttcgtataaaatcaatcccttaaaattagcataaacgtattttgttaacaatattttaaaacaaagttttttgtttaaataaatattgttcttactaaacgtttgttgtttaaataaatagatcatgtatttgaacttatttacaatgtcatgttactaacattaattatttaagaataaaaatatttaattaaagatttaattcttctaaattcttgcttttagagttattatatcattacctaaaatgcaaaaaatattaatttttaaatattattatttatatatttaaacttcataaaacattattaatatttaaatttataaaaagtttaatatatcaaaaatatttaacatcattatataatatatagagttttaaaaaatctcaaaaaaaagttggtcatattttgtgattcgaaattttaaaaatgaacatatattaaccaattggcgaaaaatgtgtggatacaacgtcccggaacgactaaaatattttgacaatgattcataaacatattataaataagatcaacattaataaaataaatagttttttttgtggacggatttggcgggacgggtttggcaggacgttacttaataacaattgtaaactataaaataaaaatattatataattagatataatttacaaagttttatatatattaattttaaaaaatgaattgtctccgcggtgtacatctgaaactcatcaacattttctataacagacttgctttcgtctatcctaaaactatgcaacttttgtcttaagtaaaacctcttatgattccaaaacatttgagaaaaccaataagagatgttatttcttctcttaactgcttatgctctattcctcttgttctaccttttattttctttaaattatctttagaatctcttcctcatactgtaaccaagatccagcatcctatcgataggtaaagttgagttttacacttgccaattgccaaacattagaataaaaaagttcaataggttactcggattcgaacacgaggttacatgaatttgaagggctggcctgagtagccaactcgttaagcatctcacgtctctttcccaacttctcgagctcttcagatccgatgggttttgtggagagagttgctttcttcaagcatcttgcattcttaaggatgtatgtagccactgctttctcatcttctcgttgccactcatatcttgtccacacaaatgtctcaagatgaaacaacaaacattcaggaacacatttgggtcgactccattcccagcccaccgaacaatcttctttaggaaactgatatggctgagaacaatgcaattaaaatatttgaaagtagagctcactggaagaaaaacaaaatttagttgactaatgaaatggcttacatcgacgagcttaagaatttgtaatttgggagaactatcgagcatgaaccaaagtagattccaccactcatagctatatgcacgaagctccagcgataaaagctggtagaagattttaccagtaggatactttatctgtgcatgaggcaacacagaacattaatgttagcccaattacagataaaccccgtgaaaatcttaaatcttaagtttaccttgaaaggtgctaagtgtaaggaaagacatttggctgaagttagagagtccataatgttctcattggctatttcaaaaacggcactaattttagcctccactagctctggcgccttctcaatcaaacaaaactcaagaccattaaacccgtcgatgttcaagtatttcaaagaaggagcatttatcacatagcctccaacaccttctccatagtaatcatcatatatggttagtctctgtaatgatggcaccgcaatagtataactctccacatcggtcgtgctatgtctatgcacgaccaaatcttcaagactagggcagccacataaaaggttgcaaacggattcttcgtcgttaaatctcacatggtagagatacagctttctaagagacttcaaacaaaccagagaaggaaaatctaaaagaatgcaatacttgagttccaagatttcaagtgtatcattacaactacaccaagcactcggaaatcttacaaagctttcctccagcaatgtaattttcagtacaaatttacgcatatggcgggaaaatgcaattccaatcaatatcccaacatccaaagcatcatccttatcttcaactttcaaatgcaaactatctagaacaggagctttatgtgaaatcaaagacctgaaaacattatctgaaaacgtataatgataatgatacttagaatcaaacttgagatttggcaccaacttccaaagagatttccattgtttagacaaaacactagtggcaatcacagtttctgttggaagtgacgacaatatgagcagaagcaacgcttcaggcaactcactgatcctgtcctcctcattcactaaacctcgatttctcaaaccttcaccaccgattttgctgtgaaaaaaaaagtcagaagaaaacaatgaaagggattccgagaaaaaacatagacgaaacaaagaaacataccatttttgttccattttcgtttaacagagacatcaattttgctaaaaatccttgagattactaacacttcaacctcaaatgcaaacgcagccgaacacacagaatccagctagagcttagatatgataatggtgacgagattcatcttcaaaattatatccacttgtgtttgattagtaaaagaatcacctaggctagatacaaaaccctaacagaataaaaacagtgatcaaatccgagccggatcgtttttttccaatgaaaccaaaatccaaacccaagacatttacaagcccaaagaataaaaattgattttttttttttcggcccaccggcccaataacgaatagttaaactgagtttaggtcttcactatttaaagctcgtaaaccctagacttggatatacttcagtctagagccgcgcaagaagacgattctctctgtgagttttcgctcctctctacttgtcgtctctctgattatcttcgttgctactgtctcgttttgtgtataagtagggttcttgcttgttttctctcatcgtgtgttctgctgctagctcctgtagatttttctaagttccttgttttgttcatttcgagttttattgatctgatataaatcgtccgttgatttgttattttgttatgctttattgattttgcagaaagtatcgtccttggaatgagtaatattacactttcagtgatgaaacttttcgtttatttgattggttttgataacatccttactgtattacgactgttaatgtaatgtgcatacaaactctcgaaactttgattctttaagagtttgagattgtcacaagtctcacctttagtatagatttaataagagtgatctttgaaatacttcaagattcgtatctgttttactctatttatgttctctatatctttgagatggtcttttgtttttgaagtttgaggttttatcatttgatttccttgagctgtttaaagtttcatcatttgatttaaagtgtgtctgattgatgttttttggcagcttgagttgaagaaatgaagcacaacaatgttatccccaatggtcacttcaaaaagcactggcagaattatgtcaagacatggttcaaccagcctgccaggaaaaccagaagaagaattggttagtagtagtaatgtcaacacttctgatattgtcatgtttcgttttaagtttacactacaatctctttgggtcttattatgttatgttgtacacagcgaggcaaaagaaggctgtgaagatcttccctcgtccaacttctggacctctccgccctgttgtgcatggtcagactcttaagtacaacatgaaggtcagaaccggtaaaggattcactcttgaagagctcaaggtttgtaatttctatctctctttcatttattcatataactatcaagtttcatttcttgctatatatcgatgggattgttggttatgattattgaacttagttggttggattatctatttgtttacatatatagctatcgtgtttcatttcctgctgaacattgttgtgattgttgattgaaattggctggatttttctttactatcggtatcatgtttcatttcttgctgaacattgatctgattgtttgattaatataggctgctggtatcccaaagaagttggcgcctacaattggtattgctgttgaccatcgtcgcaagaaccgatctttggagggtcttcaaacaaatgtccagaggctgaaaacctacaagaccaagttagtcattttcccgcgtcgtgcccgcaaggtcaaggtaatcattataaacaattggtctatggttcagttgtttaatgaattgttggatttggtactgatttcgtacttgttctgttttcgtttgtgtgttaggctggtgactctacaccagaagagttggctaatgctacccaagttcaaggagactacttgcctattgtacgtgagaagcctaccatggaactcgtcaagctgacttcagaaatgaagtctttcaaggcttttgacaagatacgccttgagcgcactaacaagaggcatgccggagctagagccaagagagccgcagaggctgagaaagaagagaagaagtgaggtcgttcttcttaggtagaagaaacttttatcttatcaacttttggaactgaattttgtgtatcagactgtcttttctttcatcagtttttatccttaaatctttgattttgctgctaccttgcttctcttgatttatggaaaagaccgtatctcacatctctacttgctatagtttcctcttatttcgtatgtttttttctctatagtctaaaaatttaagcctaaattgacacaatcgaaaagcatctctttaacctgcaaaatagacatagcagttcgtctgcatttgagcagttcaacccgttatcatcttccaaccttacgctgtcttttgtaatcatgattccttatggtcacaattgacgcttctggttgcttcctttataactctgcaatttcaaacttactaggggtagatttaacttcatgttcatggtttggagtaattcttccttgttgacttgtgggattggtgcagcaacctgagtaaagaaacctttgtatagaagattgaacatattgaaggggagtagccaactgctatttgctcatagttgagtggaggagtatcaggcaggggaggttgggaaagagatgtcagaattctgagattgagagttctcaacatgtctatgatgtttacatcaatattatttcatatcttccggattattgaaaacccatcgatctctcctttggacagatagaagagaacacttttccatgaactgtctgaagctgttgcactgaaggattgagaggtcaggcaatcagacttaaacgactcttttttttttttttttttttttttttttttttttcaaactcagacttggacgactattaggcttcattagactctgtatcaccaaaacccgattttgcaattcatcccaaagctcatcagccatagaccatagtaaaggaaaagaaggttttctgatagagattaagagtttgaaaacttaatctgaagtatataataaacaacatttctctcgaaacagtatcaattaccttcaaagttacaacttctcattatgtcaaaaaaaaaaaaaaaaatgctagaagacaatgtgaactaaatcgaccaaaagaaattagtttttgaatgtatgagtttaaaagtcatgaaaaagcataatggcatcatcaagtttaaacatagtggaagagagtaacagcctcttggctttgacctttttcagtctctcctttaatggtccttccagtttatctaatggcaacaacagcaactgccacaaaagcaataacagtttttttagtatctggaccatcttgaaacacatttgggttaatcgatttgcagtgtgactaacctctttttcggcttctaactcatgggccaacctaagactcaagttaagggacgcatggtacatctcatccaacatttgagttgtcacaatcaacttgtttaccttccacaacagaaacggtgtatacatacccggagctgtgaccgccaatttctacaaaaatgaacagaagataacaacaatgaatctcgtaacaaccaattcgttttacttttgataatgatttggtttccaaactgtgaatacctgcatatgtaagtatccgtctttccacatctttaaaaggaattgcggtgtatctttcttttcagtcagcgcggcatcagcaatcttacagagagaaaaaaatgatgaagttaagaaatcattatgacttaagatgtttctatatgaatcataaagaacagtcattaaccttatcggtctcaacaaaacgcccttcctgtgataagtatctgaacattctgaaagcttctttcccatatcttctcatcactactgcctctatctggaaacatctcaaagataccgtttttagtttcagaaatatatcaagaaaagaaaaatatgaaacgcacctcatctttctgtgctacgctgataatggatttataatctgcaaaaccaaataacaaaataatattattttgaatacaagaatcatttgactagattttgaatggagttactataccaactatgtatgaatcattcacttcgttcacaaatgctggtagataagaagacgtagcactcaattggtcaaggcatgcttcaactcgctcttgtaacatagtgcgacctgcttctgtcttaataacttcttcataaatggaaccaactgacattggagctgtttcaaagattatagcaaattcagttaacagaacttcataggtggacttttggtggagagtgcaaaataattcacaccaaatacaattttaacttcagcatattatgattatgttaagatattgaatgaaaatgagtgagaaactcaaatattacccgaattgtctgttttcaccttcttctcttgcgatcttcctacttctaacattgccctcaagacaatggcacatccttcatcccggcgctctttcactatctccacacacgccttaaacaaagaaacaagtggttaatagattggaacagtaagacattcggaaagcaaaatttgaaatgccaatgagcttttttcctcatcaaacaacctcaaaagagaaacacggataactaaccttatgtctaaggcggtggatgaactcctcaaaattaggacgccaaattactccactgctcgaatctgatgtgtccacatcacgttgtttacgctaaaatattcggttcaatgagaaacatcaacaaaggtattcagagctacatcattgaaaaatgtatgattacaagattggttatggtacgaatgttgataccttcccctcagtgatgttgctattgtcatctgctaaagatgaattggaatcttcttcgaatataagtggaaaccttattgcgtcaactggagttgctgcttcaacaacttgttcctccaaggtttctggttctttaagaatctacaccgttccaagagatttattaatatcgaacagaatagaaataatatcaaaactgagagtcatgtctctgcaatttgtaggtctgatatatcagaccatgtataggtataccaaacaccagaaagaaattatcaattaccttggcagctttagcgcctcttctctttgccggctctttttctttgtttccaagaacaggttcgggagaaggaatgcgctcaacaaaacgggcagcaaccaatttctgaagagaatctctgattgcttcagaacctatcgtatttcctgaatctgatcatgtatgaagaaaacatatataacagcatggaatccattccgctcgaagcattactgtaatcaaaacgagatacacaaaggccaaaagccaatgcctacgatgacgagtgtaaactgtggtaacataacataagaggtacatatgatatcacgactcacctctatctctttcaataaactgtcccaaggtaagcctaccgttactaagtaaaccatcaagaactgcaccgcactaaacatataaatcaaacaaaagtataagattagcattagagtcttgaagcataaaccaactaatcaaaacactgaacagagagaagaagaagcacgattaaaccttggagtcaagttcttcgtttacaatcctcgaaaacttgttatacctcacacgatgcagaatgttgttaaacaacacaatatactgtacaatagctttgctctcagaaccatctacaaagtaaaaaaaaaaaacatacaaaattactttcattgagttctctatttctgtgtgttgctactaatcaaacaatatagagactaaccaggaggttcaatggagaaagcttgaacacaattgtgctgaatcaagagatagagaatatctttaactttgttatggttgatatctgattcagctaaacgagagatgtctcgtgaggaaagaggtcctttacgtagaagacattcacaaactttctgcaaccaaaaccaaattcgttatacagagattataaattcaacacaagtctcagaagggtttctcaatttaccgagacgacggagccgaattggacggtgatgatatggatggcgtagacaatgccaaactcagacatagacatgagaatcaatcaccaggaagtctctcaatactgatgaagcagcctctgcagagcttgacggagttatggccgatatagagatgtttgccaatcgattgtagcctactactactaaaaagcgaagcaatcgtaatctagcgaccctaaagtttaatttttccagcgatccacacgttcgaatccaaaatttcgataatctaacatgaacccaccaatataagtataagaaaacaccaacccagggctagggcttttgttttttataaggactcgggccggccttaaatatttagcccattttaacatccctaattgtaggttattaattgttggcctagagaagtttgggcctatcaggccctaataaattgaatgtatggtttgacccaagaaaaaaaattagtgatggaacgaaatgtacttgagaattttcaatgattgggccagatgacaatgctctacttaagaagaacaaacacaaaccaaattcttctattgtatttgtatgtgacggcttacatgaagaccatgtttttacttagttaggagaatggaaaatgactttttcagcttcatgaatatgacttatattttaaaacactgtcgttttcatctatacgagatttttgtatttctattcataatcatatacataattttaatctttaacaaataacaaggtaaactaaatctttgattagtaaattctactctgactctcttctaagctacgcatgtttagtggtttaaattagtttcattgttgaataattatccaaatccactattgtttagttagatagtgtgcatgtatcaaaccaaataaaataatataataatttgtatgtatagacaaaacaaaattgattacttcaaaaagatatatgtctcattatatttagtcttctactttttttctataaataatatatttattcttatcattcaaagtcatttttaccatttcttattttaattttacatttttaccttggtcaatttaatttattaacaatcaaaataaggacgttatcttctatttataatataaagtataaacaacgtcaagcatcttcgaaacgtgataatcctagtcaaagacacatgtgcaaaggccctaaaagtgattaaacactcataggctatttttttaatgaaactattcttttgtttgataatacatacacaaactatttcaaattcctatgaaataattcataaaccgtaaattactatcgcatgcttgccgaaaaaaaatattttcaaaagttaattaactagccgtttcggttcagtgtttgtaccggaatcgaaattaaaaaaaccacctcttcaaaaaccgaaacgtcggtctaatcgtaaggatatatatcagcgactcccaccgttaacaaaataattaaaaatgaaaacattatgaccacacgatcaatagaaaatccgctacgatgataacacgtggcatcatcttttagccattttttgcttccacagatactgtagtaattgaatataaatttataaatatcgcatttgctctcttctctgctttcacattctctccttcctcatcatcgttactctcgtgtttatctctccgacgtaaccatggatagcgatactctctcaggattattggaaaacgtcgccaaaaaattccccgatcgccgagctctctccgtttctggaaaattcaatctcactcacgcgcgtcttcacgatctaatcgaacgcgccgcttcacgccttgtctccgacgctggaatcaaacccggcgatgtcgttgctctcaccttccctaacaccgtcgaggtattttaagaggttttcatatatttcgatttaaaagcttcgtttctggttttgttttgcgtgctgaagaatcacatgggaagcagaatttatgaatatctgtaaatcgcttcttaattgagaaattttgatttccggattcagatgatttttttggatgaatttggttttgattttttttttttgttttcagtttgttataatgtttttagcggtgataagagctagagccacggcggcgccgttgaacgcagcgtacacggcggaggaatttgagttttacctctccgattcagattcaaagctattgttaacctctaaagaaggaaacgcaccggctcaagaagcagcttcaaagctgaaaatctctcacgtcaccgctacgctgcttgacgctggctcggaccttgtactatccgttgcggattcagattccgtcgttgactcagcgacggaactcgttaatcacccggacgacggtgctctcttcctccacacttctggcactacgagccgtccaaagggtgtaccgcttacgcagctcaatctagcttcatccgtcaagaacattaaagctgtgtacaagcttactgagtctgattctacggtgattgttctccctctgttccatgttcatggattgttagctgggttgcttagctcgcttggagctggtgctgctgtaactcttccagctgctggtagattctcagcaacaacattttggccagatatgaagaagtataacgctacatggtatactgctgtgccgaccattcatcagatcatattggaccgccacgcgagccaccctgagacggaatatcctaaactccggttcatcaggagttgcagtgcttctttggctccggtaatgctcttgtttccagtcaattgttgaggcgtttgtaatgcacagtgttttgtaaaacgttggattgctttggctttcaataacttaatgacttattttgtcttggtttttgttaggtgatattgtccaggcttgaggaagcgtttggagcaccggtgctcgaggcctatgcaatgacagaggcaacacatttgatgagctcaaaccccttaccagaggaaggtccacacaagcctgggtctgttgggaaaccggtaggtcaagaaatggcgatccttaatgagaaaggcgagatccaagagccaaataacaaaggagaggtttgtataagaggtccaaatgtgaccaagggttacaagaataacccagaagccaacaaggcaggtttcgagtttgggtggttccacactggtgatatcggttactttgataccgatgggtatttgcatctggtgggtcggatcaaagagcttattaaccgtggaggttagtctcatttactctattttgatggctttactgtttcacaagaatactagtctatgtctagcagtttatttgtatagtctcggtggaggctactttgtgcagtactatgttagacttgtcaaagaaaaccctccaacaaattagaaatgagacaagacaaagaaagaggctactttgtgcagtatcatgatcttttgtatgaatgagttagattttctatgtgtacttaattataatctatttcaggtgagaagatatctccaattgaagtggatgcagtactcttaacgcatcctgacgtttctcagggtgttgcattcggtgttcctgatgagaaatatggggaagaggtaaacaaaacctgtgcttaaattgtctctaatttgaatttatgaattggtctcccttatctaccattatgtcctgcagaatcatcaaacatcatgtgaacttacttatcaatgagctgttaataacgctgtgtttccctggtttattggtttatcagattaactgtgcggtgattccaagagaaggaactactgtaaccgaagaggacattaaagcgttttgtaagaagaatttggcagctttcaaggtgccaaagagagtgttcatcactgataacctccccaaaactgcctctggtaagattcagcgccgtatcgtcgcacaacatttccttgagaagccctgaaacacacagaaaacaccatcttgctcgaaaatcatcggtgatgagtcctagttttcacttttcacgcaaatggatatgcgttctctattattggttcttggtttaaaagttactttttatatgtttcatggtggtaaaggttatagattaaatcacaaaagtggaaataaaagtcgataagtgattattgaagtacaacaataaaggagagtttctttttgttggtgttgtctctgcgtctttttgttactgatgctcttgatctaatggccaatttgacaactaaaagcgtactgccaaaacgggtaaagccaaaggacaaatattacattgtcactttttaaagcgtttggttcgttgaacaaaccgaccgtttagtgggacaggtagactttcactatgtcccaaattatgttccattccatgttatagctaactaattctgaacttgagctccaaatttgaattttaaagttaacttttgtgatagaagaaaaaaaaaaaaaaagttaactttgtgatttcaatatagaactcaatacgaggataaaacatttaccataaggattttcctagattcaggcatagtcatagagatataagatcaaaccgtacaaaacttatttacttttattaccgattaaaactttgtatcgtcgaattcactagacagaatggattagttaaaattctaccaaaaaaacggagaagaaaataaagatcgcatgttttctaatttatactactcgatacaattctgacaagtgcttttactctacacaccaaaactttatacgccaatctaattttacgaaccggtcttgttctgcttcctccagtacttactctcccactgttcgattctactagtcgtactctgtctccttttcaaaactgaataaaatgatgccggatcatacggaggcggcatggcgcagggacctgtctcagctgggcgttttacgagtgattccatcataaactttcgttcatttccatccctcgggcatgccattgcctctgagcagagctcagtggagttctgagggatctcgggtttaaaccggaggagtttagagtattggattaagagatgaaacatgtaatcgtacacatagtccatcttgagttcttgttgcacaaactcacttgccttcttacctatgtcttgtgcctggtaagagaaaagaacggtgagagggtaacattaggagtacttatacccgattttcaatcaaacattcatgaagtgcaactaatggtgtgaggattcacaacctaatgtgtgttaattgaaataaatggacatgtgtatgtgtgtgtgttggtgtagatattataagattataccgagtttgagaaccagttattaacacagccccagagtaattcgataacgttttaagtaatatcatacctttcgcatatgcaagttgccccaatcaacagcgaatttgatggaacggcatttgtcgtcctccttgacaggccagtaatggtgacctggaaacatacctcttgtgaagaaatcgtagtaatgaggtttcaccattaatgtcaccgagtcacaagccagaatgtacttctcactcaccgaccacgcagacccttctatgtaaatcttgtacctgcataaggtatttcttagaactccaaaagtaaagtaagggtccctctaaaagtttttgtgctactactactacctgtgatggcattggctcgccaagtctgactgcttgtaaccttcctttgattccttgacccagtcctacaaaaacacaccaatattaagaacatagagaagtactaaatacatattcaccaacaccacaactccaaaactccaaacttttgcaccatagtacatcaaccattaagaactaaaccaacaatatcaactatagatccaactcgtgttgattagtacatacatcactgttaatgttctccattaaaaagcttttagatacaaatgttcagagatccaagatgccaagacaagacacactaaagttgctcaacctttcaagttagcacagcagtcagcactagagtctacataccgtttaaaaaaacttccttttacgtaatgcagatgagtatcaagcaatgggaatcgaatccgagactctctaaacaaattgaatcatagagcaagagcatagagtcaactacctgcttgtacaaacgagctttccagtcatacacctcggagagattacatttcatgagatcaagtctcgtctcagcaaccgttggattccctttccagtaagcataaggctctctatctatccatttagtcctctggtttccttctcttagttctttcaacagactttcccatggctttatattcacctcagccctacaaaaccaatgcaatcctcaacactaacctatttgcatttaacattctctaaacaactctcacagctatattccttaagctaccaagtaaatttactatggtctgtgcggtttcatttgtcaaatctaaaacttcagtggtgaaattgcaaaaccctataagttatgggtgcttgaagaagaagcaattaccatccccaataggaccaatcgggaaatacaatgtcgagcgtctcgtcgttcgcgcaataacggaacaatggcggcggtggaggttgatcaactccggcgaattcagccgccttcactaccggccagtcaacgcagtcaaacatgagctcgagatccggaatctttcccggatatctccgtaggagctgtacgaatccccagatcgtgaacacatctcttgtctgaaaagcctcacgaaatttctcgacgtagattctcccgttgataatcgccaggcggaaaatcgccgtcgcattggctcgctccaaggcttccctcgtgatcccggtcttctcccatggccgtagatcctcgtgaatccatcggaagtaatctgggcacgtggcggatggagaacggtcagattctccttctccggcgctagatcggaaactcgtcggataattgtcctttgggcaagttccagtgtcgttgccggagaaagcagcgcagtttagcgtaaactcttttggtttttccgtaattagcttagtcgactgagggtattctggggattgagtggtttctctctcagtcacggacaccgcttctttctctatcaaaacctatagacgaaaacgaagtcgtttagcaaaaaccggtagttagttaatgactaaaaacaatcacgtgattattaaagctcccgtgtagacacgtgtcaagcgtaggaaacttgtttgacaaaaaagtaatggtgacacgacaaattaggcgcgaacgagttttagcgccactaataccgtatacgacgtggcaaacgacaaacgggactgtcgttttgatgtaattagaagagaacacaagaatctatttatagtaagatgttcgtacggagggatcgaggaggaggcgcgtggagagaaacgcgccgaggaggaggaagagaaagatggagaagaaggcgtaggatcggttagaagcaccggtgccggttttgacgagtggagacaaaatggtgtcgaaattacgagagtgcgttgcagaggtatatgacggcgagttcctcatcatctctccttgctgttgcatgccaatttgataatcaatgatcgtgaaacgaaagatgaagaagagagatgtgagagagagagagagagagaaagagaaaaggagagctttttgtgtgtgagaaaaggaaaggacagagaatcatgtgaaccagaataggaaaaggtttggtttataactaaagtgttttaatgtttgcaagacttttgatgggtgtgtcatgttgtgtgtaccaggaataaatgtttaaagtttctaggtgaaatgtgagacacacaagtgcaactcttctaattgtttttgtaagttattcggtaaataacaaaggaaaataacagaatcgttactataaaatcctgtttttttattgctttacacgatttataagattcgaaaaagtttaagatatatttgataagtagtatttttgaaaaaagtactataaaggacattttctattaaaaaaaaacttataaataagatgaattttgggaaaataaaaggcctaggacgacgccaagatcaaggactaagcccaagcccgaaatagaggtttttgtaataaagttttgaaataaattgcattttgaggcaaagatagacaatctatcgtaattatccgaaccaatcaaataattgacatagggacatcagtaatcatgtatcttcttttccggttaggttcatgtttaaatatcagttttaaaaagtgacaacaactaacaaaccgagcattgatttggaccacaataaagcacacatgtgatttagagaaaatggaccctttttgtttatccctttttttaagtgattagttctactatatcatatagtttcgacgattttgttacgacatgacatttgcatatatagagctgtcttggtcggagttcactgttcaataaagggtttaggctttcgtggtgcggaagcttaatatatcacaataatcatttttgtgtgagaatattcgttaccaatttcaaagttaatggatcattataggtctcatatatttaggaatatgtactcgtcatttgaaaatatcatcgtcttgattcttcttaatcaaatggaaacagaatgatgaggaaaaagcagctaataccaattatgatggattaacaaatctttttaggagtgtcctctttgacatttttgaattaaagctcatgcttcagaaaatatccatgtccctaccttaatcacaacttcacatcaaaaatctgactatacgctcttgcttttacattttcacaataatattcacaaaaaagttgattaatttcatataatactactatcaatgaaagtcaagtatcgaaattcaaattctaaaccgaatcctcatcatgtatcaaaaaaacctttaatggttattcaaaaagttcattgtattatcggaaaatttagttactcgaaacgatctttgatatataattttctttatcaaattatttcatcatgattcatgaatcatgcctccaagaaattgcatttaatttaataaaccaaaaagataatgtagtttataggtttctcgatttttgttattttcctaaatgagatttctcaattatttcattactaaagtatattaaaacatgataagatatttgaactaaaaaagtgaagggttcacgaaagctttgcataaatccgtattttcatattagtttgctttatagtagggactgcttctattatcattatcaattaaccatttatcggtttataaatttgatgcctaacttaaattatatttgttggcaaataaaatagaaagtaattggaagggagtgagagcgatatgatttggggcagagaagaaaacctaaagctcacactcacaccttttttgttactatttcacgcgtgctatgctcttcctttgtctccctatttcacaacccaagaaccctttccataataacttatactatcataaaatatgaaaatactaatcaaaatattagtagtatttattcacacacatatacataatcgacctatatatatagacacacacacttaggagactttgtgcactgcttcattctctataaccaagtataagcttggagggggttatttttctaaaagggattgagtttttaagatcatgtctgtgagtatctctacctcactccattcttcttacttattgccctcggtttacaattcacacaaatatttcaatagatatagagcttgaatttgtaatagctgaaatgtgtgtttgtagatgacagtggagataagagttccaaacttggattgtgaaggatgtgcttctaagcttaggaagactctactcaagcttaaaggtattgaaagcttttgagttttaaatatgtttcttcttcttcgttcaatctaagtattgagtgcttacacaaattttggtttggttttgacttttaagatgttaaccaaagttaaactatctgttatttttatcaaatatttcttaatttttcaagccaatatatgttttattaaagatttttcagtttggtatgcttttattttcatttttgtagatatctaaatttaacatctcaaccaaattcttaagaataatgaaccgattcaaatggaacatcaactttccggttctttcacatggtcagatggtttaactaatttatccggttgttattggtttacgtacaggagtggaagaagtggaagtagagatggaaacccaaaaagtgacggctcgaggataccggttagaggaaaagaaggtattgaaagcggtacgacgtgccggtaaggcagctgaactgtggccataccggttaggtaatagccattttgcctctttctataaatatccttcttacgtgaccaaccactattactctgatgcacaccgtacggatcccaccggtggtgtccacactttcttccacactcccgcggattactcggttgctgtggctggagatgagatcgcggcttcgatgtttagcgatgataatccccatgcttgtactattatgtagtcttttagtatacaaaaatatgttttcagttcatcttcttcgtccaaatttgatttgatgtgattttttttgtacaactaatgttggaatgagaaagtaaaatatatatgttgtgttttagtctgaataaattggatcaacatgatctaaacaaatacaatccgattcaaaatctctttcatacgattaaaatgatttgtagtttttcaagatccgaaccactacgaaactgaaattacaagaccgtaaatgatttctaagcctctctttaagtgtgctaaaccgaaattagattacgcagggaaggttttggttcaattcaagtaaaaaccggtacaagtgaattagagaggcaataaccaagttggtcagggaattggtggaagaccgattggtttcctaacgacgtcgtttcagaagccaataaaagaagctcatatataagaattagaatttagggttttttggtaacgtgtgagagaattctcttttctctacgagttgtctcgggtgagttctcttctctctttcagggtttttgaagtaaataagaccgagcgatcgtattattcgttttcgacttcatcttaattcggtcttccaagtttgtattgtttctgtaattctctctctctttcatgattgcatcagtgtgagtctgtgataatataataagcgtttttctgagttcattgatcggttgtgtgttctgcgttagaatttcattaattgatgagttttttgtttgtttgtggtgtgttttgctaacaagtcacacctttactatagttttaataagcgtcttctacaacctgaagatatttctattttctaatctgttttttcttgtttgatgttagcctagctatagcatttagatggcttttagctttgtagggtgaagtcataccatttaacttctcttgagcgtaatggtttaatgcagcactattcacatgttggtggttgttgattttgcagcttgacttgaagaaatgaagcacaataatgttatccccaatggtcacttcaaaaagaagtgggaaaactatgtcaaaacttcgttcaaccaacctgccatgaaaaccagaagaagaattggttagtagtaatgtcaccactactactgcttttgctatcttaatgtcaccactactatatttttttttggttttatgtgccatggttttattagaagttttaccataatcccatctcaatttgattatttggtgtgtaatgtttactcagcgaggcagaataaggctgtgaagatctttccccgtcccactgctggacctatccgacctgttgtacatgctcagactcttacgtacaacatgaaagtcagagccggtaaaggattcactcttgaagagctaaaggtttgtaatatctctctgttcttcattagcttttgtgttttgtttcttgttggatatcgtttaaattgttttttctttctgattgttgataaatttaggctgctggtatccccaagaagttggctcctacaatcggtatttctgttgaccatcatcgcaagaaccggtctttggagggttttcaaaccaacgtccagaggctgaaaacctacaaggctaagttggttatcttcccgcgctgtgcccgaacggtcaaggtactccttcgcaagcaactggtttagggttcagtggactgtatgaatggaatggatttggatatgatctctttgttgttatgcttttgtttgtgtttaggttggtgattctgcacaacaagagttggccaatgcaacacaagtccaagtagatcacatgcctatcgttcgtgaaatgccaacaatggagcttgtgaagctgacatctgacatgaaattgttcaatgcttatgacaagatccgtctagagggcataaacaagagacatgctggtgttagagccaagagagctgctgaggctgagaaagaagagaagaagtgagtatctttcttcatagcttgaagaaactttttatctttgtcatcttttggattttaattcttgtgtatcacactctgcttttttatccttaaatcttcgattttgttgctaccttgcttctctgttttatggagaagatcattatcacacatcctattagcttctgtgttaaatcctcactcaaaccttatccactcctaactaaatgttaaaacttaaaacaggacttaaccacaagctgattatcttcaataatcgatcacaagtcaactttaacgacaacaacaacaaaagaaaaagtcaacttggtttgcttcttgaaccagaacatgctttgtgaacattctaagtaagactaagagtgctttaatacggattttggcttcttatttcattataatgaaatttcatataaagtattaatgcatcttaatctgttaatatcactatactacgtcaaagaaagcacttcttcaatacaacactctcaatcggaatcaaatcagacggaaacgcacagtcaacattcttcgcctgagctttcttctcaggcaacaaactacatggctctggcgtaactctgctggtaactccagccacatctgtacaattccactgcattttcttagccttagccgccaaagctatagtcacattcgagatacaaatacccgtaaacggatctttatcaatcccgtcgagactcgctgacattgtaacattctccgccgtcatatcgcggtaattgatattagtaatttccggcaacgccttgggatcaaatccttcgtcaggatgactaccgtagtttccactcatccagaaaacatatttcatcgtcttcattgtgatcctcctagcgtaaatatccttgacgtaagcgccacgtcccaccgcagttttgattcggatggcggattcggtgttggttagagttacatcttcgattctaacgtctttgattcctccggacatttcacttcctaaggctactcctgcactctttggggagatgcatgtcagccgtcggatcgagagttgctgcgtcggcattccgaatttgattccgtattggtcccaaccgcttttgacggcgatgcagtcgtctccggagactatgtaacagtcttcgatcaatgtgtttgtgcaagaatctgaaaaaacaagaaacagagccgttggaaacccaaacaaaaacagaggatgacattgtgccaagtcagattttagaaatgccaggtaggataataaggttgccacgtaggataaacattacctggattgataccgtcggtgttgggaacagtgacgggagcaagaacggtgacggatttgacaatgacgctattacaatagacaggatgaatattccacgacggcgaatcgatcaatgtgatgttcgagatttgaatgtttttggagaacaagatctcgatcaagtacggtcttgttattttgaactgcttcttcttgaatttgtcccaccaatactgtccctgtccgttgatcgttccgttgttacctataatcaagaaaacaatcaaaataagaatcggaatatatgatcaagcatatcatggtgtgatatattgcgttggaacttaccagtgataaccacgtcggttaggtttgtaccggagatgagactgttgaatctcccggttccggttccgtctcttcctttcccgtacgatggcaatggagcgataactggccattcagattcatcctgtttatgtcaagaacggatttggtttttgtaaagacatattaattcgttatataggtcgaaaacaaaccgggtgcaatatttagatatgtgtattaaatgtacgaggtgctttagaaaaaattctaacgtcaacgtctctactaggcaaaatttgattcattaggagtagtgtgatttggtcatcagtatagattgttatggtatatgaaacgtagagacgtttaattcggatccaacacaacctaaaccaaaaactaaacgtagaaacgtttaattctattcaattacactctagtcactattgttcttaagttttttaaaaatatgaatgaaacggttttaaacacacttacctgagatgcaaggatggtagcacctcgctggatgaacaaagtgaaatggcttgtaaggttaaaacttccggtaagccattttccgggaggtactacgagttgagctccgccatcggttgccatttggctgagcttgcttatggcatttctaaacgcttttgtattagaagtttttccatctccaaccgcaccaaaatcagtcagtattgcactatgtttccggcaattcagcgctgaaaattcaatcttggaagtcaccgaatttcggtgactccgggattcaatcgccggaaaaaggaatatagccaaaaagactagtaaaccaaacgttggtctaatcatctacacaacatagaaacatgcaaaatatatgaatcgaattagtatttccagaatatattttattggtttagatagtttgatcttctatagttttgataacaaaaaattgtataagctaaccaatattattcaacatatttttttgtctacagcaatattcaacatctaataaactatgatcttgtaattttgtcgcaaagaatgttacaagattagcgggtatataaaaatacaaacttcgagtaacaaataaaattacgacagtggaagaaaaacaataagaacaaaaaaatgctctttaccttaagatatttttaaacagaggaatatgtcttccttctggtttgatcgtctgtgggagccaacagaagagagtgatgtatatatgggatccctaaatatttatagattttgtttctcaacacatacaataaagtttatttttctcccgactcaaatctcgtacatgcaagtttaaaacaagaaaataataatatagatttatgattatatgattgtgtttccatctttacaataatagaattctaaaattagaattctgtagttaaccacttgggattattagcagaactctcattgctgacctgattcttaccaattttaaatttggaccactatatttatagaaatacgttattaaatggatggattttatatcattgtgagaattaaatttatatatatttaattaattagatgtttaatttcttttactattgagtcaatgactattgagaaaaaaatccttaaataattaattttattcaggaaagttattagctaagattaacatttatcaacacactacccactttgactaactttaacatcattcatcttatcaaacttttgtttttatatttaggtaactgatataattgagtatcatctacatatacatttttaaagccattttgtgaaataaatcctagagttagaacttatttacaatggctgccacatctttttaattattaattttcttttggtaataaattgattaacaaacaaaaaatattccaaatatattccaatcccatatatcacgcagatttctctaaaatttgaactagattttgaaaactatttaagacaaaaaatatttgacaaaccaaaatacaattgcaatcccttaaaatgagcaaaacgcacctaaatacattttttatcagttcacaaatcttctttctccaatatttgaattagatttcgacaactatttaaaacaaaaaattgtttgacaaactaaaatataattgcaatcccgtaaaatatttttttaaattagcggtgtatcgcatagttttttaacgggacggatttggcagaacgggtttggaaggatgttatttaataacaattataaactataaaatataaatattttatagctaaatataatttataaactttaatatatactaattttaaaaaaaaatttgtctccgcggtatgtcgcggattataatctagttaaaatatatcatagcaataaaaaaacggccacatcttattttcttatgcacatttggtagtttatttgttgttagctaatttgttttgcttttcaacactagctactagctacgatcagatttgttaaactttggactaaacactcttagggttgagcatatttttctctggtactcatggattttcttttgaaactttcgatgcatgtgtcttcatatgtatatgtatagcaaaaggcgatcttatgcttcttgataggtgttgataatgatgaaaattagtattttggatctagttaatatttctttccacttatgaatcttcatactttgtcttctacaaggcattaccacgcaatcatttcctaagcgtacgttgatcattttgcatttttgcaagatcacttgcaaaagacgttcttataggcgtttgcgttttgtaaaaatatttacgaaatcttacttttaatgagagacttcaaaatgaagatgaatgtcagcaaaaaagaaaaaagatgaacgtctgcgtttcttgaattttatgtacaaatgtttaacattttagttatttaaatttttaactacaaatgttaatttgtaaatggaatataggttgtcatgttgtgtctaatcggttgtacattttagttatttaaaaagagagacggttgtaagtcgcgggcaaacgaggttgtggtcactcccattatagactagtgacattcatcactatttctctccttttactccttagtcattctacaaactctagttgcatatctctctaccactctacttcaattcaaaactatatgacccaaaacgtcatatcttgtactagtttcattaatattaatgcaattcaattaacagaacgaaaaaaaacaaagaaggtttcattgacttgaacaacaatacgaatcaatgatgtatgaagaaaactgcatgattatatcatacgaagatagaaatgagaattagtggattaaaaacaagagaaatacaaaaaatatagaaaattgtggattgcattgctataattaaatcctctaaactcctttttctaaaaaaacatcgtaaaaatcactacaaaaaatacttttgataacgtcactttatgtaagtcacttagtaaaccgattttaaattttttaccaggaaggaatatgatgtcggtttagtgtatatgttcattttataagaattttaatattgtagatgagtcattaggcctatttacacaaaagtccagtcaaaatatgtttatttggtttgatctcttatagttagagactttcagagcttattcacaaatgacgttaacagtgagtatctttcacgtcattcgatattacaacactttctaaccaacggtctttttcttacatcattttaccgacgttaaatacgatattaaacaacgtgattagccatctttttgtagtgaatttcttacttcaattttctctttgacccatcttatttgatttatgcaatgcctagagtttacagtttttaattccaatattaactagtccctaccttcaaacatgctcctcttgctattaccatgcattgctatatctacccgtacttgcgccgaaactacttgcagaacttaaaaacgaagtttacggttttgaagtgtcatacttaataggcatttcaaaactatttagagagaaaatacagtgattggtttgcttatactttaaattttggcttcaatcaaaagaaatgaatttgtatttatagagtataccacgtcaagatcagataccggatcctaggctaacccgacgtaagttattgattggtttacctgttctcctcccatcgagagttgggttgttgttggagagaggttgtacgtacgtgagtcgtgacggtgagcttgttagtcattttccctttattctgccaacgtgtacataattcagttttggtatatagtaaattttatgcgaaacaaaagctgaaaattaacatgtttattatcaaaaaaatgtggctgaattctgaaatatcattattagttaggtgcgttttaggaaatcagtaatgaataatgatcgtgcacaacaataaactggacaaaatagcatttgttctttttttctgtcacgaataatttcatttaagaaaaaaatatagaaagtcatttatatgccaacgagagacaggacattgctaaatccagctcaggacattagaaagttattctcacaatctctataaaataatccatgtcaacaaaaaaaaaacctctattaaacattaatcgaatttctaattcattatgaaatataatcagaagagtcctcatcttattgatcaatcgtaatacacaagaaaccatgactttagaggagcagaagaaagtcataatgcccgaggccgtcgcatcggagccatcaccaccatccaaggaggagaagtccgacgattcgaaagctattgttctcgtcgtcgctgcaagtaacaaatcttttaaatttcactgaacaagaattacatatttaaattgcaaaaactacttcaactatttcatattgttcgttttctctaattttcttcttcttcttcacaatatagtttataacacttgttggtataattattgtttatatatctaatatattttggccatgtaaacaaaatgtttttttttcttttggctaaattaatactgttatattttcggcaaagaactgtaaccttttcaatttttgttgttgttgcagaagaacctacggaagacaagaaagtaggttcagttcaccgaggtaatcaacgttatagttagatcatgattgatacataaccaggaaaacaaaatattttaactttttatttgatttttttacctgataataatagttaatatcagtgaagtttatccaatatctaacttttagccaaaaatttcacctgcggaagaaaaaatattaattaagtttatctaatttcagtaatttacatgataatattagttcatttttctctagattttttttttctgataattcatggtgtgtgtgtatgaagatgctgttttggttagactcgagcaagataagaggatatctctaatcaaagcttgggaagaggctgagaaatccaaagtggagaacaagtgagtcctaaagaagtttatataatccattgttttgatgaatttccaaatttttagttccatgatatttttttttgtgttccctatatatttgtatgtaatctcatttattaactttatgaaacagagctcagaagaagatttcttcagttggagcttgggaaaacagcaagaaagcttctgtggaagctgagctaaaaaagatcgaggtaaaagtgtaattctttattctttcaattttgttgttttatttttaacttttacatgaaatgctttccacttttcacattattctaatttatccgctggaaatatgaatgataacaggagcaactaaataagaagaaagcacactacacagagcaaatgaagaacaagatagctcaaatccacaaggaagctgaggagaagagagcgatgaccgaagctaaacgcggagaagatgttctcaaagccgaagaaatggctgcaaagtaccgtgccaccggaactgctccaaccaagctatttggattcttctgatcggagaaatggtctttgatgttgcattgtggtttcatttgttattaacttgagaaagaagagattattggtagttgaagtggttggtgtgggtttcatttggcaacataaaaagttacatggccataatgtaacgtcttattatgtttggagtaatgtgttttactcatgtgtaatttgtacagcttaaccttgagagacttcttttgaactttctaaacttaaactcccaattatttcgtttcaagttttcttcttcaatctcatggtccaagtaaaaatacaccaataccaaaatattgttacatttaagtttagtaaaaacaattaagaaaaataaccaaaattttgcactatttaagattagatttttaatatatatttaaataatattattgttccaaaaacaaaaagtaaaacaaaacacacccttaccaaaattatgtcaagtcaaagcatcctcgttttagggattttctatacttgggcctaaatactaaggcccgtaattaaaggcccaataacgtttgtggtattgtacaattttcatgtagaaaatgtcttatataaagaggtcttgcaaattagggttttcatttcagtaatcgctgccgcactatcgtctcctacctcctttgcctacaagctttcacgcgggagctcaacatcagccatggcggaacaggttactcgatctgttctctcctctaagcttatcctcgttttatgatctattgatccttattcactcaaatgattctaatactcttctcttttctctgtcactaattttcagactgagaaagcttttcttaagcagcctaaggtcttccttaggtaattttgcgattcgatttctctctgttctctattgtttcattgtatttaagttccaagttgtttatattgttcattgtttctgatttatcaagctcgaagaaatctggaaagggaaagagacctggaaaaggtggaaaccgtttctggaagaacattggtttgggcttcaagactcctcgtgaagccattgatggtatgtttaagcttttaactcgttataatagataaggaactcttggattgtgttgttcatatagtcgatagatttcaaatgctattttgtcttgtagaatcttaagctttggtttagtgagttctgattcttcagctttatctggatctacattactgtttcagtgatgcaaatgttatcagtagattttgaattagtaggatgtcactgatttgaatatgtgatcaagcttcatagaaacctgcatcattctctatatacctttaagtcagattctcaggttattgtgtatttgtgtggaacaggagcttacgttgacaagaaatgccccttcactggaactgtttccattagaggtcgtatcttagctggtacttgccacagtgcgaaaatgcagaggaccattatcgtgcgaagggattaccttcactttgtgaagaagtatcagaggtaaattcatacattctcatacttctttccatagagtcttacacattgatgtttaagaaagtaatatcctttttgttcttaggtatgagaagaggcattcaaacattccggctcatgtctcaccatgcttccgtgttaaggaaggagaccatatcatcattggccaatgcaggttatgatctgattcaaacctacaaattgtctccattgattctgattatcgtgaatttgttttgatctttttgtttgttaatgattgataatttcaggccattgtcgaagacagtgaggttcaatgtgttgaaggtgataccagctgggtcttcttcttcatttggaaagaaggcattcactggaatgtaagctgctgctgttgatgatgttagtttatgtttctggatagagctgaactattatgttttatggtgattttcttattgaatttttccagacattaaattttgttttactctgctgaatctttttcatcccaatctgtgcctctgtttaagatctgatttttgctactcttctcttaccttgtcctataattaggtttaaaacccggttagacaggccagtccaatctagtactgtcgagtttggtctaattgatgttcttagtcgaattatcaaataagaaaacgcgaaggattttgacaacaaaataaaacgtaaaaggaatgtttataactttatatagtgaagaaattacagatttgttgggcatacaaagtatttgtttatgtactcttttttatccccgtctacttaaattaaaccctaaactatatttacttggacctctctccgaacatttacattggtcgtagctcgttgatgagaccatcgaacaaaaagttgtctgaaaatgaagtacagaactcgatctcagatgatatctcatcatccaacaaaaattctgaatttggcacgaaatcaggcaaagagtcgtttcccaaataacgagggccacatggtccaatgaatcctctctcttccggtaaaacaagattttgaacatagctagacttttgaggtgactgatccataagcaaactatgatctaaccattccgagaacacgagatttggcgaaaagcttgaggtttgagcattagacgtttctccgacattgatagatgaagaagatctttcagttgaactctgcaaggcctcaagtgagtttgtgattaaaggtgtttgatgtttttttgtggtttcatgttgtttcaaagttacacccttctttagattagaatgccaatagtttttgatctcgttgtcggttcttcctggtaagaatttcgatatctgagaccatcttgtaaaaacaaaaagggtcaattatgaaaagatgctaaaacgtatatcaatattaagaaaatagtatatgtttaaaagtctaagtttaagttctaaaccataaataaacatgaagtcttaaactccataaaacctaaattctaagtgaagtgaaagattatcaaaggttgaatgacttacttgttacccaacatggaatgaagtgaaagaagtatagtttcctcttgtttagtgaataaagacttcttaagtccaggtcttaaataattaacccaccttaatctacaactcttcccattcctctgcaatcctatacattatgtgaaaaccaattagtttacataaaaacccgatgacaaatatcgaaagagcctaaatatttatttaacaaagtgaaaaaatatatttctaattaaatagcagactaaatataaaatgaaaagataatgttgcatgttttcttcaaacaccaaataaaaaaataatctcaagatatgtattattagaattaccagcttgaagaggaatagtactccagcatccatggccatatttgaggacatgactcctaagcttctcatcttcctcgggtgaccataatcccttcctttgcttctcctttgatttcatttcccggtttgatttttctgatttaaacaccatttttatttttccaaagtttttttttatatttgaaatagatatattatatatacgtgtatggtactgatgaataaaaatatgtagattggtgatgacaatctttgacacagatacgtaattcgaaagagggaaatatatagacagttttgtaggtcgagttctttaatagtttaattagtaatatctaattcatgcttgtgtagaactattcatatgaaagagggcttgttccacacgaaacaaatattttgtagatataatttggaacattgcatcacatctttataaattttaggtggagccttaccctttgaattttcatgtcataatttcaatacgacattgcatttaaataaacaaattaatattttaatttatatgttttgtttcagaaagattagacttttgcaagtttgtctttgttttgcttgccttttcaaattatgttgggggctaaggctaactttaataaatctgccacaatgatatagtggtgactgggctaggttatttgttttttgttttttttgtgaaattatggaacaattagcaactagtcgattaatctaccaaatttttaatatgcataagtggacattttcacagtaatccaccagctctttgtcttggtaaaacttaaactaaataactagcatgtgatattgtgaattattcttattgtttatgagtagaaatattctaattcaactgttcaagttagttaattttctattgaatagagttgaagaagacttttgcaacttataaaaagcctacttgccttcctcaagaaaaactcttgtaaaaaacaaaatcgataaattattggtgaattagcttttgtttttgttctttatataaatttaatttacatagtatttgtttatatttatttatgtcagtattaaagtaatagcattattggtttgacaactacaaataacttaataatttataggtctcgtcattatgtcaaaatgtatattattgacgaaaacattcacagcaccttaatatatccaagttctacaaaagaaaaaacaaagaaaagggtgtaatgctgtggcaatattatggttctatattttgatgaaaaaatataatctaagttagaaaattttcacaaaacatagtacaaggtttacgaagctctccaaaagtaagaaacgtttcttaaaacgtcctacaaatacaaatccgtttggaaactttgggaagattatctaacatgttatggattgttttggtagtgaattactatttaaaatgacgtaatttttacaatgcctctctactgattatattgataattgataagccttcagacttcagtgagcaaaagaccttggcagccgacactgtgatgacgttagctgcggattagttatcttgacacttattgtatactttatttgttttaattcaagattccaatatcgttttctgtgctacgacttattagcatggttttgctattgcatactaggcgaatttcggatctaatcactgaatcacacaatcacatattgacatatcacacgtacacaatgacatattgcatatgctagtactgatgtttacatgatcatatgtcaatcatatatatcatgtcaatcatttgcaggaaatttataggcacacaaaaagctctagtattgaacaaaagggttttgtggatttaattaagtataattgacatatgagtatagtttacgtatgtctattgtgaactatataaattatcatttaacgatctataataacaaataattcgttatctattaacgaaaagaaaaatcgttattgaagacataaaacaaatactattgtttggagtcaactctttacccccatttgcggatagaaaattgaacaaaatatataaattgtgatagtaagaggtttatgcatattttttccttttttttggtcaccaagaagaggtatctatcaagaaaaatctaattaagaaacagagaactggttctattaaaacagtgacaatatagtttggttaaatactgatagctttgcttgaacttataaataaatctcgcctaaccagcttatataattccacgttgcgcaaagtataattaagtcaacaatgtattacaaagtcgtggaccaatcatgtattttcatttttgttgttgtctaccaaacatgtttttcttttttcttttttgagatgggattatatcacatcgttgtaagatatggtttattttttctgataatgatcaacaatcaaatacagtgtatatacaaaagaatcaatatttgattgggttacttaatccaatagactgtctattatagagaaaactttacaaagaaaaaaacccgtcactaatctaatttttatttatttaagtgggctaaacaattggttcaaacgttaattttgtttgttccccattcatgttttaattataaacatactttacaccactaatgagtgatgtcaccgtactttttttttttgattttcttttgtaaacaagagtttattagatccacatccaaactaaactaatcatcaaactcaattaataaactcgtaaaacaaaactttaaattagcacttagtgtatacacctcttcaaaaatatttattgacctttagcaaaataatctttaattatttattgataagtgtctcttttggaaagagtctctcataaattcgtttttattggtgcattttgttttgtcattaggcatgcatataaaaagaattgtccactggtgatggtcattgaatcaatgacattgatgtatccaattgaaaccttccaaattccaagcaatattttttattacacagcagaaaaagtgttgtgttcaaactcttaactttcttgagctctttcttaatatatttttggtatcttaacaaaaatacaaaactatatggcaccttaaaactctaatatgaaattgatgattttatacacaggaaaagttattaaataagagaattatttcaataagataatcttccgtgagttatgcagttaaattgaatcaagcaaggtaaggtatgattaacaaaagagaaaaatatagcttcaaacttttaatagttttcatgaaatccataaattaagataaaagaactcattaacattatttttccttttttgttatcataggataatgtctttcctgatattttgaagaaagatcctaagctctctagctttcttgcaatgttcctcatcatctgtctctgaatcactcagctcaatcacagtctcaagttggtgatcatggctcttctgttcttgataacttcttgacacgctccgtgaacgagcttcaggacaagggcttatcagatcaatgacttctgtttccggatacaatggaaatgaactcattccaacacccaatctatccctgtttgaccaagcgttattgcaattttctctatcaggtgaatcgataagacgcaagtaatcatgtttcttggagttttgttgttcgttctcttgctctgcttcttctaaggtgcttctacttactagagaggttgagttgagatcaaggtgttggagttcgaggctgagttcgacaagagaagaagatttggtcggtgaactcgtttccttctgtttttgtttcggcttcggtttcttcttttttgctgccattttctccttgaactctatgatcttctcaggacaagccctgcaaagaaacgaggatataattttggaaccccagaacaagaacagtaattcagtgaacaccaaccaataactgaaccatatttgatgttatgtgacaaatgaccagaagcaatttggctgcataagtagatctagtattaagttttgttttgatgtttcgtgctcggtatttgcagctttggggaaaccaaacaaataattattttgtgaagtttctatagccaagccaaactaaataactgaactggactgtttctagtatctaatttagtccacagctaactatatcacctgaagatctgcttacttcagacactatttcagttcattgattcatggtgagttaaatttttgcattaaaggtcaaacaacacaggcttaatcaatgtcaatcacttgagctaagtgtttcagcttatggtgcagcttcaaaacataaactttagtaaatgagtgaaggtcagactatcattacctttctacaagatctgcaggaacaatggacgactctaacccttctagatcattccatgagacttcaaaacattctcgcccctgtacttttcgggtctttatgatttcagacaccggacacttctctggcatctgcggctgtaagagattttttttcttgcaagagttaaaacaagttctcgattaacttccaaatgatttgtgtaagggaaagccagttaactttaagctgatggtttctccaaacacaatgcaaaaccaaaagtttcctatttaccaatatcataaccttttataaccttcgatgcaccgtatgaatttgatgaattcatgttttgtagtaaattctaacataaaagccgaattgttcttagtatttgcttcaacagttgactacataatcttgaacacaataatcatagcttgagacatttctggggaactaaaatctatcgctaataacttgcagagagagagagagagcgagagaagggtaccttgtggagaggaaggttaacttcaacctcagttgatcttgattgcagattagcgaaccttctcagatttctttcagcaactttaggaagtatgtattcatcttaatgcaagataatgaaaaagaagaaacgttggtttcacaattggttctgcacaatgcaactacaaggtataagaaatatgtataaatccaaagtaatacctgttttctcagggggccactcaaagaactgatggcatatctcctgaagcttggtgcgctggaaagagaattcagctaaggccctgcaaaaccagtatataaattatagcacttcctttataaaaaatctgaataacattcaaatttttttcaagttcaccaatctccaggcttaacagacattcctattataagctt

SEQ ID NO: 1068 - DNA, 129757 bp, Arabidopsis thaliana
gaattcaatatttgctattgaagttgatatctgattcgtcgaggtttgatggtatgatgcttggtttggagaatgtaatttagggttccatgatgattgattactagagatattggtttttagttgagttttcatcgtaccttgtcgtagttatgtggttacttttgttttggcttggtcaatgtgattgctaataggttatgttttcgtacgtcttgatgaatttaacatgtcttgcatggcgatgtgttagataagcagatctagtcctctcttcagagcaatagttcttggtggaggttgaagtgtgatactttagaactctttaagctgggctgagttttgatgtaaatcattgtatcaacttctgtggttaactagatgtccttgttgtagtcttcttgttttcattcttgtccattcttattatgtgaagtatatatatgatagatttatttctacttttcctttaacttagtgtctcaagttcaagacagaccaagcacaagaagcgaagaagatggagaaactgaataacatatttttcaccctcatggccagaggacctgatggtaaaaatttcattttctgcatatctaacttaaagaaagaacatgcatcatctatctcttagtgtttgagaaaaaaacctcctttgttttattgagctatgaggttatttctattatgagacaatgtatcacatcgtcaccggctattattttctcaaaacatcgcttttctcctaccaatcttgaaagaatggaacttgaatgtgcatcatctcacaacctttaaaaggaaagctccttttgtgctgtgtaacattgggtgtattatagcttactttgtttatttatgttggttgtataatgcagtcgatctctcagaagtcaccgggaaagaacagatggagacacagcctgccaagaaaggaagaggaaggaagcaataagtctcaagatttgttttccgtttgtcttggtatcaagattttgatccatttttgtttgatattttgagatggtagggttgtcaagattcgttctaaagcttacgacttttttttacactttgatcgattaatcacttttggattagcctaaacccaaaagctaacctttttaacttggattttgaaagttggccaactccttatagcttgattagtaagaagactaaagatagtctttgaaaagagaaaaacacctggtcaattatgatggagacagagaagaaaaacgagatgattttcttaaccgatgatctatcagcaaatatcatatcgagattaccgcaaagaatcatcaccacttccaaactagtttgcaagcaatggaaatcactcgctgattctccgtattccagccaaagtaccatcaaaactcgcattcatgactgtcatgtacacacactcacaagaagaggtcatgggttactatgcacgcaagatttggggacttccacaaaataaattaagtatatttagaaatgtaagaattgtgggacccactggtaggggcggttggggcgatacaatacgattcgagaataatatcagaccttagaacttaagctttagttgacaccctacatacaaatacattttgtgtcacaacgttagtgcaaaatataatattaaatctggtatctatcttatacattttgaacataagagaaagcacgtaggaacatccattgattgttatatgaagcaatatggtatttcatggggaaaaagcttaagaagagatcaaaatcatggcatttgattcaaggaagagtcttaattaatcaaagaactaatgacgagagatcactcttttccttttcctttccctatcgtcatgtgattcctaaacctctcgagggtcgtagaagttttctacaaagagactgacattttcacacatcctgagttgatgaaacatcacgttgtttcttaattccttaacaatacatctcttttgatcagaactatacgactatgcaagttctttttttagtttctccgtttaatcttttatgttgtgtggaaataagcggttttcttatgtgacaatgtgcgtttttttttgtctgtttcgaatcctcaatatgacgaagattaatacatttatggttgtgtttcttttgtgttgtataaatatgtgtttgttttattttcaataataagcttggtttggtttccattgtttgaatttattgggtatacatattagaccaattagaattccacttgtaaatgcatattctggaacaataatgttgactatactaataattttttcttgggtctaaaacatttagtatacttttcttgaattttatgtaaagttattctgtttttaggacttttatcctcactgaattatgttgtgttaaagtagtagcttatatggtcacatatctcacacgtgtttccattttttttctatctaagttttcggtttttacattgtatacaaaaataaatggcatgccttgggccttggccactgattcacatgatcacgtagagtttgtgtgtgattcaaatcctagatgagaagatcatccaattgatctaagatgtgtctttcttatatcacacgttttattttaataatactcttcagttgggtttgattccatttatgatttatctatgaaaacagaatatgtcctcatgctgattatttcgtttgtggttgcattttaccatctgtagttttttttgtttactgacaaacaactaagattttatgaattcatttgatgataaatagttaatcaaatatattattatgagtgactcgatggcgaaagctggtattatcttatggctgctaaagtctacttttagaagaagaaaaaaaaagggtctgttgcattaccctgttgttgcgactctcctacaataactctcacgtggcccgtttcttggtttttgccctattttcacaaaagtaaacagagattttcactagcaaattgggcccaattggagacaacttcatgtggtttgaatcgtatatttcagatagattagacatctagtcttctttgatgtgcggtgaggatcttaagtcgctataacgttgtgaaaaaagaaaagaaaaagtcactataacatagatcgcaactaaacaaataaaggacactatacatgtacgtaataatattcatttattttcaacgacaatgttccctagggtggtaacccaagtatttttcatagatattatacttctagcgaaaagccatcaattgagaaaaaaggcctccacgtttgacccgttttgcctataaaaggattctttaagatatggaccttactcatcttctccgttaaacccatttaaatagttttcattgtccttgtgaaaaatgcaattctcttcatcttctattacttctttcacttggacagttttaatcacagtgggatgtcttatgctttgtgcgtctttctccgatgctcaacttacccctactttttacgacacttcatgtcctaccgtcaccaacattgtaagagataccattgtcaacgagctaagatcggaccctcgtatcgccgggagcatccttcgtcttcacttccatgactgctttgttaatgtaagatatcacttttcatatatctatagcgttatgaaattactgtacttaatctcttcatcttttaaatattgattaaatcagtgtaaaaaagattatagttgttgtcagcattagcaattgttttaggtgtactcttagttgctttcaatttaatgtcattttagcttttcttttatgtttcaaaatttggattctgaatgcaaattttaaaggaaaaagtaatttaacatcacgtcaaaattaatcaaacagacaaagaatcaattagttttggaatcacgtagtagtataatggaacttattaaatttccaccatattttggtaatataaatttttcttttactgaatttattttagtgaattaaaatgggttagaacttagaagagttaattcctccttacattgttttccttaactcagttacttgcttcagaggaacaaatggttttaatggatgaaaaaagttcaacgttaaactgttacctttggtaaagatgtaaactatggatgacattaactaataatttgttaaataatattttggacttttgaaagggttgtgatgcttcgatcttgttagacaacacgacatcatttcgaacagagaaagatgcacttggaaatgcaaattcagcccgaggatttccagtgattgatagaatgaaagctgcggtggagagggcatgcccaagaaccgtttcatgcgcagatatgctcaccattgctgctcaacaatctgtcactttggtatgctccattgtcccatattcttttattcattacacacattgttcgatataaatatgtcaagtagtcgctttacgtacatgttaaacatgacagtctaagttcgaaaataaaattgttggtatattttatgtcttttagaatgtcacaaactcccaatatatgtttagaataaaatagacaagtattcaaaattaatcggaaaacattcaaaacactcccgttgatattttttgataattttaatatcactgagaaaataaggtctcatcactatgatttatgtacctttttagttaacaaaatagaagaaaattccttttcatccaagaaagagaccatggaaattacctttgagttttgagtatataatcaatagatttataaaacatgtttcagggtaataatattttctaagaaaagaattattattttgaatataatggttaattattatactataggcaggaggtccttcttggaaggttcctttagggagaagagacagcttacaagcatttctagatcttgctaacgcaaatcttccagctccattcttcacacttccacagcttaaagccaacttcaaaaatgttggcctcgatcgtccttctgatcttgttgcgctctccggtaattattaaaaagaaatgaaaccttgtttgatatagttgtaatttagcaagttaatcgttgatctaattatggtcttccttttgttaggggctcacacatttggtaaaaatcaatgtcgattcattatggacagattatacaactttagcaacactggattacctgaccctacactcaacactacttacctccaaactcttcgtggtcaatgtcctcgcaatggtaatcaaagcgtcttagtggatttcgatctgcgtacgcctttggttttcgacaacaaatactatgtgaatcttaaagagcaaaaaggtcttatccagagcgaccaagagttgttctctagccccaatgccactgacacaatccccttggtgagagcatatgctgatggcacacaaacattcttcaatgcattcgtggaggcaatgaataggatgggaaatattacaccaactacaggaactcaaggacaaatcaggttgaattgtagagtggtgaactccaactctctactccatgatgtggtggatatcgttgactttgtaagttctatgtgagaatagttgactcaatatctggcgaccagactatatgttaagataaataagcgggatctcaagttgttacttgagcaggagcagattgtattggtgtttatagtatccaagtagttctctgttttttttttatattggcctttgatagcgttttgttaatcggtctaagcttctatggttttggactgttttatcctaataaatatgacaagataaaacgtttatgttatttgaaaatattttgtcctacgtttccatttctctagtgatgtatataaaagaagaatgtgtgatctagcaaaattgaaatatgaatatggttcaagattgtcgtgatacatagtcagatatataaagaataaaacgtatctaactttgtggccttgcattgatttatgatacgtaaaaaaaggacgcgacaaatatgagcctggcgagtctctccgaacacacaataattctggtggaacgagaagcgattcatagggttatcaagaggtctaatttcaagctgagaggcctttatgaagattaaattaagatcagttgagaaactcaagcattggaggggagaggatgcggctagaaacttagatatggaagcttcataaatacttaactgatgagaaagatgaatcgcgtaagttacaaatggagcttgctggaatttagaagagtctatgtgtgttcaaaaatgataatcacaaagtttattatgtatgtagcaaagcttaaaaagaaacttgtagctgaaaagaaaaaaacctaagctgttcaaagaatgaacttttggagaacttgaataaaacaaggattctcaatggtgtaacaaataatccatataaattttttgagcatatagaggcgagagaagaagagtattggtacgagttataacaaagaagctaattaagtacatctagatcaaatattgtatttggtagaaatgcataacataaaaaaaaaaactcacgactaacatgtcaaaaggaacatgcgcacaattttaatagggaaaagaagaatttggttctggatactacggaagttcatcaaaaatcattttgtaggtgaaacaagtgaactttatatgaatttatttatagaaaagaaaacgtaattgaaacccattaacctatgatacaattgtgtccaataataatttgaaattaaaatcctaattaaatagaaactaaaacagacaaatacgttacttagcttgaaccaattaaacagatgtctagacaagtacgttacttgacccatttattcccaagtttgaatcaccattcaaaaaatgttacaaagacaaacgttttctccaatgtaatggagtattctgctgaggattttgtgtatgtagtcccctaactacataactaaagatggattgaagaagggtaaaagaagaacatacaatttctaaggatggtcacattgggctagaagcttttgttgtttgcccaaaaaaaaatagtaaagcttcctttaggttaatgtgagtagttttataagcatgacaagatttttctaggctggcatatatatgctttagacatccaagaggtacaaactatgtatatctctaaagaaatatatatctccatgcctataaaaccatctcacattaacctcaaaggaagtcttgctatcttttttagttccttaaggataatggtacccaaataattggcaaacaacaaaagcttttaatctaatgttccttgcgaatgtacctcagaatcattttatatcgtcatgcatgtattagcaacgaattagcaatattcgaaagatttgatatcaaataacactaaatcaattctaacatctgaaggcttgacaactatcttatttgccactcatttgtgatgagtgacaagattgtaatgatcctaacaacctcacactctcgttatatatcgcaaaattgtcacagccgttttcgatgcacatgatccgacaaccattttggttgtaatgatcctgaaaaccttcacactctcattacataacgtcgcaaatttactatacaaccatttcttgacaaacaaatcggtcactagctattcttctgttttttttatttttcttgtaatatttatatatataacgagtgtgacttgggctttgacaatgttagtatagctttaaaacgggggaaaaaaaaatactagaacattaagttttgagggtgcaaatatgtaacatatgtgttgtagaaatactttttaaaatttcaataataaccttggtttagtttccattgtttgaattggtattcatatctgactaccgtagaattcaatttgttagtgcagaatctgaaacagaaattgtgttgtctgtatattctttttttgggctctcaaatatttcgtgtatttttgtggaattttatataaagttggtgtcttttttaggacttttcgttgcattcaattatgttgaatgtgtaaaagtagtggctttccttggtcacatttatcaaacgtgttttcgcctttctttaattttccgtgttcaagtgaattctagctaacttttcggttttacgttgtatgaaaataattggctgtcgtcggtcacatgatcacatagagtttatttgattcaaatccatttaatatatgctgtatctttaatgcatacatagagatatattattatacgttatcttttaataggacattatattttgtttatatgaaagaaaagaatgtactgtatatgcagttatattatgctggtttatgtcaaagatagaagttaacgcaaattaatttctttatttcaattgtgttttgcgttacgatctgttttttttttttttggacaaatgacttaagattttattacttcatttgatattaataaattagtatgggtgatgcaaacgacttgaaggctagggttggtaccacggctgctaaagtctacttttggttggatctgtggtcggaagatcttgacgtgatcacttctataattgaggattgtgtgttgctgctactctcctctcacgataactcacgtggcctttttcttgtttttctttcttcatattttcacaaaacaaaatagtcagagatcttgagagattttttcagaagcatattgggcccaaatgtggacaatttcatgtggttgaattgttaaatttcagatagattagacaactaatcttgttgacgtgcatgcggtgaggatattaagtcgctatacgtcatatacgtgtatacttaaaatctcgtttgatatttctttcttttgtttttatcttcaacgacaattattgcctcaggcatgtcagcagaaaacgacaccgttcatattcgatctcgttattaatatgtttttgaagcaaaatatcattattagctatggagtttctgcagtagcctaaccggaagtctcaaaaagataacgtttatgccggttataattaaatccgataaggcgataaataagtgaacccgtaaagtctaaaattttcacatatatatgaacaaagaaatagtctatagatctccatgcattcttgtacaaacatatttaattttttattttattttctttatataagagttggtgtatgaaactttacattttgtaaatactaacattacatcataatgtcagaaccaataattctagtggaatgatataatctccactttaaattcttatgtctttatccaaagagatcatgaggaacttgagcaaaggaagagggcaccgtttagtagtataggtgaataacgtggcggacacgaggctggtctcattttcaaataaagagagatagagagaaaatggaaggaaaaaaaagctattggcgatgttgatatttgttcgtcttttagtggagacgaccaagagattttgaaaggtcgtcgaggagttagtttattatcttacaattattatggatttcttctgactaaagttttagtgcaatagttttctgagttattatatatttttcgaaattcatccaaaggctaaaactttgtaaggtattctgagtctattacgctagaaatagacacgcttacgtttttaagtcattttaatctgatatatatatatatatatatatactacaattttataaccaattatctttgtttcagacaatttatataaattcatataaactatcagaaataaagagacaattggctgtaaaattgtattattttgcatctatgaaatttttatttctctttatcaaaattgaagacgagttgaaattctatttcttttttaaaaaaatttatatatgggagtgtcaaaaaataattttcctttgtaagagaatattcgtatttggacgagtcttgatttgtgttttccgttagcgttccacattagttgtaaagagcgagaaagatttaagtgataattaaaaagacaagatatgcattttgaatatactctagatattaatcttaagcatttttcatattggttatattttatggtcgaattttgacatccgaaaaatacatcccttattcttcaatttatattgaatacttaagtttttgatagtaaatatgtataaataaattttaaacaattgtcaaaaagacattataacttatacggttatagttgttaaaaaaaaaacttatacggttataccaatagataaactgacattttagatttgagttttttttttttttactttccatgtagatagcgtggaataatacctcatttatatgtatcgttagttgaaataattgacaaaaggaaactattcgtttgctgttctagataaaagcctttaattgagaaaaagaaaatgcctccagctttgacccgttttgcctataaaaggattctctaagatatggactttcctcatcttctcgggtaaacagaatcaactagttttgtttttcctctttcaaaaatgcatttctcttcgtcttcaacatcgtccacttggacaatcttaatcacattgggatgtcttatgcttcatgcatctttgtccgctgctcaactcacccctaccttctacgataggtcatgtcctaatgtcactaacatcgtacgagaaaccattgtaaatgagttaaggtcggaccctcgtatcgctgcgagcatccttcgtcttcacttccacgactgctttgttaatgtaagatattactttttatatatctatagcgttgcggattactgagggccatcttttaaatattagtaaagcagtgtaaaaagtaggaaacaaaagtgataacaagtgtattttgtcatcagcagattcagcacacgcaattgtcttagttaatactctttttgctcaaagactaaatttcacgtagttagatgttactagttgttaactgcttttctttttctatattgaaaattaatattactcatcgacagtgatgttactggttagttgttaatttcttacacaatgatgatgccaaaacatttatgcaatcggattcacgaaaataaagtatccgtgttacagtctaaggaattgcatggtgccgtaccaaacacgatagaaatttaagatccatcaatcatttttcttttttggttgagggatatatatttaaaaaataattctaaaatcatgattattaatttttataattcaattaaaattttgatgaatttaaatattttaatgtgattatatataagtatttcggtatacaaatattatttcggtatggtttattttctattgagttaaaattggttaaaggagtttctctatcactttgttttcattataatttagatatttacagatataccttcactgattacttgcttcagaggaacaaatggttttagtgaatggcaaaaaagtttttaatacattcatgactaatgatttgttaaataaatttttggactttgaaagggttgtgacgcatccatcttgttagacaacacgacatcatttcgaacagagaaagatgcgtttggaaacgcaaattcggctcggggatttccagtgattgatagaatgaaagctgcggtggagagggcatgcccaagaaccgtttcatgcgcagatatgctcaccattgcagctcaacaatctgtcactttggtatgctccattgtcccatattcatttacaaacactgttttcaatatgaaaagtattcaatattaattgaaaaaagcgcgtggtcccgttaagaaaatttgacaaaattaggtctcatatcactagctttgatatcatattaacccaaaagaataatattcaacttttttctcaagaaatagtggatatataaaaatttactttgtgtatatatatctaatcaatgaatttatattacatgactctctttttctctttacatgttaaaaataatctcaagaaaatattattgtaatataatggttattatactataggcaggaggtccttcttggagggttcctttgggaaggagagacagtttacaagcattcctggaactcgctaatgcaaatcttccagctccattctttacacttccacaacttaaagccagcttcagaaatgttggtctcgatcgtccttctgatctcgttgctctctccggtaattaacaaaagaaaattaaacaccattgatacaatatcaattagcgatagtttattactaatctaattatggtatttgttttgtttaggtggtcacacatttggtaaaaatcaatgtcagtttattcttgacagattatacaatttcagcaacacaggtttacccgaccctacactcaacactacttacctccaaactcttcgtggactatgcccccttaatggcaatcgaagtgccttggtagattttgatctacgtacgcctacggttttcgacaacaaatactacgtgaatctcaaagagcgaaaaggtcttatccagagcgaccaagagttgttctctagccccaatgccactgacacaatccccttggtgagagcatatgctgatggcacacaaacattcttcaatgcatttgtggaggcaatgaataggatgggaaacattacaccaactacaggaactcaaggacaaatcagattgaactgtagagttgtgaactccaactctctgctccatgatgtggtggatatcgttgactttgttagctctatgtgagaattgtttacccaatatgtggctacaagaatacatatatattaatgaataaaactctcaagacgtttacttgagaacatttattttagttctctccttttctagaagtgtatatacgccaccactaggtgtctctcactcaaggagaagcagatttgtattattaagctcattgcgcagtttgtggcggggtatgggaaggtgtttcaacgggatttgaaggcgataattgttaagagccatgagcagtttgactttttgaagccaactaatagcaacttcggtctttttaatgcccttgttacttcgtattcacgagtattaaaacattccaagggttctccctcctttcttgatcgtattttcgaccatcttcgattggagaagctggaggagggaagggatacggttatggttgatttgtttgactttgttggaggagggagtagagactgctgcgatcgattaacatgcttttgtgagtggtgttgaccgtttttctcacattgctgatgaagattattctgctgccatgccaccacctgaacgcctttcggtgatgatcatgaaccgagtagcacaaacacagcctgatatggttttgcagcttccactgggatctcagcttactagtgaatataaagtgtaggtgattcttttaggtctcctactctaaaaagactaacattaagagtccctgcaaaggggattacactcaaggagcttggtgttatgaagctgacagcgcagtcttcggtgcgatatgggtttgatttttggtgtggtttatggaagagagtgtatatgaacccattgtttcagttcttgaatccttccgatagccgttccgatttttacaatgggtttactgctgcgtattccagagtgttaaagccttctaaaaagctgaagaagtttgatgcttgtacggcgaccgtgcttgaggggtttttccaccgtcttcacctgtttaagctggaagagggagtggaaactgctatgattgatttgcatggttttgtgtatggagttgactgttttgctcacatggcagatgacaactattctgctatcatggatccacccgaacggccttcgatgatgattaaccagctaacacaaatccaacgtaatgctccagctcctcatgagaagtgtctaaaacgtagctataattttccttatgcatttggtggcgggatctcactcaaagagcttggtattatgaagttcacagctctgtttgtggcgtgttacgggatgcattttttttgagatttgatgaagaaagttgttatgaaacctcagtttaagttcatggagccaacaaatagcgtgttcggtttatataatgttgttgttgatgcgtattctagagtagtaaagccttctgatgatgcttgtacggagaccgttcttgtggattttttccgctgtcttcgatttgagaagctgtgatttgatttgcatgctttatgcggcttccactggaatatcagcgtatgtatcctccttatctttatagttatggtcagtctgcagacgcttcaatggggatgatgcaaactgcacgaccagaggaaccagaggcaaagagacaaaagtttgacgagtcagctcttaatccagaaggggctgttcgaaggcgtcacagtcgatggcaataagaaaggtttattgacttccattcaaacaagaaattgtcacagagtttcgattgtttgtttgtattagctcttttgcttaacacttgcatgttataagaatgcgttttcattcataaagaaacaacagttatttgtgttatagttagaattcctttgtaagttatacgaaaaaaacattaactcaaacagaagataacccacaaacttgaaaccaataatgggttggaacttcaatgcccaatttgtgcagagtaacccacaaacttgaaaccaatatttaacacgaaattacagcgttcaaaaatcaattgaaaaattgcttgaagtcactgatcttactcttttgcttagatctccaagaacttgttcatatttgttccagaaacatatgcattgcttgtttggattttggttcatggaactgttctctgcagcttcacagaagattactacagcgtcaacattccctctgacttgttcattttggttttggttgtgtcgactggttcgttttcgggaataatagttttcttatttgtccctctgcgttttcttctgatgttgcctgcaagagttttgattggcatgatatgttaataccatcaattattatgtcagcacggtttcttaaaatatcatagatcaggaacaagatcttaaaacatgaaaggaagaacggatgtacccttgtcgagaatgcaaatcgcaatgactcaatctttgctcctgcgcaaagcctgaggtcaaaacctagggaatctatcccaatcagcttcacttcctgcaaacaaaaaggaatgacgtcgatcatctattcgtacacagccaaaacctacagagatatcctgttatattccagagcttctagagttaagttgaagctatttacctctgcttgaatactgttatgtctccaacacagagatttgagtgcttcagttattttatcaccagattcttctaaacggcttatgatttcagctgatgcatgagcaatagcatcaggttgtgcttttctgacatcttccacctcaacttcagtctgttcccaaaagtttaaaagatactagtaagcataagattgcaacaaaaagaagagtttacataagaagtgaagcttgaaaacgagaatcatgagatttgccaatcaagaaacaaagcaagagcaagcgtaacacagttttccagatatgcgacaatggttagatagacgagagttttgcaagaacatgaataaatttacacagaaaagatggaggctatgttccaaacctgatccccttgtgctgtgataagctgaattcttatcatctccagcttgtaaaacgccaccacatttcttgctttttcatcctgtgatgaatctatctcagattcgtcaccacctgccttactattgtcttcaagcttgtccactaagttttctgcatccttgtttccgttagttgtagaattgctatcagcaagtttcttttggatatctgaataatcttccactaagatatgactcaaaagtccctggatagcaaggccagcagacggctgatccatccaatcaacaggatcatttgaagcaacctaaatttgacaacaaacaaatgtgttaaaagttaacctcagtcattctcttttagcctcaggtttgaaaatgatcttgcatatcgtttttataaagaaccaaaacactttctttttaatgaattctaaaagtcaacctcagtcattctctttgcaaaaaacatgggatgacaactcctcattgtttccaaatttgcccagtctcccagcgattcatcagaatcagaatcatcatcatcctcatcatcatcatcatcatcatcatcgtcttcatcttcatcctctaaaatagcaacccattcctgaagtcaagaataaatagtgaaatatgctaagacatggcaacagtattcctgtcatagaattccttagtgacttaatataaaagaagaaataaaatttgttaaacctcctcatcttcgtcttctcctgtatcctcactgtcatcatctccactttcatcatcttcagtttcaaagtcactatcagaaagtcccatcagctccatttccttgatcatctccatcgtatcaaaaccaactataacttgctgcaatgcatccataacatcttaaaggttagtacagaataagatagaggataaaaactacacagatcagtatagtcagttataatcaagagaaacatattgaagctagaaggctcatattgatgtatggatgtgcgtttcaatttaaaataaaccgtcagaagatacatgctttagcaactgcaacagaaaaaataacagatctctcatagacaaagcttggatttgaagcacttggaacatataataatgtaaataggatatcaatgtcttgtgcaacataccacataattattttcagaagtaacggactgcatgacgtcctcatcctcctttacttgaaagtataaatctgcaaggcattagggtgattcgctttaatcgtgacgatgttaggtagattaaacaatgacatggaactaaggataattaaattttatcttacttccattttgatctgttatataaggtatatctggccagagaatattctcatgaactccatcaccaatagaacctgtaagcatcagggttcctttattgttcacctgaacaagacacactacgggaaatgttagatgcacaaaaacggatcatggacaaaaataatgacaggaaaactgaaaatggaggaacatgtattcataaaggcaatatatgtaatgcagacttacatagactttgagaagataaaaaaaaaaaaaaaaactattctctacagaagaggattagaggactactgaaaattgatagatgaatgttgaagcaacctataataggaccaagcaaaactactaaatgcactaacatgtgactgcaacaacaagcatgtaacataaggcattggtctaacaatattttcaccaaaaagatagcttatgctgattgaaagacgcaatataacacctcaatgatggttctagtagtttctgcaggtgaaagcctggaatctccatcattctgtggcaaagaggctctgatttcttctgaaggatgataccttgacttgccagtttgcttttctggatctgaagctgaatctacatactcagctgtggcttgagttcgattcttccgtaggtgttttcttgttatatagtcactgttgtacttcagaaacccactcctagaaaagtgcatatatgaatgtgagatttacattatataaagaaaaccaaaatattcagaatctgtaatttcaaaagaatcgatctttgaatgtttccacggctcactaaagaagcatctaacttagtgctctatctccatataatcatataatcgaggaacatccgcttcacactaaattcaatattcacagctgacaagaaacatattgcactcgtattatacactcagcactcaaatactagaatctatcctcctggtgaaacgaaaactctcaaaactattttacaatttaatgacggaacaaagtgaatttttcattacccatcaatatggtggatacgttgaggctgaaaaacgcggcgggacgcataatggaagcagtttcctccctcctccgagctcggtgctgtacgatactctacaaatttagcatgagacgattcagacgaatgaacaaagactctttaagaaaaacaaaaactcaatgaagatagaattgaagaacagagacataaatagagcttacggagtaacgccgtcgacgagcaaaatccggtggagagacgaacggccataaccgactcaatcatcggtaaaactactgttatctctaacctctcgctctctctatctctgagctcagaagctggacaaagatttgcagattaggctatcatctatttggtgaattttccttaccggtgatgacgtgtcatattctcattcgtcgaaacccaactagatattgtctaaaaagtgtaactttcactttcaccaaaacgctgcgtttttgtaaagttaacatttattaatttttggttcaccaatagtcaccacaagagcaaacaccgaaccggaacacatgaaatctattagtgtctctgatgattatctctcgagaagttatctgtgagataagcttagctgcaacatgacagtctccacatatcctaagattcttcgttattcttatggtattattactgtcttcttcttcctccttagtgttcatcagagcaaacacaatggctaatttctcactgtgaacagctaaatgcgtctctttatcttcctcttccacatcgtgaagcgctgactctgaatcaggaacataacctaactctttcattttctttactagaacatccagctctctgtatatctcatcggattgcgggtgtgacctgtcgcctactaagaatgtatgaattattctgttgacctcaacattgcttgctccgggattcttctttaaccctttgctcttcattatgtttctgatgttagtcacttcttcccatcttccagcctttgcgtatatgttagaaagcaatacgtagtaacccgattgctcgggtgctaactggaaaagtttatcagctgctagtagaccgatgtctgtatcagaatgcaccctgcaagctcctaataatgctccccaaactctctcgtttggttccattgacatatcttgtataaatctgtaagcttctttcactttcccggctcggccaagaagatccaccatacaagccaaatgctctaacctaggagtgatcttgtaatgatctgtcatgagtttgaaacaactcctaccttcttctagtaaccccgcatggctacaagcagcaagcgttgtgacaaacgcaattgaatcagggacgagacccgaatcttgcaatttcgaaaacaatgccactgcgtcacagcctcgtccgctgaatccataagctgaaatcatagctgtccaagacacaacatcacgtgacttcatgttctcaaacacatctctagctttctctaaacatccgcattttgcatacatgtcgatcagtgcattctctaacaacagatttggtatcagcttcttcctctcaatgtatccatggattttcttaccaagagacagagcagaggtatctccacaagcaggtaatacacttgtgattgagactgcatcaggttcaaacccatcagcctccattcgggaatacaattccacagcttcaacaggcatcgcatttttcatatacacaccgatcatcacattccatgaaaccaaactctttttccccattttaaaaaacatatctttaacatacataacgttttcagttgtagtgttactcactgctggtaacagactagccatcgtaccagcatcatggcttatcttcacagactccatttccctacaaacctccaaagcatcatcaaatctctgattttgcgcatacccaacaaccaacgagttccaagacaccacatctctcctagacatctcgtcaagtacaagccttgcttcagataaaaatccacactttccatacatagaaactaaaccattcccaacaaacaaagtcgaagagagcccaacttttgtagcagacccatgaattttcctcccaatgacaatagtcccagagcaagaacacgcctttagaacacacgggaaagtataatgatcaggtctaacattacaaccacacatcgtcccaaacactttaacaccttcaccgtaaaacccattattcacatagcttctaatcataacattaatgataattacgtttctctcaggaatttcgtcgaacaccttgcgtgctgacgctacatcttttagagaagcataagctctcataagtttaacacccaaagaagaattacaacgtagatcttccaaaatgattcttgagtggactgttctaagtgttctgatatctgggtaagtgtcaagtacctgaccaagtaagaaaactgtctcctgtggtgatttctgatcgagttccaatttgggtagggacgaagatacttttcgtgattgaaattttctgaatttcggaaaatggagaagatggagatcgacattgatgcgtttcatgagctttgaaatcgaacctcatcactaacatcaacggttatatatatagcgcgactagcgagcgcaaatagcaacggtaacaatatgtgtaggtaagccggttatagagattcaaccatcatatatagttgaaccggatcagaccggtcttacatgaccaattgggtttatatatctgattttttaacaacataaatctaataatatatgagtcattaaaacttggtttagataagtcatctttgagctttgtaaatcagtcacaaggttaatagtaaaagttgcagtgacagtgaggtttatgtaaaactcctcctctggggaaaaattaaatttaccaagtacatatttaagaattttcagaattgttttattttgaaatataaatcgaggacttttattgatagattgaagtattttttgctttttgctttttgccccaaaaaagaaagatagaagtattgtctatctttttttgtacttcttattgaaaagttgatatcaaaattaagtaacaccatatgaaaatgagaaagtgacaatcatgtctatcagaacaaagaacattcttttgcactacatagtaaagtaaaataaataaagagagagagagagagagagagaccaagtctccttgccttcttttcatccatcagttactagtctcgatcgatcattgttccacatatatgatcgacattttctcataaaaattgacctttagaaagaaatttagacaaaccagaagtcacccgttccgccacgattacaaaagatgttcaaagttctcaataccgtggggtactacctatgtgagtttcccaattttctccttcatggttttgttattctgtcgtgtcggattttaacgacttctgttcattcgtaactgtgttttttcccgaacatacatctaaaactctcagattaaaataaattacataactcaagatcatgtcatttttcaggttgtaactgtttgagatctgtcaaagtagattcaaaaaggatggatatatgttgcaaagatataattagtgatcattcaaaaaaagatataattagtgatctaccagaagctcttatttgccacatcttgtcattccttcccatagaagattcggctttgacttcagtactttcgaaaaagtggcagcatctatttgctttcagaccaaatcttgagtttgatgacgctgtagtatatcttaatcctgacggagaaagaaatgagacaatatttgagaatttcgttgatagagtattgagtttgcagggtgattatcctatcaacaagttctctctaacatgccgagattttactgatccaacttgtgtatctcgttggatatcaaatgtgatggaacgcggggtatcggatcttgatctacgttgtattgtgtattgggataatggtaccatgcctccagatatctttgtgagcaaggcactggttcatctgagaatagaaactggaaacggtgccttcattgatgtggaagatgtttttcttccaaacctcaagactctatatcttaataaagtcttgttacgacacagtgataacggctttgtgaagcttattactagttgtcatgttcttgaggatttatttattatgaatatatgttgggatggttatttgaagcgctctctatcttctaaaaccctcaagaggctaacgttcttttgtgaagacgtccatgccgtaaatccggagagtgtttcgtttgatacacccaatcttgtctactttgtataccatgattgcgttgcagacaagtataaaaatatgaattttgattcacttgtttacgctagtatctgtcttcaaatgacatctcatcagcgtacacatgcaagctatgaacatttggtcggtaatgcaacagattttcttttgggaataagcaatgttcagatccttgaattatttgccaataccattgaggtttgtattgtaatcccttcttcttcttttttggctacattgaaacaaaaagaagacaaacaagttagtgttacatgccttgcaggtacttactttctgttgtgaacaaataccggtattcaaaaacctggtttgtttaattattaagactgaccaaaaagcaggatgggagtcattgccggttctactcaaaaactgtccagatctagaaagccttatcttcgatgtactaactcataacctttcatatattgcatttgcttacacaaatttgtaaacaaaaattgagtttgaagttggttactctacgattcaggggctccatcacaacgatacaattaaatgtgaggatgttgacgggtgtctatgcaaatcttcacgtggcattcctagttgcctatcatcaagtccggtgcagtttctaacgatatggaaatttggtgaaatttgtgatgactatgatgacatggagaagcagatagagctcgtcatgtatttcctggagacaatgccgaatcttgaagaaatgaaattgttctacgatacacaaatttatgaagatgtgataagcaaacttcagatgttagtaacctcgtcgaaatgcacagtctatataatccccgaggtctaacttctacgtgtctacgaatcatctattcggtatctactaaacggggtttgttctgtaatatgtgtattactctttcgccttctcaatacgcattttcacttttgtgttgaatattatatactttatgttttctcaaaacttcaaaatttaagcttatgtcaaaccaattgttctgatattgcaaaacaaccccaaatcgttacatttaaatttatctttggtcctctcgcaattttgtcgtcttcttaagtgcgagcgaaatcgtttctgcattttgtaggaggagtcatgaaattgtacattttgtcttacccaccgagaaagcatgagcacgaatcgaggcttagcgatttcgtttgctcactaaaaaccctaactttcactttttcccactctgctctctgttcttccgtcgccgtgtagaaatttcgatcaggttcgtctctttgtttcattctacagcttgtttgatcatgatgatgatactttgagattctatgtgtgcccattggctctaaagttctcgttttttagtctctcctctttgtgctctgcgtttttgtgctcactggctctaaagttctcatttttaagtctctgctttttgtgttctgcgttttgcaatgtggagaagaagaagtgttgctttattatagcgttttcttttctctaagcttttaagatactaaatatgagattttttatttttttggcttgttctaataccaatctcactaatcttttactgtttacagggacttgagacgcactttgtctctcagatccttattcaatgctcgctgctaccaaccatcttgtagcggtatcattcaacgtgatgatgtccatgaagagaagccacattacggctcttttcttcatcagagatccttcagcagttcgatgattctctctcagcagcatatgatgagaagcccttcacatttcccactatgctctccttttggtgtctctacctatcggcctatgtcgacttcacatatttcaggctcagatgagagtggcgatgtgaatcatgttgctgaaactcttactgatttagtgcagcaagatacagtcatcgaagttgccgatgctgctatcgattcctccatccaattagattttgttcagcagatagttcataatgtgcattcactcacaggcttaaactggtaagaaatcttcttcttttttttgtgttggtcaacttttaaatcatgtcatccttggagttattgttggatcacttttttgtgtttttttacacccaaaaatgaccatgtcttatatcaatcatctctgtatgttctgtgattgcaggtgggcttccattgtttttaccacctttctaattcgaggagtgacaatccctctcatgattgaatgcgaaagatggttttcaaagaggatggtaataaaacaatgttctttcgtaaacacatgagttttgtgtctcaaccaaccaaaacaccgttcttgtttgtgattggcattactttctatttatactgttcactgtttgaaacaccatcatcaatcggaatcataatgggagaactagaatcaacaagcttaatccttccatgttatgatctctattcattcatcatatcctaaatacattgtacatttcccctaaaatctctttcttataaaacaacaatacgaatataaatggccaagcaaactacaagcagatcaatggagattttcagagtccgatttcttgtagataagcttggtatgaagaatagtatccaacattgaaacagcttcaacgatattcttgcctttgtttaacatcacacagctcgccctgcatattttcaaaatgcaaaattagacaaagaaactgcaaatcttacaaagatcatgtctaatgcaaaatattttacctttttgcatttgcagcatcagtaatctcagctctagttggaactccggatttcacaagtgattcaagaacctgagttgccataatcaccggtacacgagcagctttacaaatagctataatctcctcctgcatattagccaatctctcccatccacattccactgcaagatcacctctagctatcataattcctaaaggattcgaacacttcattgcttctaaaagaatcaaagacaaattcttgaatccacttttcgtttcaatctttaaaacaataccaagatcatctagttttcttttcttcaactcttgtcgaagaacggttatatcatggacatcacgtatgaaagaaataccaaccatatcagcatgtgaagctacataatcaagatctttaatatcttttgatgttaagcctttgaaatggatatcgctctgcggtatgttaatggacttctctgatcctagttttgtaccttttggacgtgcatgagttatggagacaattacctctgaaggacttgttccttttatgactccccatatttttccatcatcaaaaccaatggtttcaccaggcttgactgaatcaaacaaataaccggaaggacaagttaacctatgagctcctggaacagttacagatggttcatcgagcgatccttctcgggttatgactagtaaatctccaacttttagccttacaaaagattctttgggaggaacatctactactcgtccaactaaacgtctccctttctttcccttaacacttaactcagttccactttctatgtaagcagtgtcgaaacattcagccacaaacccggtactgttgaaaacatgaaactcttttgagattttaagtctcctctttctccctctagcgtcacatagtcttatagaatcaccaatttggagaccagcaagaaaatcttggccttggaccgatatagtagcatcaggggaaacatgagcaggaggttctgttcctgtgaggcagagccataccaaagcaggagaaacaacatttccataagcatctttctttggtgaaattttcatcacacacggaccaggttttaaggtaccagttctgagttttggtcctgctaaatccatatgaacgcgacatggcatctctaacatctgagaagttcttcttactcttttgatgatctcaccccaaatacttggatctccatgtgcacagtttatacggataacagatgttccagctttaagaatatcagttataaatgtttcactcaaagttgcttcttcaccaatagttaccatgatatgagtacttcttccctcacgaagtttaccaagtaatgactctttgtatgataataccctccctttatcattcttcttagtactttttcccttgggatatacattagtccaagactccgtcacagcgttttgatcgttcatcaaaagattaatagaggcgttaaggtgggcgagaacatccagattgttgttgtctaaacttgacagaccaagagaagctagatgactgttgagctgctcaatgtccagagatctcaaagccatataatgaactaagtttgttgcacattccagatacttactgcaacagacggtactaggaaattaggcgaaaaataagtaatgcaaactatatataaaatggttaacaaacctgtcacataagtgtagttgagaagcattccatttctctgctgctaagagatgtgaccgaagagcattcagtttttcgataacactagccacattattggccccattgcttccagagaggtctgcttctgacttgagatgagacatagcatctttagaatctggaaagtcaaaactccaggtacattctgtggaggtattatcaccaaaggtggcttccaatctgctgaaactttcagcttcgcctttcccgcgagctaaggcaaaagctaaggttctctgaataggaagtttcatgtgattaagtgataatgcataacttgtcttcttatgttggttgtttatgtgagacctgctggagaagcaaaggatcttgtctctcaacaagtggcttgaatcaagtcctaccatatcgactaattgaatcacctgagaatcaaaacgaaaaaggagaaactgttatagattgacacagaggttaaaacctaggcataaccacaaagacaagaaacgaaacatgtataacgcaaagaaagaaaacaaaaaaacaaacaaattccaagttcgtgaaaaggacaaaaacaagcctaccacaaatcaaaatccaggaaacaaatcatatctaagcaaataagttttctaggctactggaattgagaaaatatctggaaggaatcaaaatcaaccgaaactcattccctagaggacaagaacatgagaaatacctttgttatggagaagcgctttgttcagataatgtcttcgctctcgtcttgaggagaagaagaagaagaagaagaagaagaagaagagaagacagatttttcaacgaagaagaagaagaagaagcagaagaaagaatgatgaagaattttcttaatgaaataaaaaaagttgtggttaaggataaaaagggagtgtggcgagcgcgtgtcagattcatcttctcggggaatctagtaacacggacggatgaggctgaaaggtccccattataaaacgacgtcgctttgtttttctaaacctattcagacaagagacccaaagatagaaaaaaaaagaccggtccatgcggtttaaccaaaccaattccgtgaaaactgattaatttggtttatctattccaacaatggaaattgtttggtaaattttaaaagagtttgggaaagtagctcctattgtaaaagagttttataattagacaaagtcgtttatgaatatatgaaacacttaactgactatttcaaatttcaaatatatgtataacttttaaccatgtaagaacaaaaaaataagaatggctaagtttgcttaattagattttgtaaaatttgacacattatttctaaattacattttattgaaactatgattcatttattggatgttttttagaaagtttgtgaaaattattagcggatttgtaaactgaagaatgaacataaaccattcaatcttttagttacgggaataatgaaacctataaatcggtacaaagttacaaacacatttctaagcataacatttgttcaacacaacactctcaataggaatcttatccgtgggaaaatcacagtctgagtccattgtagttctcttatccggtaacaaactgcacggctccggtgtaaccctactagtaactccggagacatccgtgcagttccactgcagcttcttcgggtccggcgacaaagctatagtcacactcgacatgcataaacccgtaaatggaccattcttgatcctttctagctttgccgaaattgtaacgttttctgcggtcatgtcacggtaatggatattgctaatctccggcaacgccttgggatcaaacccgcctacgggatgcagcttatacgaaccggtcatccagaaaacgtatttcatcgtcttcatcgtaaatctcctagcgaaaatgtctttgatgtaaccgccacgtcctatagcggttttgattcggatagcggattgtgtgttgattagtgtcacctcttcagttttcggagaagatgatttcgatcaacaaaggtcttgatatcgacttgaaaccgccacttcgatacttcaaccaccatgacttcccttgtccattagtcgttcttttgttacctaacaacaaatttgatcttataaactaaatatataattttgattcaatctcatatatatatatccatcaaaccattttaatgatttaagttttgttgtgcttaccggtgataacaacatcggttaggttacttccgtatactaaaccagtaaaccttgcatctccgtatgacggcaaaggtggaatcataggatattcagactcatcctgtttgttacaaacgaaataaaaccaaatgtgattatttatctcaaatagaatggttgatattttttagtgcattcataaataggtgtacgatactagctaaaattttgagcttagatatatttattacctgagaagcaagaatagttgcaccttgctggataaacaaagtaaaatggcttgtgaggttgaaacttccggtgagccaactccccggcggtacaatgagttggactccaccgtcagccgccaacggagtaagcttacttattgcttctcgaaacgctttggtgtttgagggttttccatctccaatagctccaaaattcgtcaaaaccgcactgtgtttccggcaattcaaagccaaatattcaatactcttattgcttgttgatcccaaattgctttggatacgggattccatcatcggaaaaccggatattgctaataccactagtatcttaaaacttgtctgaatcatcttcaactgtaataacttaaataaattagaatgcttctctttatttatttttaaaaagaacgatcacattgaacccaaaatcctcaagatttaaaataacattgaatagaaaagcctcatttgtgtatctaaatctcaaagtcaccattcaccaataatcattacaagaacatttcccatctttaaaatgatgaaaacgattcaaatccctcaacacaatctctctaccagagactgtcgatatatatttcatcgcgttatggcaatctccgcagacccgtaagttcttgaacaccctaaccggtctagatttcgacgtgcttataagcccaaacgcaaccgcaattttctcgctgtgctgatatagtaacctctccttctccgcctcatcattctcctcctctagcttgtgaagaacaagatccgtatcaggaacatatccgcagcgttttatttctgtaattaaccgatccaattcatcatatatttggtgagcattcgggtgagctgtatcacctacgtagaacttatgaattttatctcccacttctatccaactgcaacctccttctttaaccaagtttctctctttcatcttcctcctcatctccgtagattcttcccatttccctacatagaaatattcaacaaagtgtcactttcacacaaggtagatcagtagaagaaagagttttatctgattgtgtttgaattatatagatacctgcacaagcgtatatgtttgagagctgtatataagctgcaggctcattcggatcaagttctaagatcttcctcgcagccaactttccgagttctgtgttactgtgaactctgcaagctccaagaaacgtacgccatactaaaacatcggcttggaagggcattgtgttaatgaactcaaatgcgtctgtgagaagcccggctcgacatagaagatcaaccatacaagcatagtgttccatcttaggtttgatcttgtggtcttcatacattgaattgaaatgtctccatccttcggagaccaaaccaacatggctgcatgccgataagattgcaacataagtgacctcatttggcttcaccccttcttctatcatttggttgaatgtttcgagtacccttatagcgaatccgtgtttagcgaaacctgtgatcattgaagtccacgagatgacattacgattttccataaaattgaagactcgggaagctgtgtcaatgcttccacatttggaatacatagagatcaaagcattgcagacgggttgattgcacgagagcccgagtttaaccacctgagaatggatttgctcgccttttcttattgaaccaacatttgcaactccactcaacaagctagcaaatgtgaaagcgctaacacctaattctctctcagtgatctcacttaaaagcttaaatgcttgctcaaaattcaagttcctgcatgttccgtcaagaaatgtattatacgaaaccaagttcttctcagaaagtgactcaaaagctctctgagcatcttccatcctgtcagatttaacaaacatgctgataaccgagtttgcaacactgctattcgaagcaagccctcttttgaaagcttgaccaagaacctgtttacctacccgtggatccgaaagatttccacacgccttgaatgcactcgagaaagtgaaatgatttggctcaacatgaccttgcgttatcatttcactaaagagattaatagcctctgtagcgagattacagtttttcatataaccagtgatcaatgccgtccacgacataacactatgatcctccattctatcaaacaccttcctgcaatcatctaccgaaccatccgcagaacatttcgcatacatatcaactaaactacattcaacatcatccacaagccctgatctaatagcccaagaatgcaactgctttcccaaagacaagttctccaactcagcacaagccgaaaacacagagcttagtgtgaacttatctgattcaaatccacttaaaaccatatccaagaaaaacctaatcgcttccctaggaaaccccatctgcatacaccgagtaatcatcaaagtccaagtaacaacatttagttcagacattttatcaaacaccttatacgcattctcaaagctattctctcctttcacaaacatgtcaatcaaagaacaacccacacacacatcagattcaaaatgcccagtcttcatcaaaaaccctaaagtcactctcccaactccaacaaaatccgaattcgaacaagctcgtatcaccgccgtgtaacaataatcattaggcaccaaacctaactccagaaactcaacaaaaaccttaattgcatctaattctcttccgttgttaccgtaacaagccatcatcgcactccacgaaacaacatctcgcttaccaaatcttctcatagtctcaaacacatcttcagctttcgccgaatctccagatttcgaatacaagctaatcaacgaattgtagagaaccgaatcaggctcgatatcaaactcgattaatcgagcgtgtacgagtttcccgagacgaaaatcgcgtgctcggatacaagatttgagaagtgaagagaaagtgactgagtccataggacgaatcccatcacgagccatgagatcaagagctgaaaccgctccacgaagatctccggcattgagatgacggagaatcaaacggtcggcgacgttgatccgatttgaaacggacggttgagatttaatcggaagtttggcgggagatggaaacgaaaagcttatcatcgccattgttctccaatctaaacgatccgttactgttaattatcaatatcacacaaaatttacattatagtcccttaagtttgtggaaattatcaataagacacaaaactattaatttatcaaattacatacatagttcataaaccctaatttatagatatcacaaaacccagacttggaatcagtttctctttacttccctctttctctgagctatggagattactgtaatcgcttcttcctcaatcgatgaaggaattggaagttgggatctcaaaaccgggacagagcagcttcaattcaagccgtgtgcttctccggcgcatggtctcaccgccgtcggcgaaaaatttctcgcctcctctcagctctcggcgagaaatacttctggctcgattttttactggtcttggactaaggtctcattctcaaacttgaaatcactgtttttttgttctctttggatagaaagtttgaaacttgttttgaattgtagcctcaagctgaagtgaagagctacccagtggaaccaataaaggctcttgcagcaaacaatgaaggaacttacttagttggtggtggaatctctggagatatttacctttgggaggttgcgactgggaagttgcttaagaagtggcatggtcattatcgttcagtaacatgtttggtgttctctggagatgattctttgttggtttctggatctcaagatgggtctattagagtttggtctcttataaggttaaaactttgtgtattatcatgcttgtttttttgcaaggcattgtcttttattctgattctttgctctttgtggttagttaggctatttgatgatttccagaggcagcaagggaacactctttatgaacacaattttaatgagcatacaatgtctgtaactgatattgttatagactatggaggctgcaatgctgtgataatttcctcttcagaagatcggacttgcaaggtacttatttggatcactaatgttatgcatttgttaactgcaatgaaagtttagctcttgtattgttaatgagattcattttgatatagctgagaaatagaacctgatatagcttttttatttgatgaccttggttggatttgtaaatccatataggtttggagcttgtcaagagggaaattgttgaaaaatatcatttttccttcagtcatcaatgcactcgcattggaccctggagggtgtgtgttctatgctggtgccagagacagcaaaatctatatcggtgccattaatgccacaagtgaatacgggacacaagttcttggttcagtatctgaaaaagggtactaaccgttccctatatttcaatcgttgtcaacaatcctagtcaatattcttcttacttttaacatcttctaaatcataatacatgtatttgaactggagcttgtagtaattcttgactaagatggtatttatgagatcttttatatatttgaacattagctagtagtaatctatttgactgctgtggctgtttgactgtctaagttaatctctattgatcaataatttttgtctgaacagcaaagctattacttgcttagcatattgtgcagacggaaaccttttgatatctggatcagaagatggtgtggtttgtgtttgggatcccaaatcacttcgccatgttcgtactctcatccatgcaaaaggtatatttgctagcactttcttctgtttgagttttacttctacaaaatgaataagtcaatttaacaaccctttcttgcttttcaaacttttttcttacaggttctagaaaaggtcctgtgaacaatattcaaattgttagaaaaacgattgttgctaattccaacaaaacccaagtttcctggaaaagtcgtggggctttaatcccaccgcctttggaaaaatatgaaagaccagtagaagatactatggatggtatcgttacggttgatccgccgccattttctgatgttcctgtttactcttctttcctcagtgctgaccttattgacgagcaagttaaagaacttcaggtttgtgtttcctcactgtctacagtaaacagttttggtaaaaatgactcaaaacataatattttctcggtttgtttgttgtttcagcaacaaggctctgcagcaacagagatggaaatggaaagactgaaacttgaatacaaaagatctttacagatgaatgaacaatggcagaagaactatgagaatttgcttcaagtggttatggaagaagaacaaatcggtggtaccaattgaaagctttttattgttgtttctacacatttttggaattacattaagagatattgtcaagtggcatatgaagtcgtcactaaagatatgttttatcaagatcccaaatttaggtatcatagcattctgtaaagtagcccagcgatttggtaaagtagccaagccactctattgtggagaatcctgagataatcccacaaacggagagactctctttttgtgacagcggctttaatgcttcggagagattcttcccagtcgtcacaaagccgatgaggatcacttatcaccgttggatctacgattagtgtaattgtcatcttattcatataactttgacaatgtatcgtcaacgcctaatcaaattgaacaacaaaaaaaagatttacatttcattagatagacataacaaaaggaaaaaatagaacaatgaagtttgtggaatcatcattttatcaacttttatgaacaatgataaaaataagcaacttacatggggatggccataagcacttgaggcaaagtaagtgatgggatgtccatagaagctaacttcttcaacgggaccaaccatgttcgaaaacgtcatcgttgtgtttgacaccattctgtttattatactagccgccacctgcaaattaattacaaattagtcaataatcatcataaccaaagtagtgtcaactatatcaactaaaactatttgatcgtgttgcttttaattttaatgaaaatgacaatatgtaatgtacctcttcttatatgtaataaattattattttttctgaaatcaagctttctcgtctatactaaacatatataagatgggttagttcttatttaaaatgaccttgattccaagcaatttgacaatgattctacagaatatgtatgttagcattgcgccgtatgaattcttctttcgactgatggtcttctgagctatttcaagatgttccaatgggtcatcgcgtaatgcgatagaaaacggaaatactacatagccgaaccaatttccccacctacatttagaccctttctccatcatatctgctagatcctgttttaaaacaaaaataaatttaaatttcactgatgattaagtacacttaacttgtaatcaaataagtcattaactttatgtgaatttacctggattccagttgttggtcgtaagtttacaagcagagctgatcttagccttattctcttaggcagctttttttgcttcctatttttagtttcttcttctcctattagtttatcatgaaattattgaattgtacacgttaataatgggcaatatttattaacatatatacatgaaaatagataggatcgagtataattttaattaccgtatcttctcgcaaggtatcgcgagagaccagcttgggttactccaagtacaacatcgttgatagtctatcgaaccaaaatatataagatactcataatcttctgtttttaatatgtactgtatatataaatatgtaaacgaagagagtctaaggagaaatctaaccatgttcattgcgttcttggttagcttgatatcgtcaaggctcacagtacgatgaaccaaacgcagctgtttactcttcgttgacaggaaatcacctttgatgggtgtctcggtgtccttaacgaacaatgtcgtaacaataaactccaaagcatcacaaaccgtgtttaaacccaagataaccgccgtccaaataaccttaaccaaccacaacaaccgggaatcacttcttgaaccggttgtcaacagggatgaccttgatgacgaccggtactggtacggaagactaggaagctcatcgggatttgatgttttacgcatacaagcgaggacaagagacatgattgacatgccatcaccaaccgagtgatggatctttaaaacggcgacgttttcagcgtctgaggttttcaagtcgagtaggtgaagctcccataacggcctcgaggtgtccaacgggatcttcatgaggtcagaaacgtaatcttcgagaaatgcgtttgagttctctatgttttggggtttgattttgggtacgatgaagtgatcctcgacgaccacgtttgtccgaacccatctttggttttgtccattctcatcggtcaccttcaagtaattatatatttttggtaaatgttaattgttaggaatcttacaatcattttatctagtatataaaataattcagtcattgtcacttatggattgaacatttagagtaagatttatttaaacacaatgtaaatttgaaattttgaaggtagtcgacttaccaatttacttgagaaacgaggatgcctgataaaactttccttaaagcctctgataaacacacatggatcgagcttactcttaaaaccaatcactgatatgatgttgcagttaaactctggcgcgtgaaacagacgcgccgccgggctaagtggttgctcctcttccttctcgtcccctgatatgtgtggtcgtgtctcaatctccattattttttgttcaatgtttctatctctcaaactataaagcctatctttttatagcccccatgcttatgcggtaccatttcttacgtgtataacatggaaaatttaaatttactcttttgtttacttcttagttacgttgaaattgaagtaatcaacaaatgcgttgctcatacaaaaagttagacaaagatagaaaaatgcatatcattacaatggcgaacaacttaactgcactaggcggatatatatgaatatcattggagaaagtatttaaatttttttgcattccacatttagtaaacaatattcttttaaccaatcatatcagtgaaccaaaaaaaaacgtttccattagtagtttatcggtgacatgatgcgttaatgcatttagtttttcattcacgtcatgtactgacgtacataagtatttgtacgttgatcgaaaagtcaaatatgaaaacatgtgacatgtgtatttgatcgaaaagaaacatgtggtgaatttttacacaagaaacaacagctatttttttgttgttctcatcaattcttcatattttagtgttgttttgttctgatcaaatcttcacattcaagtattgcaacgctacgcgcttctcatgcatgcatagactgataggcatacatatggtttctaattttaaataaataaaaacgcatatgaattgagatttttttttcaacagtaattttaggacgtacagatactaaatagtttaagacggcaatactaagcgtcataactaaattgtgatctaattgtcgtaattaaaagcaatcttgtgaccaatggaattttcatcttggtgcatatcaagccgcagtgacaaagttataagtatttaacaagatatattcgtggtcgtggactgatgaaaacacattcatttcgtatttagtcaaagatgagaatacaaatggaagatgaaattgtgaaatcctagaaatatggtatcaaatttgtctgttttcaagttttcatttatttttttttgataattttttttctctaaatcaagaaaaagaaaggaaaaaaaaaagctaaatctactgagtagaagttctttcttgaacaacaactttgatgcttcttagagattcctcccaatcatcacatagtttatgaggatcactaatgaccgttggatcgacggttaaggaaatcgtcaacttgttcatataactttgaaaatgcatcgtcaacgcctgatatagatggaacaatcaaatccaaaacttagtgacttaaacgaaaaataaaagagaaaaataagataaattaaaatcttacatggggatgaccataaacacttggggctatgtaagtaacggtatgtccatagaagctaatttcttcaacaggaccaaccaaatttgaaaacgacatcgttgtgtttgacaatgctctgtttagtacatttgctgccctctgcattcattcaaatttggtttatcgagtttttgttagctgattgaaacttttgtattggtatgacttttgttaatttttgaactatatttaaaggagtagttatgtataaagattaacctgaactccaagcgtgttgagaagtattttcccaaccacgaatgtaagaacagcttctaacgagttcttcttcctgtcgatggtcgacttggctcttcggagatgtttcaacggatcatcgcataatgcgatagagaacggaaagataatgtagccgatccaatttccccatctacactttgatcctttagtcatcatatcagctagatcctgtttttgaccaaaaacaaaacaaataattaaaaaatttgtgatcgattatatccatatatctactattcttctatatgataattaatttacctggattccagtagtcggtcttaggtttacaagcagagctgcccttagccttattcctttaggtatgttacttgaattcctcttagactcttcttgttctcctaatatatttcataacatatttaaaattcatgttagagtaaagtttaatgctccttaacagaaaaatcataaatatttaccgtatcttctcttcaaatactgcgagagaccagcctgtgatactccaagtacaacatcgttgacagtctactaacacgaaaatcaatgaaagcaagattaatgaaatatcatatacgtcacatctctcaaatgttgtaaaaaattcgacatgtcaatataaaattgattactaacttaaaatgtgtggagaattattttaccattttcatggcgttcttgattagctttatgtcatcaagacttacggtacgatgaaccatacacatccgtttacccttgcttaacttgaaatcgcctttgattggtgtttcagtatccttaaggaacaatgccgtagcaataaactccaaagcatcacaaaccgtattcaaaaccaacaaagctgccgaccatagaaccataactagccaaaagaaccgggaataacatcttgaactggtttttaacgaggatgatccagaagacggccggttctggtatggtagactcgggagctcattggggtttgatgttttacgggtgcacgcgaggactagagacatcatagacataccgtcgcctaacgagtgatggatccttaaaaccgcgacgttttcagcgtccgaggttttcaagtcgagtaaatgaacttcccataacggcttggaggtgtctaacgggatcgtagtgaggtcggagacgtaactctcaagaaaaacgtctgcgtttgcgttctctatgtgttgtgtttggatttttggaatgatgacgtgatcctcgaccaccacgtttgttcgaacccatttttgttcctgtctattgttgttacaattgttcaccttcaataaaatttatgcatgtttatatcaaaaccatcgtcaaacattgacaatttgacttagtacaaaaatctatatatttgtgatcaaagataacaaagtaaaaaacaaaaactaatcacacactaacatgtgaaaactaaatctattaagtgtgtgactcaccaatttactggagaaacgaggatgtctcatcaaagtttgcttaattccttcgataatcatatcaggttcgatcttgttctttaaaccaaccaccgaaatgatgtagcagttaaactccggtgcgtgaaatagacgcgccgccggactaagcggttgctcctcctcttctacctcctttttcactgttgtttccgctatttgccctcgtcttcgtcgtatcttaatctccattgtttggtttttgatctttgtttttttctctagttctttcgactcataatatttatgtccaaaaaaaaaactaatcttttggaatgttttcttactcttaattcttttctttttaaaaaaatatttattactcttttcgctcgcaaattttccatcatatgtgttacacgtcaaactttccaatagtattcttttcgttactaaattcacttcaccaataagtagcttttcttatgattaagaatttgatttttggtttattcggacattataaaaaataggtttaagtagaaccgaattttatttcaatttggtttgaacattctagttttggtttagattcgggttcgtttttagattaaacgattctaatgaaaataataacactaacgttatatttttttaaaaactttttttgtatatttaatgaaaatcctaatttttatgaattctgattaatttggatttagtttggttaatctaatgtagacttaatttaaaattaatcagaattcataaaaaaaaaaggtagacttaatttggacgaataaaaaaagaaaagatttgattcaatctaatgagcgggagtctctttcttgcacagcagctttgatgctttgtaaagatttctcccaatcgtcaagtagtcgatgaggatcacttatgaccgttggatctacagtcaacgaaatcgtcatctggttcatgtaactctggaaatgcatcgtcaatgcctaatcaaagaccaatgagatcgtcaaaacttatgcacttttacaagaaaaagagttgataataaaagagttgaaaaacttacatggggatggccatacacacttggggccatgtaagtaatgggatgtccatagaagctgatttcttcaataggaccaattaaatttgaaaatgacatcgtagtgtttgacaatgctctatttattatcttagctgctacctgtttatatacattttaatttataagattggacagtactataaggaaaaacaaaaatcaatgctatgttaggttttggtttgatgccataaaatacttgaaactaacctgaactccaaatgttttgagaatgaatttaccggcgacgaacgttagggcagcttctaacgaatttttcttgcgatcgatgatccttttggctcttcggagatgttgtaacggatcgtcgcgtaatccgatagaaaacggaaagacaatgtagccgatccaatttccccatctacacgtagatcctttagccatcatatcagctagatcctgtttcaaccaattattgaaattttataccaataaatatattatatgatcgtcgtcaaaacataaatgaagtgaaaattaggtcaatgaactaacctggattccagtgttgggtcttaagttaacaagtagagctgatcgtagccttattcgtttaggcatatcagtggctttccttttagaatcttgatcttctcctaccttcttcttcttttctcctattaatcacaagattattgaattgcacttgtttaaaaaaacatgtctatgtcatatatatacacacttatttaccatatcttctgtccaaatattgcgagaggccagcctgactgactccaagtactacatcgttgacagtctactaaaccaaaataaataataatatctaaactgaaatcaagcgttgattataaacacaatatagtgttatataggaatatatccacattaataaaatttcataaacgcaaaaaaaattattaccatcttcatggtattcttgattagctttatgtcgtctaagcttacggtacgatggaccaaacacatccgtttactcttactaaaccggaaatcgcctttgatcggtgtttcagtgtccttaaggaacattgttgtagcaataaactccaaagcatcgcaaaccgtattcaaaaccaacataatcgccgaccatataaccataactaaccataagaacctggaatcacctcttgaaccggccattagcctggaagatctagacgacgaccggttctggttcggcagactcgggagctcgtcagggtttgatgttttacgcatacatgcaaggacaagggccatgagagacataccgtctcctaaagagtgatgaaacttcaaaacggcaacgttttcggcgtctgaggtttttagatcgagtaggtgaagctgccataatggcttcgagatgtctaaagggaccgtcgtgaggttcgagacgtaggtctcaagaaacgcgtctgcgtttccgttctctatgttttgcgtttggatgtcggatacaatgacgtgatcggtaacgaccacgtttgtccgaacccaactttgtgtttgtcttttcttgttcccaacggatgtgctcaccttcaagttttattaaaaataaatgttaaaattaatggtaagaagctcaaaagtaagatatacaaaattagacaaaaatgtacatatatgaagaacactttttctttctttgacaacatatttatagggacaagtacgtaaatataagtggtcaagagaaaaacgatagagatatgttaggactaagattaaaacaaacagctattcaatatacatgagcaaaatcctttgtatgtacgatcttttgattagctactttcaaatgataaataataatttttgctagttttaggaaatatacttaaataattttatcatttgggtggaatatttttgtactatattctgctagatttttataacaaaaaagtaaaactaatcattctcccatttttggaatgaaatccgaaagaattatacatttcattgaccaaaaatatttcactgatctttggatttctttcttcttactattttctaattctaaattgtttctttttttcaatgtttgataattttcgaaaacgaagataaaaacaatgtttgtttctttaatttctgaaaatgaaatagccggcaaataaaaataaacttttgaaaatgaaaataaaagcaaatatacagagtggcttatgctcaactattgtgatttgtgaactgtgtgatattgtagcaaaattagaaaaagaaccgccctaaagattattggtcaaagaaacacgtccagttctcgacgatcacgcaacaacacccagaaaagtcaatgaaaccataaatacatcaaagagttgaaaacattaatctatgttttatacatacgagttgatattttttttaatacatataactatataatatttaaccatgttgtattcatatgtacgagttaatttggactcaccattttactggagaaacgaggatgtctgatcaaagtttgctttaatccttcgatgatcacatctggatcgatcttcttcttgattccaataacagagatgacgtagcagttaaactccggtgcgtgaaacacacgcgccgccggactaagcggttgctcctcctcaacttcttcctcgtcgtctttcctcacggatgtttctgatgtatctcgtcgtgtcttaatctccatggtttgctgcttagtctttctcttttattttctttctctctttcttaaacttttaatattcgctttcttgatatatagcctccaattgttctatgccactttcttctttatataactttttggatgtgttggattatatctaaccgaaaaaattagtaactcggacccacaatcttcacataacgcaataatggacaaaacgtttagtaatattaaagtttgatagtaataaactaataattatatcttatgacaaaatctttataattctattgtttacttagattatttaagagttaattaacacaaatctatttcatatttcagttatcattatttttcaaaatttactacttttgctatgttaaaaattctactaaattcatataatattgaaatcaatatttaaaagagtttttacaacaaaaaaaaacatcaaaatcgtccatttttacaactttacttttcacgtcaataaaattcaaaataaacctataaaatccaaaataatatgtaatttagccacttttcgttattggtaaattttaaaatttgataatcatatatcaaatcgaaaccctcgaaatgatgagttcaactatatctttaaaattttcaaacacagatatatataatcgtgagaacgattacaatatatgtaaagttacaaaaatggactatatatcatattattttagagttcataaaattattttatatattttgaatgtaaaaagtaaaattacaaaaacaaacgacgttacggtatttttgcacaaaaccttatttataattatacttttttttttagtatagcattttggtttactcccactttaaaaaaaaacacaatgatcaacttgatgattcatcgatatctaaacccaacttcttttacaaaatacgatgaagattattaaatttagaaatattttattattttttttactcaaaatcatacttcaatgtataagaatactaagaaccgtacaataatttgccctttctaccaatattgttaaccatgaggggtagaaagtacaaaatagagagtacaagtggtttgcaaatgtaacaattaaatcagcacattcattttcttgtcttccattaaaccaaaaagatggttttaagtgtccgcttcaaaagtctagattcttatttaaatagctcttcatccgcgaccacgcaaataaatacccaaaatttacttctggaatccctaaattaacaagacaagatgaacttactgaaaattttaaaatattaggcacgagaaaattggtagttaaacttaatgtagaaaaaaaaataagatgctgagaaaagaatttaatattttttctagtgttagtttatgtagaacaaaaataaaatgccagttattttctaataaataataaaagaaagacgaagacacattcatttcaatatctaattatggtttattggtcaatttgctggttggctgacgacagatatacaattttaactagtaaattatgaattactcccgtgatggagtataatgtatagttctgataataatacgaccgttacacagaagaaaaaataacccacaaaattgacaacgtcgataatatcctgttgtctagaattgacaacgtcgacaattggcaactgtgtggacatatattaataacaataacagcaagaagataaattcatggtctaacacggcacggtgccagtgacgtgacgaccacaaatcaataataacattcgccatataaaccagttcatcgacgtttagtcgtttacccaccatatatcagcaccgcctttatatttcacaaccatatatatttagtttacatttatgtatagtttttctctctgttttttttttttataaaatagttttctctatgttatataatacaaatttcttgaattagggtgcaataaacgacgttatacgttcctagtaaaatatggataaaaggaaagtaagttgataaagccataccctttcaaaatgtttaaatacgtgtttctcagttttatctactgatttaggttttattagtatttctatttactagcaagttgatatgggtttcactgttatgtttttgatgggacattatcattttagagaagttttagcatgttcaatggtatggccctgagagagtctcttttaaattttatactaataaattttgtgaatttgtatagtttagagattatgatgggtccttatattttttggtgtctaatagtggaatcttaaattgggtctctttgagaaaaaaaatgttgaagatcaattgatttgagagagatcagaagaaaaacagagaagagcagctcgagaaagagatgggaaagggaaaaaaaaattgttttctcaaactcacgaccaatcaggccgtgacacgtcaagtccctttagtttcacaaaaacctcttaatttaggaacgttttgatttaattttgggtttttatgggaagagtcttttgctgtagagctctttaaagctctccattggacctgctctattatagttttgtgttctgccccttcactctttattttagcgattttagcgatcactaaataatttttcctttcgacgtggaagtttctctcattaacatgaactttacaatgtttttattaggggtgtcaaaataggtcaaaattcatgggtcaactcaactcaactcaactcatgaactctaatgagttagaaaattttgactcaaatgagttgatgggtcaaatgagttattgggtcaattggtttgatgggtaaaatgagttgggttgtaatggttaatggtttcaatggtttatccaattaacccatcaagttttgtaaattgaattaaaccaactaaaatctttaaaccaatgtcaatttaagtttaaccaacacatctaaaccaatttaataaaacattatttttccaaatttcttaaatatacaagcgatgaaattgagaaaaagtaaactcgtaatttttccacaaaaaacataaacccgtgatttttccgccaaaaacgtaaacccgtgattttcccgccaataacgtaaacccgtcattttcccgccaaaaatgaaaacctttgatttttccgccaaaaacgtaaacccgtgattttcccgccaaaaacgtaaatccgtgattatcccgtcaaaaacgtaaacccgtgattttcccgccaaaaacactatcctaagtttgatgatagtgaattaataattattaataatgataattatttattattattttataataataatgaattaaattattacttaaatgggttaacccatttaacaactcaacccatcaaattaaatgagttatggatcaacccataactcatttaaccattttgacacttctagtttttatctttcctacccgtggacaaaaatctattaggataatattgatattggaggatagaaacatgggcattgatgatgatctgttaaagcttcatgtgctaataaaaatatgatacaacttagtttcattagaaatctaatctatgtattttaattaaaatattatatattttttgttaaattagtcattactcttaatgttcctttaaacccgtcccttaaattaggagtcgagctctctttttctctttttcttggtgctttttaggaacatgtctctcaagtctcaacgactcttgccccttttcacgaactatctaccaattttttaacgaaccagacaaaactagtagtatattgttcccattctgttgtatcagttgacatgtggaactccaaacttttattatacttgggtttgaattatttctttgtgttttgtatgtatttatcaaatgtgtttatatatataacaatcatgtgtcttctactcttctattattattaatttctttctcttttgacatcttcaaccgactcggtgtcgattacaaaactgaaagaaacagaacaaaaaccaacaactaaaaaacagaggacaagaataaagttgagcttccaccaccacccgatttgtaaacgcaaaaactattatttgaataatagaaagtctagttttgaaaattaaaaagtaaattttaggaaacttttgttccataaatgttttttgtattttctttgcaattttttgcatagtattttctctataaatgaagaaaggaaaaagcacttcttacacatttaagccaattggagctaccagagattggaaggagatttgtgaaattttctttagtgatatttgtttcgacgccgatgaaacacaatgagaaaaggcagtacgaacagaagtaagaaaatcactcactcaaaagctttttttttttttttgggttaattctctcactcaaaagcttatgtagtgttcttcgtactcgatgtcaatgtaccacaaaattatagtattgctgattttcagtagtagtggtccgaaattaaagttaggcccgtttaatatcttagcccatacttttgtggaaagtgatcgtagattcgtagcccattctgtataaccaaaaaagttattctctatcaaatgaacaaggtcttttaagttgcctctgctaggcgtactcatccggttcggattcaaataggatatcgtggattttgagtcctttagtttcgagtttcgactatcaagagtcgaggtatcttcccagtattttaatttgggtgacatttagtactctttaagtttgggtcagttcggatagttgacacaaaataaatttcttatttttactttaatgataacacataatcaaaacattatttttaaaatcatgctttataatatataaagaatactatgctataattttctatagttaattctaactaacaaaaaagaaagaaaaaaactatttttattttaaaagtgaaatttgccacattttttttttgtgtggctgctgttttaatatcgatttgatactatttttggtaaaagaatcaccaagttactgagtcaaatcattatgtaaagtactatttttgtctgtgtgttacaagttgtgagatctaggttgttctgtttctcatacagtccacaaccaaatcacatggaatgtctctccatcatcattattttcgccatcactattatcattttttgttaaataatgtctttgcattatacgtttccttccttgttaccaagaaaataaaaattgccacatgaattagtatcatataacaagacataatttaaggattagaacgaaccctgtatatagtatagctggatactatttatgatgtatcccgtggatatatgtatatagtatgtatgcatgcataaagctatggtaaaggttcattgacctcaatgaaaagtttgatttattcggtatttcaattatattcgattctgtgaacgattcacaactctatgtttaaagcatctactttatgttttataaaaagatgactcgaccacttttcgtttgcttaaccccgaatcataaggtataaaagtactctaagaataaacgaaatacaaaaaaactactgcattcaacgttttatccaaaaagaagtcctatattcatctctacgaatttcttaagttaaaaatgtaacatgcgaatgtcatataatactagatcgcctaacggaaattgtattaaaaaaaagggtgatttgcagatatagcactttttcaagtataaagaaaaaatggtgatatgtgaggatatttaactaatcactagtataatgaagcatatccatatcaacatataatactactatactagatcaaatccttaatagaaaaatcgtagtcgataaaaaagcaagtttagatcaaggtgaagtcatggttaatttatatgggaggatattgaactaatcactaatgtataattaatctttaaaagaaatatgaaattaggtcgcgataaagtgaggagccaaaaaacacaaacactttggtgatgggtttcgattgatgacaaagcatcaacttcttatgtactaaaattccatgtacagaattattgaataagcacagaaacagtatcatatatatggataataatgatattgattatcaatttaaaatatagaatttaattaagagattttactctattttatatataatcaatcgtgtttgctagttatactcttaaatactaaaaattgtatcaaaaataacaagttaaaaaaaaaacaggagcgtgcgcctagcccgcaaaatccacaatcttagaacaaggtggataataaggtttggtttttctaaaaccacggttcataacgagtgtccactagaatccaaaaaaaaaaaaaaactaatttcgtcgtagaacaaaaaaaaatagtgagacaagaccgatttgaaacatgtaatgatgtaatacatatgatgattttatatctatagaatgaagaattttaagctttagtttattctagaagacgtttattttgttaatggttgcttcagatgtaaatttatataagatcattttggtaggtatttactctatagtctatagtaatatacactctacaaactggcccttttggcactcatgtataaacacgagtatttaattttcacattagtagacacggtcctgcttcaataaatctattttgacattagttcttaacctcattgttgtaattatttacaaacgagattaaaacaaaacacatggacatttttggataataatatttctcaacatattgttctagctttgatcgttgccaatagatcaacatatttgttactctcgataatcacttaagcccaactcatgtggttttaatgtaatggtgaagtgtttcctttcaaggtgtagtgtagcttcaaattgcacatactagaatcccaaagattaatgcactaaattcaacctcttctgcatcaactccatttgaagtctgtataatccatccaaaacaatcatatcttgcgctgtccatatccaaaattatgtgaagcgtcataattacacttcatccacccttctgtcggcatcctccatggcattgatctggagcttcataaacacatttggtttgtattaaatatttatgaaaatccatagtcagtcacacggatagtgaggtagaaatttagagagatcatcttatgaatctttttatttaagcaacaagcttttatccgtgttagtgttactttttatcatttcttttggaacaacctatagtatttaatttattcagagcgttcttaagaatttgtttgataaatatattcacgtagtttcgactacgtatagaaactttatagcaaaatgaatgttgtgcgtacgtacattgtttctatggtagataagtataattccagaaagagttaatgaggaagaattttattactgtggcataggatgaattaaattgatctatataaattttatgttacaacttacaaacaattttcacatggatttataaagaagccgctataaataaaaacgattgtagtttagttttggggtattcgaataaataagaaacttactccttaagttagcaactttttaatactaaaagagaaaagagatacagaactttccaaaaaattattgaacatgttctgatacttcactaaccatattgaaacagatggcataatcactttaattatacaacacacacatcttatctatatatgttacatctattataataattaaaccagatttaatataaatccagctatttaaaattatgccacagtttgaaaagaaaaaataaacaacgtgagatgtctatgtaattagaaacaatgggggtcttttctagtcgcattctggcattcgttgagtcgattttttttctttgttaggttgatgttggaacaacagatagatttatttattataaaaaaaaaaatacaatgtatgatttaattaattgctgtgaactgtttaagtgtttctaactattacggaatagtcttaaaagaataatgcgactagtttatatagagttttcctatcatttcatcaagtttaatctttggttggtaagtgccagctcatgttctttaatagccacattgcacacatataaattgaaacagtttctagatttctacgtaaatgttttaaatatgacaaaaatttactatatgtttcgaatcgaaataatctagcgtagtagtattcataactaccatctaccaccaacattattttgatactgtaatgtttgcttttaataaactgtcgaaatagaaaggcgcaattagttgtatgtagagtaacttaatagtctactcatctctaaacaaatgtgaaaagacttttttctcgatcaagtcgacgaataacaaacaaatacgatagattttttaaaaattaaacttttcgaaatcataatacgtgtatttttagggaattttctcttctttttttctttctaattcatgtcgacgaataacaaaagctcaccatcaaacgaagaataataacacaaacaattagaactagaacaaaagaaaatgataaagcaattttattctcatgtaaaaatgacataattcaatgacgcgtgtcccaccaattatcaccactcactctccatatatacttcacatacaatctttcactcatatatataccacacagtcacacattctttataatgtaaatcaaaagagaactaaaccaagaaacaaaatgggatacgaaaggctcggaccatccggagcaactggttcggtcaccacctccactactacagctccaatccttaaccaagtctccacgtcagagcaaccggagaacaacaaccgaagaagcaaaaagaagcttgtcgtatcatcaatcgtcttagccatctcacttatcctcgccgccgcgatcttcgccggagtcagatcacgtctcaagttaaaccaatcagtcccaggcctagctcgtaaaccgagtcaagcaatctctaaagcttgtgagttaactcgtttccccgagttatgcgttgactcactcatggactttcccggctcactcgccgcttcctcctctaaagatctcatccacgtgactgtgaacatgacgctccaccacttcagccacgctctctactcctctgcttccctctccttcgtcgacatgccgccacgtgctcgctcagcttacgactcttgcgtcgagctacttgacgattccgttgacgcgctatcacgcgctctttcctccgtcgtatcctcctccgctaagccgcaagatgttacaacgtggcttagcgcggctttaacaaaccatgacacgtgtactgaaggattcgacggcgtcgacgacggtggagtgaaggatcatatgacggcggcgttacagaatctttctgagcttgttagtaactgtcttgctatattctcggcgagtcacgacggtgacgatttcgccggagttccaatacagaacaggaggctgctgggagtggaggaacgagaagagaaattcccgagatggatgagaccaaaagaacgcgagatactggaaatgccggtatctcagatacaagctgatattatcgtatcgaaagacggtaacggcacgtgcaaaactatatcggaagctatcaagaaagctcctcagaacagtactcgccggataattatctacgtcaaggccggaaggtaaaatgactgttttacccttcgtattaatcgatgtttttaactgttatgtccgtgagacgaaagtgaaaactaaaaacctgtacggaggtttaataattgcgtatctctgactgtgtctgtgatctcttttttttttttttttttggaaagatatgaagagaacaacctcaaggtcggtaggaaaaaaattaatttgatgttcgttggagatggcaagggtaaaactgttatttcgggaggcaaaagtatatttgacaacatcactactttccacacggcgtcatttggtgagtttttcctaacctcactcttccttttttagtttttactatactacttttttcactttttgaactcttttgcaataatacaacaatcatgataaatagttaaaagcaaaacacgtattaatgcaatgaaacatgtacaagaattataaattgatacactaatcttttcggtggtcgaaaatcagaagcgttttttagtgatataatagaaaagttaaaagatctttttgtgttaattaaaatcttaaaaaggagctatgagggtcaacatttatgatataataaatgtcgtttttctatagatttaatataaactatttgttgtacatatttgttactgaaaaaggtattgatataaataagttaagaaggaaaaatatatatactttgaggagaattattggaatcagatacgtgaagggggccatgagctaggctgtctatagatttcggagtgatagggttttaaaaaagtgtccaatagattctcctatagtcagaaatttttacgaatattagttgtctttcaccacttgtgtgtgtgttgtgtttttttttgataaaagatttaacaccacttgtttttattcttcatatggattatggaccactaaagaaagctatatttaagtaaaccttgtaaatagtagtagtatgtactcgaaccagtaaacaaagtcaatattatagaccactaaatttctaaactgtgaatttttttctttcttttgtgttttttggtattttctcaaacttttttgccaaggcactcagtagtcgttttaataaaaaaaaaattgggggtcagaatttttgtttaatgatttttttcaaagaaacatgttttagaacaaacgtcattcacccgttttctactacttcaactcaggaaccttctcatggcagactaactttaaattaattttgaccaactttttcttgctcatgctgaattaagacctaatcacctaagttgtagttcttacgtaagtttacgtgtttgtttagtttaagagaaaaacacgatctaaaaattccaattctcatataaaagtatcataaaattttgcagcagaaaccttattatatataaccaactttttgtatatccttttttcagttttgatcttcaactcagttatgtagaaacttaaatttgaactgatctttatgctttttcgataactatatagtactccaactttatttattggaatattgacttttccataggactatgtacgttcgaattcggttaggtaacacacttacactgaattggacatcctatgtgatgctgccgcttatccaaccaaactcacatgcatgttgttgtgatttttaatgttcattaaatgcacaaaactcaaatcaaatcgaaaacataaaacattcttttgatcaaacaaagtttatatacttctttaccttcatctaatattcattcctcacatccacttatgtaacatagtaaatgcatgctccacatatgtataaacaaatatacatacagacacgcacacatggaaaatgcatacacatataaaagaatatgaacgtatcgtaaggttcgaagtaggccgcgcaattactgaccacacatatttgtatatatataaacatgcatgataggagacagagaatagtagcatttatttacatatataagttggaggtgggtcatagctcattatttagttgaacgcgttatagaccacttgtatacaacatttctataggtaacgacatttctcacatactagttttttttttaagtttaattatatataaagttagttgaattagtaaatacaaaacataattgtgtgttaatttcttgctttaatttttccagctgcgaccggagctggatttattgcaagggacatcacattcgaaaactgggccggtccagcgaagcaccaagccgtggctctccgcatcggagctgaccacgcagtgatctaccgatgcaatataatcggttaccaagacacactctacgtccattcaaaccgccaattctttcgtgaatgcgatatctacggtacagtcgattttatctttggtaacgcagccgtcgtactacaaaactgtagcatctacgcacggaagccaatggattttcagaaaaatacaatcacggctcaaaacagaaaagatccgaaccaaaacaccggaatatcaatacatgcgtctagggttcttgcagcatccgatctccaagcgacaaacggtagtacacagacgtatctaggccgaccttggaagctattctctaggacagtgtatatgatgtcgtatatcggtggtcatgtacacacgagaggttggctcgagtggaacacaacatttgctttagatactttgtattatggagagtatttgaacagtggacctgggtcgggtctcgggcaacgtgtgagctggccgggttatcgggtcatcaattcgacggccgaggcaaaccggttcactgtggcagaatttatatacggttcctcgtggttgccatcgaccggagtttcgttcttggccggattaagcatataggtagagaaaaaattgaaatgcttatttttccgatgaattgtttcattcttacggtccttatattaatggacatatcagtattccaatatatatgagtatattttaacttttaattgtaatgtctccactctccagaggtattatttaataatagatgaacactcgaggataattttcccttgttttcttgacagtgaagaagtaattattgactgatgtgtgatatatatgccatgcataaaaagttaaactagtttgattaaacgtaacttatatgcttcttttgtgtgtcaaaagaagggctaaaagtccagactcaagcaacattattgtgtttaaccgactaaatgtttcgaaaattattggatttttttttgtattcacacattttaatgttggatacaaaataattcaaacattcaaaaaacaaatatgaattggatgtgtcggtgatgagtggtgagagccggagagaggagctcatgtgattgaagtccataggtcacggcccacgaccgacactcactgtgggggccacgattttgggaactcatatgttccagtcatgttcgacttaacaaagaataccaaacatcattttcgtcactttccaattaaaatgctttcttacgttatacattactataatttatcattcattaaaacttaaaattgatgcaaattcagattatattttcattacaccaaaggtccaaatatataatacacaaatgcaaatgctaagtcgcatactcgcatgtcaagtgacacccaggcggacatggctgtttttgggtttttgcggatagacggtcacttggttcatcacttgcgagatggactcgtgctgcaatatacttcgactctctaccattctatttttaggtaatgttatttctacaacctttaaagttaggaataatttaattgttattactatatagtagaagtatatttccaaaattccaaagactgtatagaatcgatcaaattaatctcagataccaagccagatagattaacaaattacttaccagaatatataacaaggagggaaagaaaagtgaatatgttcaaaaaaactattcattttcacggagaccttttgttctacctacggatatatattggctaacttttttttggtaaaaagttaaattttataccaattttctaattttttctctacaatgctgaaacagcttatttaaaaaagcaacaattagaaagggaaggagatacaaccaaagtagaaactaagaagagaaatagaagaagaaggaggaccagggaaggatagaaggcggtctctaacggtgcggtccacggcagccttagtcacagaagccgaagtggagatgttggtgaagatccttgcatttcgttcgcgccaaatgagatagcacgcaacctgagcgatgagcttgatgatgacagaagagagagtttgaggttggagcttgcgctgtaaaatctaagatgagactgagagaagatccaagggtggcaagcgccaaactttagaagttaaagcttcccaaacagaggaagagaaggggcattcgaagaataagtatcgatgagtctcgatgccagcagaacagagaacacaagctgaggtgacgttaataccccagccccgcaacctgtccttagtaggcaatctgcccaggaacgcaagccacataataaatgagtagcgcggaactaacttgattttggagtcaataatccatagcttgcttttcaaatatctttttgttttttttgttttccacgtttttcaaatatctgttggaccattttgtcttagatttagattcaataacttttgctatactatactgtgtattcttcttgtactaaattttgtaaaaactgaatacccaaacaaaaaaatacatgaaatacaagtattttatttaaaatttagacctgttctcttattcgttggactaaatatacaataataaatggataaattatttataaaataacagttataagatagaaaaaaaattactacggatgtggtacaacaaatttctcgttaagagagatatgggccggtcgaagtgccggcctctatagataagccggcaccgcgtatattacgcacaacgtattccgctctttttttgttacatcattgtgcagaatgcagattcctaaccaaagaaaaagaaagtttttaaaaatatttaattataattatatgatgaaatcaagaatgggtcctccaaaaatcgagcttatggcccaataaagcccaaacgtaaatagccaagcccaagcatatttatccacgttcccaaacaatccctaaacctcatcatcatcatctccaaactcctaaaaccctaacaagaacccttatctctctcatttcctctgaaaggaatcatttttccactcagaaaatctcaaacatttcaaccatgtcgatttctaaagccgcctttttaaaccaccttcaaacactatcaagatcctaccgccaccgtgttctgccgcagccatttctcgccgtccgatacatgtcattcgcgactcaggaagaagccgccgctgaacgtcgccgtcgtaagcgtcgtcttcgtatggagccaccggttaattcattcaacagatctcagcaacaacaatctcaaatccctcgaccaattcaaaaccctaatatcccgaaattacctgaatctgtctctgctctcgttgggaaacgtctcgatcttcataatcatatcctgaaattgatccgagagaatgatttagaagaagctgctctgtacactcgtcactctgtgtattcgaattgccgtcccacgattttcactgtgaatactgttttagcggcgcagcttcgacaagctaagtatggagcgcttctgcaattgcatggattcattaatcaagctggtattgcacctaatatcatcacatacaatttgatattccaggcttatcttgatgtaaggaaacctgaaattgcgttggagcattacaagttgtttatagataatgctccattgaatccttctattgctacttttaggattttagttaagggtttagttagtaatgacaatcttgagaaagcaatggagattaaagaggatatggctgttaaaggttttgtggtggatcctgttgtttatagttatctaatgatggggtgtgtgaagaattctgatgctgatggtgtgttaaagctttatcaggagttaaaggagaagcttggtgggtttgttgatgatggtgtggtttatgggcaattgatgaaggggtatttcatgaaggagatggagaaagaggctatggagtgttatgaggaagctgttggagagaattcaaaggttaggatgagtgctatggcttataattatgtgctggaggctttgagtgagaatgggaagtttgatgaggctttgaagttgtttgatgcggtgaaaaaggaacataatccaccgaggcatttggctgtaaatttgggaacttttaatgtgatggttaatgggtactgtgctggaggaaagtttgaggaagctatggaggtttttaggcaaatgggtgattttaagtgtagtcctgatactttatcgttcaacaatctgatgaatcagctgtgtgacaacgagttgttggctgaggctgagaagctttatggtgaaatggaagagaaaaatgtgaagcctgatgagtacacatatggtttgttaatggatacttgtttcaaggaaggtaagatagatgaaggagctgcgtattacaaaacaatggttgagtctaatctaagaccaaatttggctgtgtataaccgtttgcaagatcagttgatcaaagctgggaaactcgacgatgcaaaatctttcttcgatatgatggtgagcaaactcaagatggacgatgaggcttacaaattcatcatgagggcgttaagtgaagctggtagactcgacgagatgctcaagattgtggatgagatgctggatgatgacacggtaagagtgagtgaggaactgcaagagtttgtgaaagaagaactgaggaaaggaggaagagagggagatctggagaaactaatggaagagaaagagagattgaaagcagaggcaaaggcgaaagagttagcagatgcagaagagaagaagaaggctcaaagtattaacatagctgcattaattcctccaaaagcagtggaagaaaagaaagaaaccgcaaaactgctttgggaaaacgaagctggtggtgttgaagaagccgatgtggtggagatggctaaaggagtagaagcaggtggatccaatggtcaggatccaccgtcctgctgatcttatttttttccttgaattcattagactctagttatcttcttatcattcaacttttatgtaattagggatttgtttgggacaataagctatgattaatcttttgctataatgcaggtgtttgcaaaatcttttttccatgtttgcttttgatttcaaattaacatgctatgtagaacatttgttttagtggatggtctatgtaatcatttctttattactcaatttggtgcattatatacgtaacaagaaattgtaaatcttatccatttgggacaaagatttgaagtgaggaaagactgtattccaactacatgaagcaatagaaactgagcatctgattagaaagcctagaagattgattatgtacacagcaaactggtcaagtcaaaagcaaaacagacagagattggaaacagcataaccaaaactaaccgatctactacccttcaaggaaatttattaaaatctagtatatctgataagatgcattccatggaagcaatctatcaaaaacttagctggaaacaagttcttatagtcaaaataggcttcctacttatagtcaaaataggcttcctatagaagcaagggtcactgtaactccgagctctatgcttctttgcttgcttttttttcatctgggtgtgttcattggctggggcaccaccaacacataaacagaccaatgttagccatataaaactttcagatagaggtatttgaagctttgaattaaaactgaaacaaagatatgatcatatagacaatttcatgatatgcttcaacagacatatactatgatagaagagaagggtcagaagatacatgaaaactagttttaatacctgattagtgcatgaactctgagccaagcatcgaacaaattcttctttcttcttgccaaagttgaagacggcatgctcacggagcacttgctcccgcttaatgtcctccagcgttttctcctttttccatttcagctctttcattttcttctccgcctcactatagttgtccatcgtgcgagaagcagttggctttgcaaatctcacgttcacctcatcactgaaaatcatattgatttcagttcaggacagcggataagagcaagaaggaaatggaagaatccaaagagggaaataagttcagaggttataaaattgtgagaatcttaccggtttccaagattgaagatccccgttttcctgatgattcctccatccaaagataccgcaccatcacttatgcatgggagggcactaatcatatcggcccttgttttgtaaacttgaaggcgagagaatagattgtagaacaaggtctcacgaagaccatatccatatgatgtgacacagagcaagtaagctggatcgatctgtatcatattcactgcaaatccgagaaacccgggaggacactcaccattaggtaattttggtttcagaagatcaagccttctttgcagatcatcagctatgtgctgaccaacatacggcctaaaagtcatcaaatgaagcaattagaaaaggactgcagatgaagtgtacctaaccaaatttgtaatacatgtaaaagattcaaacaaaaattagtacctcaggttttcaaggcagatggcatcaaaactgtctccaatctctcttccaatcgaagagccaaggcaatgaaggccagcatttatatcaatgttgccatggttatcataagcctctaaagccgtaacactttcataattcctgcatacaactgccaacattgagcgagtccccaaataattcgacaaaatcctgcatttttaaagtaccacgagagagaactagttagtttcagatcacaaaaaccattgcaagaaaggtttcttatataatcagtggcattgagaagttgaaggtaatctgaaaaagtgagagaaatggaactaactggctgagattttcatcattgaccttcccaagtttcgctacaacaccaacaacaccttttgtcaacatcaactgagaagcttgagcaccatgaagagtctcaaccagacttaaaactccagcagctgagttttcgtggcgaaggatctgtgcattgatatcttcaccctgaagactgttatcagagttttcacttctaggagtaggagacgagttaagcttactcatatgaactgcagaagaaacgaaacaaagacatattggataatctcaatcaacataaatcactgaaacgtaaaagtctatgatatctcagaaccttgcaagtcgacgatagcttcatccattttgtttttctgagacttgagaaacttgagattatcctcatgctgtttgattttgttacccatagcttcaagatcagattcaagcctcttggaattgaacatagcaaactcagcgtgagcaatgcctcctccattctgagtttcatttcttgcaactggtgaagattgatccaaattcatcatccttgttggatcttgaacattcaacggagtggtctgaaacgaaatctacaaaattggatacaaaaatgactcaaaaactattcctgtataaaccctaactcttaaaattcgtaaaaaactgaaacacaaaccctcaaatttaatccaatgtggtcgcatgcaataaaaaaagaaacaaaatgtcgagagtagatacatcaataaacaataaagcacgagtcttttctccagattcacagaaaaattcagagagacttcatcgtttaagagagatcatagactaaagttcgttcgttttttcccaactaatctagttccattttgcaattgaactgagtttttttcaaccaacctgttgaccagtcggatacattgctcctcagcttcaatgttatcaccggagaatctttctgcttcaatgttatcaccggtgaatctctctctctctctttctctctgcttcttctccggtctctgtgagtgtgagggtttaatttttgtctttagtgttcttctggagaaaaacagccaattgttgtgaagtaattaaactaaattaaaatacaccaataataaaaggaacgtattttgccaaaaatgtaagaaaagtttccttttatcattcaattatattttctggccttatttaaggcccaataatcttcggagattccaagtgggctttgtgcttcatacctccttctgagcctgactttctcactttgtagcatattagtttgataatgaaaaaacccgaaccagaggtaatttctcgtatttgagttcgataccgatacatgtcaaaccagtttttatcttacaaattcaactagttctgtgtcatgcgttaggttcgttaggaaaacgactctgtgtatcgatattgtcgaacgccgtactggttttctattaaaaaaaaatcatgtgacatgatgttatgtttttgcctaaacattatcatttataacatattttataaggaatgttgaatttaagctttgattacattagaaagaaaaaaaaaatgaattccagctttgtttatgcttaaaaaaaaatagtttagctactcgtgtggatgtatgagactctcaatgagtagtgaaatcgaaaggtggtccaattttggaggtggtgtaggtcttgggtcctcataaagaaagttaggtcgccgttattaaaacaactgcacattttcatttttgtgtttttttttctctcttttaatttacatcttaagacaaatgatcggcatcatttgatattttaatatcaaagttttgtagttcttgagtaaattctgtatgtatacctaaacgaatgaaacctttaaatttttcgttcattctttaaaatgtgtcggataaatattgcttctaaactcatgttaccaatgttaatcatataaatcagaactttatgtataaatgcatattatatgcatgtgaccaatagtttattttaagctcgatataaaggaaggataaatctcatgaatatatatatttaaaaatattttgttaagtagcatatttaaccatacaaataaaagtattattaaaaactgaattttatcaaactaattagtaaataagtaaatttatttatagaatatagtttttttttgtttttaaatatataaattccaaagtatgtattggcttcaacttgaatttcctcagattacactagtacatatatattcgaaatatggcatcttctcatcaaaaatatgtaaacataataggtccacaagtccacaaaatttaagaaaaagtcaaataatattttatataggatataacaaatatgtaaatacagaattcgatcattacaaatgtcagaagactttataacaaatggaaataaaggcgattggcgttaaaataagagaagacaaaagtagaaacctcgtgaacttcgtaaaaacacttaacggcgtttaaccgaaccccacgtgactccgttaatgattttcattttatcggtggtgaaatgagtgagacatcctctccttctcaacttaagtctctctgtgacttctctctctcacctcttcttatctctctcgttctctttctctaaacttcaacaatcgcttctaatcgtttgatcacattgcacaaacatgtaagttcctcaattaacatatatgtctaacttttatgcatgttgttgtatgtatgacaatgttatacatttttggttttggctacaattggaattggttttgctattggtgtaattacagctatttttgggaatctttaaacataatgtttcagtattaatagagcttatgatcaaagagtgttgccggaaatatggggaagaaagggagtggtggatggttctcgacggtgaagaagaaagtcttcaaatcctctcctaaagactccaaggttctaatcacacctttaattactatttttattttgtcaaccaccattatatatacatatatttatgtatgacaacgtattaaagaaaattaggacacttaagtgggatgtgtagaagtatatatgaggatcttcatgaaaacatatcctagcttaaagaaagatagaactatagtaatcaaattacaaatatgcataacgtttcaagtgattttagcattgctaacaaaacataactttaataataagatataactaatacgaccgcataactactttttcataagtaagcaatttggtttagtgtctttttcttcttgattgaaagcaattttccatactaattacataaataacatttttttttgcattgaacacttttttcttatttttctacctatttaataggattcgtaagatatatttatgcatattatagcttaaaagaggaaaaaacaatatacgatctttcatcttataaatgtatgacaagttgagttacaaaaagtaaatgtttagaccgtatatacttattaattaaaagccgaaaaagattggtccccttgtgaaagagatagactaagaaggctccttataagagcatctaaatatgatttttgtgacaccgaaaaaaatcttttttccatctcccaattttcatgtgcattgctttgttccctcaccatcactccaccccatttatttccccacctatagatatatacattaaatttatttcataaacttgtatctatagatagtcatatcttcacattaccataatatagaggttctctttttaccactatccaaagtccccacaatctttatcatctttttatatattttggatctcaactctagcccttttctattggttctcaaaatttattatagacatatagtaaaaacaaatgttaaatactttggacgtaaacattaaaactaaaaaggaagtaatcataagccaacaagtttattaagatggaaattattcaaatgttagattactgttattatgtgaatatgtcacacttaatttacttacatgcagagagagaacaacattggtagtaataacgccgacatatggcagcagcagcatgatacgcaagaagtcgtgtcgtttgaacattttccggcggaaagttcaccggagatctcccatgacgtcgagagcacagcatctactccagcaactaatgttggagacagaaaacacgctatggctgtagctatagccactgcagctgctgccgaagccgcggttgcagccgcacaagctgccgctaaagtcgttcgacttgccggctacaaccgccagacggaggaagatagcgccgccgtgctaatccaatcgcactataggggttatttggtaattttctatccctaaattttactatcaaatcatttccaactctcatttgtcaataacatgcaccctcgaatataaccattttacaatcaaattttaccacttctcttacccacaaaaatcgaaatgcattttgcctagaatccgttatgactataattcatttcagtattatcgctaaaccggttttagtggaatttcgtgttttagtatacacaatttattgactaaatttgtttttgtttttttttcattgtaaacttgcagtaatgccaaaccagaaatcttaagaaacattctaggttattcaaattatgaccggttttgtgttttttttttctttctaggcgagacgagcacttcgtgccttaaaaggactagttaggctacaagcattggtccgtggcaaccacgtacgaaaacaggcacagatgactatgaaatgtatgcaagcattggttcgtgtccaaggccgagtcagagcaagaagactccaagtggctcatgaccggtttaagaaacagtttgaggaagaagagaagcggtccgggatggaaaaaccgaacaagggtattgatatcaatacatactaaatcacccaatatgtatgtacatctataattagtggtgaacctaatatttgtatggttaagtagggtttgcgaatctcaaaacggaacgagagaagccgaagaaattacatgaagtgaatcgaaccagtctgtaccaaactcaaggaaaggtaatgatgaaaaatcttaggtactattttgctcacgtttcaatgtttttcttttaagtaattacactattggcatatctttttaggaaaaagagaggagtgaaggaatgatgaaaagagagagggctctagcttatgcgtacacttaccaggttggtcgccactctgtttctgttagagaaaaattccctcttaattgtcataaaatatgctatgcattataggtccttaaacatctttcataatagttttggttttcatattgaagcgccaaatgcaacacacaaatagtgaagaagggattgggctttcttctaatgggcctgatagaaaccaatgggcttggaattggcttgaccattggatgtcttcccagccatacactggccgtcaaactggtccgggtcccggtcccggacagtacaatcctcctccgtatccgccttttccgacagctgcggcaaccaccacatctgatgatgtatcggagaagacggtggaaatggacgtgaccactccgactagcctcaagggcaatataatcgggcttattgatcgagagtatatagacttaggatcatatagacaaggccataagcaacggaaaagcccaacccatataccaagctatatggctccaaccgcatctgctaaggctaaagttcgagatcaaggcccaaccgtcaaactacaaggaacttcgtttatgccgtattggaactcctcgaccaaaaacgggtcggttaatggatcaggttgtgattcgtcaagttcaggtggagcaataacaactggttatcccggtcctaggagtccgaacccaaaatcggatatccgacgtaaaccggttagtcctagtcaaagtcctaccgggtttggaaagagaggctggaggcatgatcattagaagaaagtatatgtaatcttgaataaaaacttacatgtgtggttggttaattatcttgtttgaaatatattttccctgttacataattgtatatgacattaataattgaacatgtcttctcaagtttttaacgtcgcggtcaaaatctactttgatttccttaaataaggtcatatcggattggtttggttgaaccgaatataccaggagtatatggccaacaaaataagctcaatgagcatacaaaacttggaaggaggctaaagagttagttttggtaaaagaaaaccttaatgtcctcacatcacgtggttaacttaaagaatgctcacatctccggatacattgtaaactatttgatagatctttcccatgcaaagtaaacagatctctagaatacacatgtgtagagttgtcttcgagttatgcgcaaacgagaagactagtcatgaagtgactccaatcccaacagaggctttgagtctttggcattacaaggagaagagtgaagactctcactcaaagacaaggacgtcacgcgcttgttgcctacaaaggaactgtgttgttttagatctagctttaatgttagaacatttcaggaaaacttggggacaaagtgcagaaagtagttgagttgagggtgtgtttgggagctagtagattcgtgccttgttgttgtacaagcacaagagagagcttgttgcctagaaaggaactgtgtcgttttagatctagttttaatgttagaacatttcaggaaaactggggacaaagttcataaagtagttgagttgagggtgtgtgggagctagtagattcgtgtcttgttattgtacaagcacaagagagagctcgttacaaaccttattctagtggattccgggacaacaagtttcccggcgtgaatagggtttcattcagagacccgaacacgttaaagtctcgatcttgcactttactttctctccatatttctttgtttcttgttctgttttctagttctcttcaaagttctttacaaacgagtgttaatcaaagagatagagtgagtttattccgcaaagacatgagttttatcaactctaaacctcacaacatgagatcctaatattgaaaactataaagataaaactcgtgaactttctcgatgagttgtaatctttttaaaaaatctatgattgccttttcagattccttataaagaacaaacaaaattctaaaagataaataaacatatatgtagacagtttattagtgttttcaaaaccaaattgatgaaaatgatctgcagatgaaatttcttggttcacaagtttattaacttgattatttaagaagaaaaaaaaattcaatgattcaaagtttgaattcttttaccgaaagtaaaaatgcaaacaattgaccaattctttgaccaagtttattatagcttattattgattagtttgacagttacacatcatattttcatctctacttcatcatcataattcttagttcatccgcggtggcggtggcgacaaacgaataacacggtttattgtctgatcgtggcttgggtttgggtatgttttcggataacccatcatccgcggtggcggggcgacaaacgaataacacggtttgttgtctaaccgcggcttgggtttgggtatgctttcggataatccatcatccgtggtggcggtggcgacaaacgaataacacggtttattgtctgatcgtggcttgggtttgggtcttttttcggataatccatcatccgtggtggcggtggcgacaaacgaataacacggtttgttgtctgaccgcggcttgggtttgggtatgttttcggataatccatcatccgcgatggcggtggccgcgtaggacgaccccaaccgtttgttgtctgatcgtggcttgggtttgtgcctgtttccatcattttcggaatactctcttcaacctacattatttttttggtttggtgaaaaaattcacgatggttatcatatacagatctattttgaagtgagtgaaaatgttgattattaatcagagagaaaattaaaatctatgacaaatgtgaaatgtacattttggttaatgatactgcttaccatatttagtgaatattggtcggtgtgaggaactccatcttcatggctctctccaaaccctaaaagcgaaaatggaattcaataaacaaccatattaatagattataattgtgaaaatggtaataatcagaatagatctttgatattaaaaatgtaagactatctaattagatgatataaaacattctcaaattacttgaagaacacaatggaagaaggagcaagaacgacatgagaaccaccagctgcatctttgaaaacatgtttttttttccgagaaaaaatatatattttggttttgttgtttggaagaagaacgcatgcttctctatatatagtagacatagttcgtaggccaatgaacgcatactggcagatgcggacgtacagcatggggaaagtaggcacgtgcctactgttttttgttctccctcgaatagctatataaattaagaccatctccatcaggctaatactgcgtgggtttctcaacaatattattttaatcaatttataataattaagttatttatttaaattttaaactataaaaaaaaagaattgggccattaatataaagacacgtggaaagatattatctctaagtttctcaaactagaaacgtgtctgactctctctcctattttttcattattttatatttttttgtctccagatactctctcagatactcccgatggagatgctctaacaaaacaattcaagtaaaatcaagaagtgctttagtccaattttttatttatttcacaaccatataaattttattttttatccaaaattttataaaacccaatagaccattgaaacgatgattggcctaccatcatcgaccttatttttatagaaacaaaatttctttctcattgattcatcgtaatactatttagtatttatttttaatatatgtagctatataattgtactctggattaaaaaaacatattctggatcttccactgtctactggtgggaaaatggctaagtaaagtaactatgcactacacatttactacaattcaaactaaatgttttggtccaagattttcgtctctgagaattaacatattaatagtggaacatgtcatctcaagtttttaatgtcacggtattataccaccaaacgacgagcataaacaacttggaaggaggctgatcgaggagttagtttggtaaaaagacaattccataatccataaaagaaaaccttgatgtcctgtttctcatggttaactcaaagaacgctcacatctctttatagtgagaacaagtgtagttgcggaatggaagagtccgtgagtatgggaactaggcagccccatcttgacgtgaatctgtggccaacgagaccacgagatagtgatgaccaaacttgagaggagtatgaccaggaaaaaaaagatggtcccttgtctctacttgttcactacaaaatacacaattactactcgctcccacattccactttaccaatctatctcacgtagctaggccattatgattagtaattttgaaatagagcttagatgtgaagttagggaaccatacatccttgtaccaatcaaaaattggatttacttgctgaaatcaaatgctgtgtgtcttgcgaagcaaacttacaagtgaatgagtcattttttccttctccaaagaggttgatccttgccggttggtaacttgtttcttctccatggaaaaaaatgtccgtaagttattactattgaaactaggtccgtcttaatctatgggacgatcttaggcaaaaccagtaaaatgttaaagtttcttactaatttttttttatccaaacattggacatttttactctaacaaaaattttgaaattgtttttgaacttatggcaaaagcgaaggtggtttagggctacgatcaattgaggaggcaaataaagtctgcatattgaagctaatatggagaattctttcagcgagaagttcattatgggttgattgggttaaaaaacacctcataagagacggctcattttgggcagtgaaagataacacaactagcgggtcatggatgtggaggaagatgctgaagtatcgggaacaagcaaagatgttccacaaggtggaagtgaagaatggggacacaacttccttttggtatgattcatggagctcaatgggtgtcatctatgaaaagttaggagatagaggctgcatagatatgggaattccaaaaaacagtatgcttagtgaagcgataagtaaaccccgaacaagaaaccatcgacaaagcttcgtgaacctcattgaagttgaactgcaaaacctgcgaacaaataggcgagaaacagaacatgatataccactatggagaggaaaaatgactgctacagaaagaattttgtatccaaggagacgtggctgcagattcgttcaacaaggccagagatgcaggactacaaagcgatatggttctcggatgcaactccgaagtatgcgtttgtcacttggttggtggtgaagaatagaattgcaacagggagagaatgctgaaatggaacaaaaacgtgggtactagctgtcttctctgcaactatcctttggagacaagagaacatttatttttccaatgcccttattcgagaacggtgtggagtgaactggcgggaagactactagctagcaaatatacggacaattggctagatatcatgaaggagttagtgagtaaagatcttgacgccactacaaggattgtgcttcggtatgtgtttcaaaacacgatacattctatatggagagagagaaatgagagaagacatggagagacgcgccatcgaggacggagaagataatcaggctaatcgacaaaaacataaggaatcgattaagcacgctaagggtgagaggtgaagagaagtacccaagaggaatccaagtgtggtttgcttcaaggcaagatcaaaatcaaggatagataagatacacatttgatctattttttttaaaaaagtttgcatttatatgtataaacagtttatttttctttgaatataatttaacattaaattttttaaaaaaaaatgcctatgttgcctactcttagagaagcgcataatgtatctttggactttcgacaagaccaaaagttcgactcacacgatgtttttataacaaattttaaccaaaacgacgttgttttataatatatatgatgttatatagtctgttaaagttgagtcttatattgcagcctttgcaggtggagaataaatttaccaaaaaaattaaaagttgtgaatatttatttgcaatttttcttcgctttagaagtttttaaaaattagtattattaaaccgtagtattattgaaaaataatactttttagtttttaaaaaatgtttcacacatgcaagaatttgaagaaaaatccgactgctaaccaaaatactaaaatagcgaattaaacatgggactcataacttttgtattaaatgactaaactaaaaaagatgcaattgaaagaaaatgaattgcatgtttaattggttgcaccaaaaagtttgtttggtgataggaaataactgatgatataaattttcacaaaatgacgaccgctccaccatagtaactactcaaaatttgtcagtgataatgagcatgacaaacatgatttataaagacacggcgagtccccaacacctgcagctcaactaatcaagtttcttgatatatgatacgcaacaaattatcttcagtccgtcgtcgggatccacacaaatacgaggatggacttcggttatggttcgcctctaggaactagttgtttcaatctctttacaaatcttttctcaaaataacatttaaaataaggttgcattcattgtacaaaggttttttggttgaataaattttaaattcattcaaaaaaaaacatgatttataatcatggaactatagttactattttaaaaagtaataaagaactacatggttatccaaagacgtgcgtcccttaatcattgcatgttttttcaatttttatcttttgtctcaaaagttattttgttaaaaatgtaatgaaattgttatcctagatatactcatgttacagaccacacgatcgtaagcttgttagttaaaaaaaaaaacactattatgcctactttattaaaaaaaatctaagagtccactcaaaagtcaaaacactccaaactcgcctaccaaaaaaaaaaaaaatcactccaaacttaaaatccactaaaatgaaccaaaatgcttagtacaagatatcatcttaattgcaatcgaactacctaatgcatttgattcaatatcttgtttcttttaagttttaactatccacaaagccatgacttgggaatgtgattgatcgataaaactttttcatttgattcaatatcattttactaactattcggttattttaaaaagttcggttcggatgcggttttgtttttacggttcggttcattcggttatttgcttaccgatttttctgcaagagagcgcgtttcgtttgtctccgcaaacgatgggacaaagtgggttaagtctgaggttgtttcttcgacttgtctctctagtctctataccaacaacactcaacgagacaagaccatcatcatcactcacttccttccttccttcaaatctcaactaaatcaatagacattcctctctttgtctctctctatccaaatttgaactgtaactgtcttcaaaatcttcatttttctcagacaaattggatctctccttggagcagaaacacccattaaaggaacaatagagagagttttggattgaataatcacagttccacaggtttccttccactctcattatcttaaatttcacttaaaggtcgaaacttttggtccactggtttcattatcttcttttaaacacatcaatttgtttaggatttaacttgtgattttgaattggttttactacttctcctctctcgatttagcaagttaaaagcttttttttttttagtgttcttgagggttttagggtacaattttgtttcctcaggactgggttttgctttcttgtttcatatgtgttttattgttcttgatgaattcattgtacattataaaatattgtctcagctattggtacacagttttctttctccctgggaattgtttgttaatttttaatagagtactaataaaagattagaaaatctgtggttactttagagagctgtggattctacttgtttgtttgtttcttcttattggattagttatggagcaaagtaaaagccttgttcattttctttgttcatatgtaataaaaacaactagtgatatacaagtgttcttggaaaatcttgaatgaaacagctttgaagaagactgaggtttatcttcctctctgttgaaaaaatagaagactgcagtggctacaatgcctgcgtcacatgaagcttcaaattacgatgaggtttctatgcagcaaagtatgctcttctctgatggtcttcaggtagattctgaatttgcaaaatattgcctagtttctgataaattgttcaaatctccatctgacttagaaggacaatgctataataccaagcacatactatctttctatatgtgaaaccgatgacaaaagtaaaatgataattaatggtctctgtgattgaagatccaagtgttgttacaatgctgaatcatatcttgttttctaaaatctttgtaggtttatttgacaattaattgaaaggttttctgctcttttatttcctcaggacttgaagaatctgcgagcgcagttgtattcagcagccgagtatttcgaactatcttacacaaccgatgataaaaagcagatgtgagttagtattaagcagcgcttcagatttattgtgtcacaaaaaatttcttggtttttctcagtagttgtttctcatgttaagtgcagtgttgtagagacactgaaagactacgctgtgaaggctctggtgaatacagttgaccatttaggctctgttacatataaagtgaatgactttatcgatgaaaaagtcgatgaagtatcagagaccgagctgcgagtatcttgcatcgaacaggtataaaaaagctcctaaaaacttgtatttatccgtgaaggtttctttttggggttactaagttgtaattttgtgtttatgttgggaaaaataacaatgggatggtggttagaggctaagaatgtgccaagagtatatggatcatgaagggcgttcacagcaatcacttgttattgacactccaaagttccataaacgatacatcttacccggtaaattctctctttctcgcactcgggttagaaattttcgatactcactaagatgcaatctttatcagcgggtgaaattatgactgctacaaatcttgaaaagcttaagtactttggaagcagtttagaggatgcagatgattggaaccaattccgaaatggtgagtttgtatcttctatgtttctgttgtacacaatccaagattcaagatttcttactaactgattggtttgctcttttatagctgttcgtgctacaatccgggaaacgcctccaccacctgttaggtaaattatccaaacgcttgctcaagaaataacacaacacacattttcaaacacaagaacaaaacaatgagacctgattgtctttgcagaaaatcaacatctcagagttcatctccacggcaaccacctcaacgatcagcaaccttttcgtttacctctaccattccaaagaaagaacaaggtaaacaccacaatcgcttggtttttttccgctcgatactcgatcctttatacatgttttcgtgtgatataatcagataagagatcagtttcaccgcatcggtttccactactaagatctggatcagtcgctaccaggaagtcagcatcaatcagccgaccaacgacaccaagcaagagcagatctataactcctatacgggtataaaaagcttccattggaacaaaactccaccagaaaatgtgtttcatcaatttacctcttcttgattcttcttcttttgcattttccagtatccatcagaaccaagaagatcggcttcggtccgagtcgcattcgagaaagataaccagaaagaaacagagcagcaacaaccgagcaagagcaaacgattgctcaaggctttgcttagtcgacgcaaaaccaagaaagatgacactctctacactttcttggacgaatactgaaatgccaataccggtttttatttgtgcaagcgctttactaaaccggaaaattgtggatttcctattttttcttttatttttctatattatattttataatataaatacacaaactataccaaaacatcgaatttttacccatacaaaagtcataatcatgattcgtgttgttatgagatataaaatttcacgatctgtacatcttctcgatttgatatactatggtcatagattcgatcattagcaccaaagggatatatattatatatattagacatatacatattaacatatataagagaaaaatttaacataatacatttacaaccaatcgtaaatgctacgttgcatgtctattgacacccatcgggacatgctttgtttttcggatatacgacatgcatgacgggctcttggtgtatctgcatcacatgccgaagaaacaagaaagtgaggatgttcaaaattttattcatttgtaggtggaactttgttacgaagaaagagatcgaatgaaaaaaaaaatgtttgagtttcgtaacttataaataatcttatggttcagtcaaatatatggtaatctaatggtaaaaaacaatgttgagtttcacaaaaacatgtgtcaagtagagattccttttctttttttttggcaagtagagtttggttgattgaatataaagtagctataatatccagaaaagcttacattaaggatccttttttttttttttttttgatggaagaattagtaattttttgtataactattgaaggttgaacatgtataggtaatttacatatacaatagttgaatgtcattactaataataatataaatcttaagtactaattttattattaactataccataatatggtatattgatgttattagatatagtaaatttacaattgataaagtagtggatgcctttttctcttttggttccatatggtagatcatttatgtacatcataaaaatattcaccaaataataagtactttggatgaatacatatattaatatattatgaagtgcttttgaactctttggatcttatatttaattattatgcataggtttcaacggtagatcaaaagtttcaaccttttattaatggtgcatcagttttagttgtgagatgtaggaaaatcatatgggtggcagtaatgtttatacgttacagtaatgtgtaacaaaaatcagtagaatctggtatttttaaatagatattaattgcgttgaaaactttgagtacaagagtcaaccatacgtttcaagagtgattataatatgaattataagtagaaattgttttctttaaatttcatacatattcgactttccggtttcggtttcgaacttatgagctataatcttgtcatgtaaacattttttaaatcaatctttgtctattcaaattccttaaaattaaagagaacaacaatcactaaacgattattgaaaaatgaaaatatcggtaagcattgcatcatcattaattttacatgtagattaaatttgttaaatcaaaagtttaatattcataaataggaaaaaaatcaaagatcaaacaattgaccaatttttccaaatttactcttttatatttgattgattactttgatagtacatatcatagaatcatcatatttaagtttttcttttgcttcacatgaatactagttcttctcacgagcatgatttaacgatattacatatttttgcttcatcatgattcttagttcatcttcggtggcggtggcggtgacagtggcggtggcggtgggggaggaaaaccataaccgggttttgttggatcgtgtttcgggtctggacctggttccggataatccatgatcgttggaatactctcttcaacctttattacatattaacaattactttttggttcttaacaaaaaaaaaaacaatattactttttggtttggtaaaaaaatacccaataattatcatatgctaatttctttcaaatgagtgaaaatatttattgattaaatttatttgtcaataaaaatatgagagaaactaaaatctatgaaaataaactttttattaaatgagattgcttaccttgtttaaggaattttggtcggtgtgagtaactccatggccttctctaaaccctacaaaaaatgtaaaactatttacagaacctgtttgaatataaaataaacagttttttcacacctttaatcatgcaattgtaaccattcctttacttaattagatgtttaaacaagataatccatatacaaatatacaaattgatttacccgaagaacacaatggaaacagaagcaagaacgacatgagaaccaccggctttatctttgaaagcatttttttgtttgttttagttttgttgtttggactcacgcttctatatatatatgtgtacatgtagttacgttttggtggaaaaatgtgttggcagattgatgatattgacacatgcatttcgcatttactacaattcaaactaaatcttttggcgattttatttttaaacatatttataattcatcaaattagtaattagtttccaaaaaatatcagatcatatttattaaaaagataataattaattaatgaggaaagtaggaaactatattatgattaaaaagaaaaatactcatgaagaatgattttaaattttttgattaatgattaaatacattgaaagatagatttttgggttagtagatgaaacattaattaaaaatcagcttttgttgatgagaaaccaatcttatgaatcctccactaggggctgcagaggcagatagatgcatagtttgtaaggaaagaatgaggtctaatgttgctgagattaggatcctaagtgtttgcggctcctcaccaagaaacttgagcaaaggcccaaaagaagtccatgagtgtctcccaagaaactaatgcacaacaaacatctccaattccatgaatccccatgctacgctcttgagtgaaccagaagtatgaagtggaagaggagagatgaaattcttctctggagattgatgatattgcctccttgaaaaaactattaaaagtaagtttgacctccagattttccaacataagctaagctactatatgtaatgtccacatccatatgcaattatcagtgtttttagagcctcttgtctacttttgtgttcaacatcactcaaactaagctacttgcgaggttcaattgataatcgttgctactcttgttaatttgtgtaccctattaatcttttaatcatctcgttttgagaatgatgagaatcaacatggatagcataatcgaattgagaccctgagaacgatgagaataaagataaatcaaatatggctcacagactcatatagaacaaaagtacgatccaagaaaacaaaaagaaaaacaaaccatattgtctaggatccaattgtgtagagcctgggatatacacgataacagtctgaaaaccagcatttctcaagaagcgtaaactcttaccgtaagctatgtcacagctgattacaacaatcacaccttgagggccgtgtgactttttccaattctcaattctgttgcaaatctcgtacctgttgccgtcgtgctcttctttcaaaaccacaggtacaaactctaccccagtaacaatgagcctgtcgacgatgtccacacttacgtacttacctcatatccctttactgtaagtgcctcaacgtttagggaaccgcagaatcctcaaccattcatggccgactttatggtctctaagactccgagagcgtcgcagccacttggaaggccaccgctacctaaatcccaccacacaacgatgggacatccacgattctgctcctccattgcttgcgaattaggctttgttttctagggttttctcccaattttagtgacctagacctttttataatgaattgtatttttttgttttttatacttctttttctttcctttttccccaagctttacgcattaggcctcatttttcttccaactattggccaaacaaattaaaagatcagccttgtggtaaagcccaaaccaacttggaaattttaaaaattagaaccggtctaatggaaaatggaagaattgaaccaaatcaacctcgaacattgatattaagaagtgaaagtaagatcctctctcgagaacttgttcaaccttattgtgcataggttttcaacggtgtatcaaacatttaaaatttgagtaggtgtggtgaagcatttcaaattttcattaatggtaagatgcgtaattttcccgatcaagtgatatctagatcaaatttgtagaatcataagtttattatgttgataactaagaaaaaattcaatgattcaaacagttgaccaactttatattagcattttatttatttcattgattagtttgatagtacatagcatatagttttttgcttcacatgcatactagttctccgcgcgagcatgattaacataattacacatttttatttgcttcatcatgattgttagttcatctttggtggaggtggcggaggacgaccataaccgggtttcgttggatcatgtattgggttagggcctggttctggataatccatgatcgtggggatactctcctcaagctatattacatattaacagttactttttaatttggtaaaaaatatcacaatatttatcatatgctgattttgttttcaaaagactgaaagtacttatggactaaatttcttattagtcaataaatatgagagaaactaaaactgtatgaaaataagcattttatttaatgagatttcttacattgtttaaggaatattggttggtgtgagtaactccatggccctctccaaatcctacaaaaaacaagtaaatgcaataaacaaccatattatttgattgaaatccataactagctgactagagagatattggatatatgttaaaaatgtaacacgattgaatataaaataaacagttttttcacacctttaatcatgcaactgtaaccattcctttacttaattagatgtttgaaaatataatctatatacaaatatgcaaattgatttacccgatgaacacaatggaagcagaagcaagaacgacatgagaaccaccagcttcatctttgaaagcatttttctcttgttttagttttgttgtttggaactaactcatgcttctatatttatatgcgtacatgggtagttaccagttggcggaaaaatgtgtgttagcaaattgatgatatttaccactatgtattcgcccataggttttcaataactaagcactacgcacttactacaattgaaactaaatcttttggtgaaagattgtattttcagacaagtaacatatttataattcatcaaattatcaactagtttctcaaaaactataaatcatatctaaaaaaaacaaatcaggaactaatgattacataatgaggaaattaggaaagtatattacgattaaaaagaaaaatactgatgaatactgattttcaaaattttgattaatgattagatacattgaaaaatagattttttggtaagtacatgtattactcatgcatctaaaaaataaattaataaaaaagagaataagaatatgatgtactcatatatatgcatctatatatatatagaaatatttgtatacatatgtatatatagttatactatcttaatctatctaatgtatacattttttattaatatataagttgtaaaaaaatcaatatgtgactacttatggagactcgaggtcaccaaaaatgtagttattgtcttatcgaccgtcaaatgattcatttagactcgacatcattttttatttttttttaaactaagtgtgaaaattattgtattaacaacgatgtcgtatcataatttgagttcaaactcgtattaatgtgcacgtatgagctatcaagaaaaaacacattaaaacttgtgacattcttttctttttttcattaattaatgacgttccccatcactataaacggttcgatttcttctagtacaaggaacatcatacatttacttggacgtttgattacttttttttttaatttatctttcagaattcagagttatacaaaatgatgtgtaggatattcatgttcatattgtttcgtttttataaccgaagaataagaaaaccggattggacaatcgtcattggggtgaggccggaatatctcacctaggtttgaaccggttcagtataatatctcacgttaccttggttcaataaaaccgcaatgagctttttaaacaaaaaataaagcaactagctagtttattctatttaatagtagaaaaccagttaacaaaacaaatgtgacacatgacatggtgtacctataacttctgatattgtgatatataactataaatatttatataacaacttttaagtttaagttaaattgatcaaaacaatattttcaatactttgtcaaatttctagtcaccctatttcctgtcttatttcgcttagtagagtctccttatcgagtgcatttcaacgtcttaccaagagctttgcttatggtatagtcgattatttagttggttctcgaatgtttatgtttttttttctttctttggcatgtgatcatctttttagaattcgcttaaccttaactttcatttcttaaaatgatgtattgacatgcattcttatatatatatataaaattctatctagatttgcctattgaaaaatgaaattgatgaacaaacaacaatgaaaatatttacattagaaaaataactagttgtcgaattcctatctttgaagcattttaattttcttattacgacaattccttagaaaagtgaaataacaataaccatatcactagacgttgcatatcaatatattttagtgttttcaaaatcatatttaaaataaattctgtgatttatcgaatcatgggactattaactagttagaatttattgatgattataaggatggattgaaccaatattacatatatttttctccactatattatagaatgttgcatcatcaatatatattacatattttgttctccactatgggttcttcttcttcatcctaggacgcggggcatgtggtccatgtggacgtccaggataacgtcgtccaggttcgttgggaccaggatagtccatcagattctcaatactatttttaatctgtattacatcatttttttcccaccaacaattactaaaatttgatttatttattttaacaaataaataaattaattcatttaatttaaatcatgacatgttattatatagtctataaaatatgaaaattaaacgtgttttattttattgcttaccttgtctgaggaatattgatcgatatgaatagcaccaaggtcctccttaaaccctaagaaaacaaatagagaataacaaaagaatatgcaaaattaattaataaacggggtatatatttatgtattgcgataaaacatataattaaacgttgacaagaaaaataatactattaaactttatgtgtgaaatccttaagaaccagactatgacttgggcaccagtactacttgtatggatcattttttaaatcaaacaacaatttttttatatggcattcaaagttgttattatttaaacttaatcaatatgttcttattaaaatatcgattttatttatttaacttgagattacctgaagaacacaatgaaaacatgagcaagaacgagaagagaaccaccaacttcatatttgtggatatataggagaatcaggtttgaataaaatggaattcgagttaaactgttttttagtaacacgtaactaaattggacatatgaaatggattgcttgtttgttgataattttggaggattgaatatgatatatcaaaatgaataaaagttttctaaggatctttgacaaagaaaatatgtcatctcatggtgacattgatctccaatttatagcctaatcctcccttaatggaccaatgattacatctgtgatgtgtcaatgtgtggtaccaattttactaaaatttaaacacgtacgtaacgtttgattgattaaaagaaaataaaaaaggtaactaaaaatgtaaaaagataaataaaaaatcttttaaaagttttgatatagaaataatggattctgtagttataagtagctgttgaggataacagataattaccatatatatatataatatatcacagttgaatatcattatttttatctattaatctaaaatttgtcacatatatctagtactctacgttatttgataagctcacacgtctcactgtctcagaagttaaaagattgtaacaattaatttggtaaaatattaaggcaatgtcattattttaaatcgaatgatccacatatatattaaaatgagcaattcgtttcaaccgattggaaaaaaatatacttttgggggaaaaaattatacttttgggggaaaaaatattcgtttcaaccaattcgttaccaaattccacaattaatttggtaaaatattaaggcaatgtcattatttaaaaaaaaatatacttttggggggaaaaaagattcattcaaatcagtaaaaatcaaaagatatccatcgatatttacttcttaaagctttttttgtcctcaatcaaacaagattcattattaaattccagcatttgtgaatctcctcccacataattgtgtaatcttctttttttttgggtcaaattgtataatcttcaaatgatccttctttaaacaaaataaatccacgtgtgcacacgaattaggtcagcagaagagtttacatataatttggatataaagcatgctgaatgaaaatggatgttttatgtattgcgaaaaagttatttttttgttaaacaatggaccaattacaaaatacacatgtatcaagtaaagtttgattgattaaataaaaattaattaaaaactctcaaataaaaatatttgaaaaaatttcgatatagaagaaatgcattgatagtatttaagtaggtaattagaaattattattattaatctaaattgtatcactagttctattattaacgatcgcgatcatccgaagggaatagaaagatgtttcagaaaatttatgatggacgctcgagtatttgtgatgcatcgaagattcttccaattactttccttgcatctatcccaaagattgcctcaaaaccctgtacgaaaaggtgaagcaccgtctcctccacttagtgcaacattgactcctctataaatgctcactggttgatgataatcttttgatatagtaaggtgaagtttcttgtaccaaatgataactttttgatcgcatgacatcaaatttaagaaacgaaacatgtagtttagtgatttgtgttcctgtcgttatgccatcatccgaattcataccgttgtgtattgcatattcttacaaaattaaaactatataaaaacccatcccaaatcgattctttgtctgtttaagaggaatccaactgtataaaagctctactaaaataatgtcaaatttcaaaatatgtaaataaatatacattcgagaaagaaattcacaaactgtaaacaaaatttttgtaaaataataagacttgattggtaattgtgcgtaaaggtaaatatagagttacataccctatcaaacaatcagcatcaataaccatacatgtaaaaagctaagagcaaatcattacctttcttcattctgattgttctttttctatttctcaaaaaaaaaaaaaaaaaaaaatcaccaaaaaatgaaattaggaatttgacgagcttaggagtggacacaatcagagggtaagaggatcaacttccgagtttcgctccttcatcggactccaatcttctgcctctgcaataaacaacagagagataagtaagacattaccatttaccacaaacaaacaatggtttctattttgctgctctctttgaatataaatggccgtagtttcttcagagttttggattatatatgtatgtaagaccgtaagagaaaagaaaaggaacatacttggcttttcagagatgaccataagccgccgttgtaatatggaggctacgaagaggaagattgagcacataccaaacatgattgtgatcggaaatgcgtccacctgcagaaccataaaacaaattttccagattattagcttttttccagataaagaggatgaagatatgaattttcttacgttgtacaagacgatgcagacaaagatgttgagtggaacacggaagaaattcattatggtgcttcgtgcttcttcaggtatatactgcgacctcatcttcattatcgaaggccaaaatattccgacacaagactcaaaaacacagaaaccaagcagctgaatggagctagttaacgacaatccttcgtctttcacctttgacggtgtcaccaagacctgtgccacacgttaatatagggtcaatgtgcaaattgtacaaacttaagagtaacaatgaagtttcagactcttgagacatacacttgttgtaatgggaagaagaagtgaagcagccgagactagaaagacaatttgcatgtagttttcgactctgagagatgagcgagacatgagacgagctgcaagggagcttcccaacattgaggctaacatgaaggttgcaaagacgaagccatgtggaatttcttcatcgtttgggctaagagctggtgtccagaggaaaacaaaggtgtacatcgaggcttcgaatagagactgaatagcgcccagcaatgcaatcttttcatctgagaaataatcatagattgtgttagagagatgaggaaacatagcttgcaaataaatgcaggatgggatgaatggagacagagtatattgagaagccttttgaatcaacagttttaacgctaactttgaacctgcctgaagcaattgctatggcagcaactttgaactgagtcagcaagtctttgctgtcagatggatctccaaaattctcagaccatgttcccaatatgatcgccattccaattgcaagaaagcacgcagcggcgtcaaagggagcaacaggaccaaaggaaaaagtgtcaacaagaagattgccaaacaatcccgaaaggatagccaccagaccgtttccaagaaatacagccttagagaatgtaagtgacagccactgttgctcaaagttcctctgcatagttgttcagaaccgagaaaaattcacatcaagctatagctaaacgaaatcactaaaagcttataagtctttacttttttcattatccaaccttgtctacagattgcactttgaagtccataaatgatagtttatagatactacagaacttacactcatcaagaactgaacgagttaactgtgtaaatcatcacgctaattgaggaacatacatggtaggaaggaaaactatgtttgtatcaaaccagtaacaaagtatttaagggaatttccgcaggaatcaaaataagaaaatatagctcaaatacctagactgactaatatgcacataaaaataagagtaataaatctaaggctaaccttattgtgctctgcaattagccaggactcgaaagcagaaaacaagagagatgtagcaataccacccaagatacggccaaccatcaaaactttgtactgtggagagtgcttggtgatgcaacttagtatgtaaactatacagtatgtaacacatgccctctttcgacccctgaatccaacacacacaaagatattagttgcctaaacatagttctcctccaacaacacggacttaaaacataagagagagagctttctcactgtttgtcagccagagatccaacaatagttccaaacaacattgacgaaccaaaaccagcaatgaatagctgaccaatatctccttttccaaaaccataagtgctgtaaaggtaatacacataaggaccctgaagccaatccccagctgaaacaacataatcatcgatacaaacaagtgtatcagcatgatacgattcatcaacgtattcaagaacaacatactaccatccttaattgcttcatactcgtaataataacttgtatcatagtcactggtcctaattattccatcaatatcatccaaatatttgatcaatgacacatttgatcaaacctagttatgatacatgaaacaaatatgccagaattaaaataaggattatcgtcaatcactgataccagatatggaaagagcaaagcaaaccatcgtattcaaatgataaattgcagatttgatatgagctataacaacaaatccaatcagtggatgaagaaaacgacggcataaattgtatctacttctggattcgatctagcacgtacttaagtggatgacgctaaaacaaaaaaagaagaagtatcgaaatgaactctcgtctcgtccaaacacagaatcacttagatcagatcgatgacaggtaacatcaatcaaattgcaggtgccgatcaatcaatcaatcaatcacagagctgattccgcaataaggaataagagagtgaaatcgagaagcgataatggcggagagacgtacccatcataatagagaaaacgaggaggtaattgttcttgaatgaattgaaggaagacgaagtgttgatccgatccttgttcgtcttgctaagctccaacgctgccactacggcagccatgactccaaacaccaagtagtagaaaacctccattgttgcttctctctcactctctcagagtaccgagaagaagacgaagaagaagaaaatgtcacggagtggtatgcgcgattgtaccaaaccaattaaggtggaaattatcctctacaacgcgggttcgtacacgtaagcattagtcggtgagtttcactatttcttacatcaataaaaaaattgaagctaaataagatcacattatttatgaattatgtacattcacatggattttgactcaaaaaaactatttttaaaggaaacttttgaatattaagtattaatcaaaatctaaatacaatgtaactttagtgaccatttaaattcgatgtataggattaggaaccggtccaaaccaaaagaaaccgatgtttggttatgcagtgactctaagccatcaaagaagctcttgccattgctaaggcaccttcataggtttggtttgcaccaatgaaaccactcatatgcacaaaaacacagcgtggaattgagctttcctctgagagcttctccttttctaaacctctccatgctaatggtaaagctttacggctctcaaacctctctggtgaaaccgaaactgcttgtattctccagttttcgcttctatcatcctgcaccaaccaccacatacacacactcattggcttaaagagaaataaaggttacgacaacatagtaaaattggtgcataaacctggttgtacctggtaaagaacatattttattggaggatcaatcttcatttcttcctcgagctcgaatatatggagtttccactgtcaattgcacataaatcttacaactttgaagactaatcccaccatttcatcaattctaatccctctagcaaattataaccccaaaccacgacgtagatgatatatgtaaaggagctcattttaacttactgggcattgtttactgagcttcataatttctccactggagtctatatcataccgttttgcaagacactccataacaattgaccgagctggtaaccacgatttcgcgtgaaaatgaacacactgtcaaaaggtagaaacacaggtagctttagaatctgcttggttgtattctcgattcatactcaaataggcaggcaaacatattcttgtaccaatcacttctaatgaaacagtgccacttttttatcagatgcaggcaacaattgttataagaattaatagcatctcattaggttgattcattcaaagtagttaccaaacaagttttggcttaggtactagcatttttcctagttgcacctcatttccatgaagaatcagaaccaaatggttttatgtaacagaacgagatatagaagggggaaaaacctccaagaactcagagccagcaagctccattgcccgatgaaaggcttcatcttctttggcactagactgatcaggttcaatccagtctaagttcaatcttccaatcctatgccccaggctagtattgtttacatatcttggaggttggtcagtatcatattgatggataccattgtctaaagcatctactgcctgaaattgtatacaacaagacattagtacattaccttagaaacatgtaaaaaaaacacagtatacgaaagttcaagaactggtctactatctctaacatcaatattgcaatttctttctttcttagcatactcaatttgaaaaaaaaaatgtcagacagagccatatttgccaataaaacaacagattcagcaacttgttcccatcaaacactaaactttcgaaggcatagccaaaaactttagactgttttgtgagcatagtttggatagttcactcaatagataccaaaagaatctagcatcttaataagcaacctttctagagcacgaagcactacctcaatgaagtttttgtacacagctagaaacaatcgaaacacatcaggatgtctctgctcaagttgaagctccttggaaattatttccaatccataatgctacaagacaaaaaatatcagcccaattctcaaattaagcaccaaatcacaagaaagtatcatcctttaccttatagacaagcccagcactactgagtttagtattaaacccaaggccaaacacttcactaaatcctttctggtgatggtcataacgttcactctgaggatcatacacacctccaacatcaagtgccgcatcaagcttctccaaaaccttatataaccacatcacaaaattactaactaatacagagttgatgcaaaatcgcacactcaaaacaaattactgcacaaattcatagctacacacacaaaaattcaagaattttacataaaaatcaaactaaattaaccatttctcgagaatttcgaaaaaaaatccaaaattgaacccaaagaagggaactttgcacacagagaaactcaaatacagggtaaattgaacaaagggtacctgatgatctctggttcggacgatttgagcatcggagaatctattggaacgacgaaggatgaagcaagctaaagcttcgtcgcagtggaatgttccattatgggtcccaacacgtttcgtagagaaactagctcggaagtttgaagaacgtttgagaaacagagaacgattccagattctgctgcaacagagacctcttgacccaaacatggctaagagagagaagaagaagctcttctacaactaaaccctcgacgtcgcgggtttaagcttgacattataacgccgtcgtttcgtcaactttgggatttgataaaacgacgccgtatgtgttttctttgtgaaagactaaaacgacgccgtttgaattttacatttttggaattattttcttagggaatcttctaatagagttgatgatctttggttgacctaccaaatatggttgatcaccacactgaccacagtttggttatcaattatcaaaattctgtttatatcatattaaagtgatttcatgtaccaaatgtattgttttaatcgtgggaccttaagttataatcatagaaaactcaggatcaaatccaaatgacaatacaacaataaaccaatggattatcataattgcataaacactctcacttctggataagtttgttcataacaaattattaacatgacaaaatagtactattaaagtaatgcaacccacattactttggaaagacttcaaaccaaaggaattgagaaatgtggtctataagcaataacatcattgtcttcaaccaaatcaccaaacatattttcatgatcattcctcttctcaaactaatctcgaaaccgcgatcattttaaacccgatcaatgcaggatactaaaaaaaaaaacaaatcttaaaatgtcaacatcataagattgatgatgaaggttaactaacaactacgttttggaacaaagtcgatatattctatgaagacaaggacatgtagagataaaagagtataaataatgatattaccaattaagctttctcttgaacatatcatcaaaacaacaccttatgagcaaatggcttatgttcacctactcatgtctcttctcattttcattaccttcaaatcttcaatctctgtcgtccctgatccaccaacacaaaacctaatcaacagaatctgcaaacaaaccattgatttcaagttctgcaaccaaacaatcacatctcagctagtcagacgacaaacttcaatcaaaacaatcgcgaaactaaccgcagctaaagcttggatcaacgcgatacaaacgctcgataacatcgaagattctcttcttccgaaagcgaaagataaacgagacaaagcagagtttgatgcttgtaggaaagcttataagttggtggatgctcatttagacaacgcgttgaagtatttgtatttacgagattatagattcatgagagcgtatcaagctcttgcacttgtgaatatttccatgtgcaggactagttttttccatccgacgcctatggtttatgcgaattggaacatgaagatgttgacggatatagcgatttatgctggcaagattctttctcctcctcctcctcttacgaagaagagcaagtcgccatgaaagacgtcaattttgaaagttggagctttgtttctcttttattcttattattcaatagaatagtattttttctgaattatttcaaacaaaattccaaaacaattatatacgacaatgttttctttgttatgtagggaaaaatataggctgagtcatttttttctatatatacttgtttcttctctttgtatcattttttatatataaataacaaatttttataaaagaaagacataaatccaaagtcggagcttcgattcttatcattcagtttccaatggtatttgtctgatttattcaaccaaaattcaaaaaattcaatatacaatagtttttggtttggtcatggtcatttgctttggaaggaaaatataggttcagtcactttttacacgtcatttcttttatcataacttttgataaataactatattgactcttttttttgacatacatgagatgcgagtttttttccacaagtaagtcagccatggattatggcctttaaaatttacaagagtgcaaggttcattgaatttgaatctggttgaaccaagtctcaaagctctccaagccaatacttgagtcaaattaaacttcatgaaaacttttccacttcgtgtacgcaagtaagttcaggtttgcatggctatcaatcaaggatttacgactagagtagtagccatggattggagagatgcccttgctgatttttcagaatggaacaataaagtacacagtttttgaataatgtattaatgttttatctgttacaccaatgtaatacatgattccaccaacataacttccaaaatacatttatcaacaacaaatttcaaaatatatcatgcgactgcaaaaattcaggtattgaaaagggtattgtcaatccctctgaacaaacacatcgacatatatattcgaataatatatgaatatattgttgcattgcatgtgtgaagagcatggaacgaatatcccatcaagagaattgacctttctgaatggagtattattttgtttctaattttggaagcgagcgggagcatgttctttggtagggaatttcaagcaattaatcccaccatgtgtaaatgaactcagacaaaaaaaaaaaaaaaaatacgaacttaattcaatttattataccaacgtaatacatacttcaaccaacataaattccgaaatactttaaaatacaaatggctgcaaatttaaaggacaattattcatatgggtgttgtgaaatagtcagaacaaaacccatttacatatattcgaagcaactacaaaaggattcaagcaactggatagtaagcaaggctggccaaaccacacattccctgaggtgaatctacgtctctcatgattctcatataaccattttctccccaagattctccccatgagttcttcaacaaccaatacttgatgccttcttcgctcaccccataaccaactatagtaactgcatgagtaagctgcgtcccacactctccgttaaatatccctcccgagtagtgtataaactcatatcctgacccttcgatcgccacggaaacaggctgttgagacactgcttttagcaatgcttcctcgtcattttggggaaccgtttcgtatccgctgatggtagcagcagctagatgatttgactcacatgtttgttgtgctccttggtaaggatagttatcctctgtggtgataccttggttttctttaatgtagtcgaaagctttccacattatccctccgccacatccattgttttccgtactacaatccaacagttgctgctcagacagcgatacaagctctccattcgcaatcttcgtcatgccttccactgctgccaccgccgagaaagcccagcaacatcctgttccattttagtaatctttatttttagtttctacgagacgagaatatatattactgaataagttaacatggacatttaggctaatgatgtatattagtgtcgtagtgtcccattaatgtgttatcaacatctagattcaagtattacagtatatatgtatgttactaaaaaaagactagagtaatgataattaataaattaccacattgttgttggtgcttaacggatgtaacagccccttcctgtatccaatccatgctctcaccggtttcaccaacgttttcatatctaaacgataccgtttcatgagaatcagttgttgaaattctggtcataccttcgggcaccaccagccccgtgtacctcgccttaaattcctcgtcggtgagatcagagaactcgttaacatccaacgtgtacgttttgttcgtattcatattgatgctctcgacaaactttaagttattcgtaaagatctcgaacctactcgttttctcagaatcgtctgagtacacgcgattgaatcgagacatccattgctcatgtttctctacggcagaagcttcaaagagcccgccacgagatgtgactcctgaagttctggaactcaaaagaatggctagaagaaagaaaacgatcgaagtcatttgatactagagagaaaatgtaatatgaaatgtttaggtttatatgactttggtgccaagaaacgactatgagaaggtggtgctatatagagtttctgaagtggtgcgtatacgtagttgcatgttttatgtttgaatagtcagtctaacaaggttttgataatcgtctcattgctaatttttctacacgctatgaagtcaagtaaagggccaactaacacaattttgagggtcccattagcgcaatatctgcaaacgttttttggggtctaacagtaaatatgggatcctaaagatttcgaacttaagatttgtcaaatttattcggattgttgtgcctaggtatttatcggagggtgagcttacacattaactttttttcttatcggaactcataataaccagaaagtctgaaactgatattctaaagattgttgtagaggttttaagaagtgttaattgtatcttctgttgtcatatgttgatatgttttttttttttttttcacaagtttccataatttttggagaaatgattagcaaggaatacttatctagacattaattatcttgccttgttgagataacaacatttttttttttttttggtgtttttcaagggacatggcagaaatgcccaaaagcaccttcaaattaaacacgaaaaactatgttgaaacagagttttcaaacagacatgagttgtgtttagaactgtttgtatggctgtcgaagaaacgacaagatttttttccgaatatgtatcgttgcatgtgtgaatagctcggaacgaagaagagaattcgaattgagttaaggtatggttggttggatacctcgtttaatcatgtgttgtcctatgttatgtgtttcatatgttacttgctttccactttaaaacaaaaatattctagtttccttagatatttcaaacatgacagtttccacttcacattaaaatatttggggaaattaaatctgaaggagttctacgaaaaaatttgtccgtatacacctttttttggagaatgccaatttggaccaaaatacccctactcgatattttaaacatttttgaaaaaatttaacgttgataacatgtagatctacaaatatatagttgatttgtaaaaaaaaaattgttatttaattgaaaaagttgattttttttatagataaagttttgtctaaatttcttaaaagacgatttctaatgatctacttagtttagaatttctattctaatattgtgtacatattctacgatatttagactatttttctttctaacaatcttagaaaataggatatttaatatctaaaaattgtcgaacatgtattctaaaattttcttcatgttctaaactatgtgtgaaattgtattctaaaaatttctatagtttctgaaaacggtagaaaacgttttctaataaattttcacttttagaatttatattctaatcaaatttagaattttgtttctaaactatttagaattcctagatatagaaagtgaatctttgaaaaaggtaagtaaatatttattaaatattacattttaatagtatattttctgttaagattacgatttttactggatttagaaaataaattctaatttttttagaatacaaaaaaaaaacgcccaaaaataaattgtaaacaaacgatttgtgccctactcaatttgtggcctattattgatctcttcttcttcacgttcttccttttccatctcgcgttcttttttcattatgcatatctatgtgaggagtggtatgtggagattgtagaggagaaatttgagagtcagagttggtctttttttagggtttgaaaacctctatttcaaacaaaaggtttcaaaataggaaaatatatcagaattttgtaaatatattaggacatttttatttttttattaatataatttcgaaaagttaagggtaaattggattagaaaatcttaagaaaatctatttgactaatctacaaaaaaaaaaggaatagatggacaatttattttgtagatatcctttagatttaattttcccaaaatattttagtctccttaaaaaattccaaacattatacagagactgaaactcataaagcctagaatattctaagcaaaccccaagttatgtatacagtcggtaccgtgacaagcggaaagcaatgatacctaaagtatgaggttccaagaatttgaatagaaccaaaataccctatatgtaatacttgaattgtggactccaaacttgtcttcctcaaaccaaaataaaaagaattaattgaagtcaactttacatgaaacatacttttattagattcagttgagaactttttttttttcttgtgtgattctttacgtttgactggagatgatatagagtcgttcgttttctcaaagttttcaaagttagaaaacaaaacaaaaatcgtcgaatttgaaccctagattatgcctatacatacataatccattaatctacatacctgttttgtaatcagaccggttgggcctaaacaatccttggacttggcttaatacgttaatgattttataagttgtaacattgctttttttaacaacaagtaatactataccagaagcgttcatacggtcaactcaacatgtctttttttttctttctctctaaccatattgtatacatacagtagtttgaccgggtttagattctccactccggtttaatattccaagtgactcccggaaagtaaaaaaactttgcagagctttgtttccatatgcatattttttccagtgtatatcctgatttctcaagtaaagaatcttccctgtataatttagaaaaccctcctcaaccttttcacattcttcacaacacacacacatacactttattttaattaaattacacacacctctctgttcaccactctttccaatctctctagcctcattccatatcggcaaggattcagatagagctcacggcccaattcgagcctgcacgaaactggggacttccccaagaatccaccattttaaactagtcgcaggatccacaaatcccgcggaataatatagagataaatatttatgagaatgaatgttcaatcttggtgtgtagagtaacaacgaggtcatgtgcatcatcaaggagcttccacacatctaactgccctgccatactttggcactcccttaaaatctcatccatgctgttatacctttctataatacgtttccttctttgcaacaccgaggccgctattgcatagagcaccaaatcatcagtgggaggtgcacgttgccttatcctactccacgcggattttcccatcccggctctgattgcggcttgatctgcccacattacttcccatagacacaatgtctgatcaagtgtcagctctcgtctgaacatcacaacaaccattctgtatacaaagaaacagtcttcagcttggagtttctcaaggtgcctataaagctgagagtctttagatttgattatctttgagactatgttgagttgtcttctgattccaacctcgtcaagtctgaaattgtgacgagctttcttcatgaacccgacgaaacaccaaaagacttcatggtcatcagggattacagagagtataggagagagaagatcactcattccttggcaatatccaatgtcagggtcatacaaagcataagcttcaagaacagcaactagccgtgcagcttgaaagattttgtacggttccaggtgattgtaatctttcaacccaaccgcctcagcggcacgacatgctctatcctccgatataactgcctgggatggagaataggaggtccactctgagtcagcacgcacggcgtctagacggataatacgctgccacgtcacaaaatcctcttctgtccggggaatagatgaactggctggataagtactattcacatccggagtagcagaagattgaaagacctgtaccacttcactctcatctgaagaatctgaatctgatgactcggaattaagtgtagagatagtagcattggtgattcgtcttgaactactaccgtcgtctctctcaactgtacatgaaacctcactcatatacccaatatcttcagtaatgtcttcgtcactagagagagactcacgggcactaacaacttcatcagaacatgaactgtcagtgtcttgaactcgaggccaatcatactcatcttggatagtttcactgccgttgtataacttacgagtcccgttattgtgtttttgaagccgtttgcactgcctacgtagtctctcatactcctttctgcatttgtaacaaaaccgatgagctaaagaatcgaaaaaagagctataaagtaaaaaaaactatcccccaatatagtaattcaatcagtctatctcacctcctccggtttcttatagtaactctctcttctttagaactattaaaaccatacctgttagtataaaaacaaatcagcaaacataccaaaaagagtgcaacttttcagtttcttctaactaaaccacaactctttcatagaagcaatcgtagctaataggatttagctactagagttttgactgtatacttacaatccaagaaggaatggccacacctctagccgaatgcttggctcaataccctacaaggaaacaagagaaatataaacaatctttaaaatcaacaaccacaaaaatggctgtgactgtgaagttagttccatgaagctgtgactcactctacttcgaactttcttcaacaaatccactcctccattccgcaatctaccgtcaggagtaaaaaacctcttccattgctgaggtctaagtggccttttccttttcctccgagaccatggtgatttaagacgaggcctgcaacaaaatgaaacagaggttaaaaatgtgcctacttgatttcaacaagaccaaaatagaaaacaaaacatccagaaatagccttgaaagctttaaatgtacagattcagctaaactctaattaattatctaagattcgatgattatgaaagtctaacaaagtcaattaaatagattcgagatcttaagaatctaatttcaaacaatggagatctaatagactaaccgatcagaacaagaagcaggagatgaagaagcaacaacgaagagagcagaacgtatttggatccacgaggatgatgatgaagaagaaggaggagacgataatggcgatgaaggattagaagacgaagacgtcgtttgaatccgtctcaaagctttcatctatgttcctaacaatctaaaaacctcttcctctcctcagattaaaacctaatcaaacgatttcaccaaccaataacttgaactagacgataacttcaaatgtccggcgatatccgccgtcaatattaactttccgacaccgtcttcgccggagaccgatcaagaaaatgaaaatttgaaaaaaatctcctgccgcgtctggtcttcttcttctacaccacttgcttccttgcttccttgcttcttcttcgtttcgtttactttttgcttttctcttttgtctctgtagaaacgtgtgggcttacttgtaattttctctatctctttgagaatcttaatgaccaaaaaaaaaaagtcttcagagaaaaatggtggtgactggagagaggcttttaatggtgagaaaccttaaaatttacactttagtcctgtttctttcactaatatttttaatttaccccgatagatattatttagttgtttcagacttatatttttagtcattgtatctcaccgattcttttattgttttaagtatttttttgaccattacataatcagaattatttttgttgcgaaatatggtaatttgtaataatgtatttgttatttattttattcagttagaagaaaatttaaaacattgcaaaatttataaatagtgtagtcaaaatttagtgatttaaaatatttacttccttatttcgcatgttatttatgtattagctattaattagttgtttttttgtgtgaaaaagagctattaattatttgttgcatattttctttctttatcaagtttatatagtttaccctctccacatgttgttcccattcagattttgaatccgtattaacatgcagaccaactaaatttaaaaaaatggaaagaaaaatttatgaataacgtaaactatagttcatagaaaacaagttcagtgaattaagataatgttgaattattttcgatgtgtttttttttttgttattgaatatttctatgtttctaggttaatttttgagttaacaatttacccaaaaagaaaatatagcgtcagttgatagtaagtcgtacctaaatacaccattatttactgtgtatgagttaaatgttttaaaaaataaaattggtcgaatggatacaacgatctagtgataatggcttccaccgagtgagatgaaataattcccatgttttcaaccgaccaaatcaagcaaaagaaacatatttatatttcttggtataaattatattattgttgtttaggaatcgacctacatagcagttttgttcatatatgttagtatatttgataatacaactaaacaaatctgtaatcatgaaaacaaaaaatctgtagacaacaatgactatattggttctacgctgtgattattaattagctataacaatttcttatcttttcaaataaaattttgctttacgagtctcccgtttatggtaataatttgtcttattcaattgaaacagttagggattatgccatatttacattaatttataactaaaataaatgggtcgattacgctattatttatcaaatgcaaagataggtttatttattaagctgagtgatatgactcgtcaaccacttggattaggtttgggaatatcccagatgcaaagtatcacaaatcatgcgtctgttctggtatataccttacgtacaaatgttggatccggttttagtttcgtaccttttttttgtctgtggattctagaagtatttaaccaaaatgactttggaaaatgaaactagaatagagtttattgtgttatttatttaatttgacatggtttggctttgaatgaaataaattgattcactaaaaaaaaaagagtttaacaatcgttctctgagtctcttcttccgatctagtgtggtcaacaaaaacagacgcgtatatatctttgtcaaacaaaatacttcaaatttggtaaagcaaaaaatgtgattgtttggaagttactatcaaccacataactatcaatgtgtagattcttgtagcgttaatttattatatttctatcattgaagataaagacattttggttaaactaaattgaaatgactaaaaccgaaattagaaaagctaatatttgatttaatttgtctgacctcttcgaccatcttttattttttgtataatactttattatacatctcgttcgtcatccaaccggcaaatggatgttgatatgttcttaaattataacctttggaattatattaagcctttattatcattatcttctaggggggagtcatcaaaatctacacaaattgtctcaattgtaacaatgattccatttaacaagagtgcaggctgcactaattaatatttggtttaacaaatatatccaacagctacacgaatattttttatattttttttgtatttaaatatcaatgttagaaaaatctacaaagttaaaattttgattatataatacttaaaatgttttataatgcaaatgaaaagaacttccacaagcttaatgactactataataatataaatgattttaaatcctgaaaacagatattatttgggtttcacaaaaaaaggcatgttaatcaatataccattttgttggaagaaaagattaaaacaaaatagaaaggcatgttaatttatttttgttgtgtcatgtatttgtcaataattcgtcgataaaactaatacatttttttaatacatagatatgtatactgcgatggatccatcatgtgaattagattcgtgttctcgcttttgtctgctcatgtctttcatgatgtagacacaatcatggtgtctgacataagatgtccatatgacccataacccttctttagctatatgttatgtacattaataattgcacttacttgatctatttttgagttttgcatcatttgttgataaactatataaactttacaaaccaactcaaaacaaacatggcctcatggaaaatgaaaccaaggctgaatattggtagatatctagattaatgtttactttgatctaattttctggttcttctttactctcaattcgaaatttttctcgtccatctccaccaaataaccaattacttttgaggattatttttttcctctttcaatgttgatcatgttggataaacatcttccaccaaataaccaattactttttaagaaaaaaaaaacataagagaaaacttgtaaaccaaagtcaccaagatcaatatcacaatatggtgttgctacacaacataacaagtaattaagcaatacacggtttacaaaacaccaaaccatacgacttagtgagacaaaaacataaacgtttaaatcaaaggatggagcaccagccatgagggagtttagacgcagcagcttggtcaaggaaccaaaccacttcaacatccgcggttagtctaccagctggtaagtctttggtatgattaagagcagccgcaaccgaatcagcctgctctttatcacatacggccataacattataggaagcacaattgataaccggtaaagtcaatgtgatcctttttgacggtggcttaggtgaatcggttatagatgtgacccatttcaccttctcattgatctgagcatgtccagggaatagagacgccatgtgaccgtccggtcccatacctagaagctgaagatcgaactgtggaaaaccagaagatttgtacgttcggattatgttttggttcactttttgtttgaggcactcctcgtacctttcagctgctagctcggcgttgccttctgccccgagtccgttatcgatagcgtagatgttttcagctggaactggaacctgaatggtgggtgttttatattgtcatgaatgcaaactttgatactatatatggtacgtagctcataatttaacaatagaattgcattattttttgaataaagttacttgttaagcatctctaatcattttgagagatagaatttgggaatataaaacagaattttcctttgctaattaaatagttgtttttaacgtatacatgtttaccttggagagaaaaccatcgtaagcgagtttatagttgctatccgcatgatcccaagcacaaaccctctcgtcgacccaaaagatgtgccacttagaccactcaattgaatcaatataaggagcttctaacaatttcctataaaacaaaaatgaaaactataaattttagaagaatcaaacgaattatagattggtattgattattgataagagagttatgtatataaatcttgaaacagaccagagccaggctatgaggtcgccgccggagagaacaacggtgaaaactcctctttctttgcaaaatttggaggaaagatcagccgtgtatttggccagctccactgccatttcattatttgtcttgaacaccctcctcttcaccggtgccatctaattcgatgaagatgataatgatactttttgtgatgctgatgatgttggtatcgtacaagtggaggagacttgcttcttaaagggaaagtgagtgaaggattctttccaagtgaatgagacaaaaaaatctgttttcttctaagaaagaatatgattttctataaaactacatcttgatttgttttttggaagattagtatctaaatgtatcttatacctttcttctgtttgtagtttactcattacaaccttttattattcctttcgtcgttatggatttattctacataacactatatcttccgaaacaaaatcaaaattttaaaggaagataatgataataattaattctcgaattagcacaaaagttttattgtatctagacctcgatttattaataactccaataccatatgcttagaggaaacaaaagcagaaccgaaccacaacaaactcatctaattctttctatacaaaccggaatttcaatacaataaaaaaacatcttctttttgtttgtttggtttagaattggttcctctgaaaacaaaatgcttaatacaaaaagaggtaccttttttttcagtcgatgtttttgtcttgaatcgacagtataataatgagattcatgttttaatgattagggtttgatttgcaaagttaggagtcatctcattggtctcgagctcgagcttcgaacagtcacaccgtgcaagaacttggcgtaacctaagaaattcagcttcccatctaaactacggatccaatccttgagcagaggatacgcatttggtcccaaactcatctcctacatattccataataacccataattgatgcaaaagatgtcgttttcacatatctaagagatataaatattgaagtctctacatacctcggcgagttcttggaccgaaatggctcggcttccttcactttcaaagtgttcaaaggctaccgttgcgatctgttcccattcttcaagagcctcaagttgataaacgctgactgaagccgcacaaaactcttcaaaatcaagtttcttatgtgccaatggttgcatcttcaatgaacaaaaaggaaacacacagaagaaaagagtattacagatgtattttagcaccgactagaaatgatgggacttaaaaagatgtgttagtacgtaccatgtttaatatgtcaggaagtctagattcgatcatagcatccgtagcatatcttgtcagagcctgcatttaccacaagattttgtttgatcatcaattgaagaacagtggcattagaagttattgttaaacaaggaacgatgaaatgtggtaatcatccactgaccgtggtgaaattgtgaagatgcaagcctccatcttctggctccaagagcataaactgtgctttaaggaacacgagttcctcttcgggtatagctttggatagagactgttgtacaagtgacagcaaaattaagatacatacaagacatatagatgatcaaatctatcaagaacaaaagctaggatcaaacaaacagaggaagtattttgtcatgtgtgtctattcttttaccttttgcatgaaaattgtgatcaaaatcctaagaaaatcttgacaagatgaaaagcagacaattaccttaagtgctgctcttcggaaaggcgatgcacgaatataagacttcaccaatttgtagatagagaaatccagaagtaaaccaggattttcatctcgaagccatggatgagctgcaaaattattaatcatactcatgttttcatttcaccaatcaatgtcactagttttaacaatagtggttataaacttacctaaagcttgagcagctgtcattcttttcctatggtctttattcaaaagccttttcacaaagtctttggcaataggagatattgaaggccacggcaaatcgtcgaaattcgggttcgctctaagcacacaacgaaaaattgcagactcggttcttccgtaaaaaggtctacttccacagagtaatatgtaagatatgacaccaatgctccatatatctgcttcggtgctataggatctgtgaagtacttcaggtgcaacatagtatgcacttcctaccacatcgttgagacgctgatctagttaaagcccaacataaaaaaaaaaaaaaacattccatccttagtcttctaagtaaaatactacaagcagagtcatgtataagaaagaggaacaaagaattaccaaatctagcgtaatcagacaagccaaaatctataaccttgagtactgcatcctcatttttgcttgtaaagagaaaattctggatacaacagtatggcatttgttcaagacagaagcaacaactacttatgatattcacattggtagaagaacaatgtgtgtacctccggtttcagatcacggtgcacaacaccttgaagatggaaaaaagcagttgcagataaaatctgtacaagaatacgcttagcttctgcttccggatatcgaccacctctacagtaagatatagacatcacagaatcatcctccatatatatgcaacacaaagttacctctttaacctaagtatgccaaaattcaaggtggaaaacagaaaaaggactagttttgattttacctcgccaaaatactgtccaatagctctccaccttcacataacctggaatcatattggagtcaatatcttaaggtcatctcaattcctaaactttctcctaccactggtactattagaactatacttttttttttcctataacagaggcaatggtccaaatctaaacacaaggagattataaataaaacaacttttgatatataagaagcatgaaagagacatacttactccataacaacaaagacattatccgaatcctcaaacacatcatagaacttaaccatgtgactatgcccagacaaagctttcaacaacttcacctctcgacgaacatcttcaatcgacaaagctgatgtcatctgaaaacacattgtatcaacacaaagaacaaatctttcgaatgaaacagtaaccatttctatgttccaataatcttggaaccaatcacattgtaacaaaccttagatttagagatgattttgactgcaactgtttgacctttgatcttccctttcttagctttagcccaacaagtatgaccaaaatgccctcgacctacttctctcccaagctcatacttaccttcaaaattcttcgcaaatccgaaatttttatctaacctttctccgattccgccgccgcttccgccggcttcactatcctcagggatcggaccatcccgaggatgtggtgctgtacctcgtcgccgtcttaaagccgccataatcggtttcgcaggtgaaggaggcgggaatggccatttgaattttcttcccggagttctcgccggagatggagctactcccgccggtaacgggctttgaaatgggctgatgttgtaagggttgacttctgaagtagccggagactggggaattgatgatgatgatgaagtctggtggtggttttggtgtgaccgatgtggtaactgagcggttgcggaggggatttcgtcgtcgtcgtcgacggtggaaatgttccggctgtaacagtggcccattgttgccggtcaaagttttaattgatcggggaaaaaaaagtcaaactatcggacggtgaggagacggagttgaatagtagcttaacgagagaaacgaccgatgagaaaaattagagaaaaaaaggaaagcgaatatttaaaaatttaattaaattgactaacaaagatttttttgttaaacaaaaatataacggaagaagagacgggcgttgaataatggcggtgatttgctaaaagggaaataagccaaaaaaaaccatcatttaatcgtttaatacttgtagttttaaatttggaataaaaatatctcatttattttttgttgttttttaaaaccatcatatttttaattttggtaatttcgaacctggtacttaacagcggtcaatgaacataacggaattatttgacagtgttaaattttaaccttacgtattttaattatataataacaggtttacaaaaagttttgtttatattatcttgctatagtggtaacgcacagtttgagtaatcccaatttctcggttcgagtccacatcccactcctattaatttttattttttatttttctgattcacttcgtcttcttcacgggtttttttttatctccagtaattgattttatttttcaactctcatcatttatggttatggtgatggagagagatgtgattgaccgggggaaagacgaagaaagagttagggattttggttaaatgatatagattgatggggaagtgaagcaattgagggattttgacgaggaggaagtagcagcaggagatgaaatcgcaattgaaatatgagaaaatttagggtttttggtgaattgaaggaatctttgaggagagtgtgagatttgtgttggttttgtgaaaaaggggattttaatctctttggccccttttggttgaatcaatttttgaaaaaccctcacttattctcactacccctctccttcctaacctatttgaaatacaattttacccttctcctttacttttttttaattttctatttaatttttgctaccaaataatttattaaaatcaaccaatcatatgcattctctctcttatctcattaatcatttaaatctacaaaaaatgctggacaactgaaaccaataggcacaactatgttgatggacttctacgaaaacatataattacataccattcttttttctttttgattttcaagttataatcaaaaagactccagtcatacgcattgcttataatggatactattaaattttttgtcgtatttatacaaattaatatgttttgtattggtacaactaagtacaactcgcacaactaaggtctattcacttggctagttttcagaatattataaaatataaaaatttaaaacaaaactaagaaaacttaaataatgcatacacaatggtaatgaaattacataattagtttttgacaaaaatcatattttctaaattaatgaaactcttatcacaaaatctaacattcatacactaacaagcttataatttcatggttactttgtatattttaacaaaacaaattaaaaattttaaatacttgtatttagataaatataaatacaccgatacaaagtaatggtattttgatgggggaataccatatgttccacccataaaaattagttttgagttgataacaactagatttattatattctcgatattgtacaactatgagcaaaaatgtgcaaccgagtacaactgtacaactatgggcaatatatttttcagatatttatagatattttttagatatttgtagataatttataataaaaattagctttatttttttgtcataaaaatatttagttttttttttgtcatcaaaaatacttaattttatagttaaataaactattttttttcctttcaaacttttttttccttttcaaaacactgttgtttaataaaataaaatactaacattcataaattttttgtgttttgttttggatcaaaatacgttgatgtgtagattcatatttattttggagtttttttttgacaaaaaatcttagattcatacataaactcagatgcatagttgtacatgagcgtaccaattgtacctaaacgcttagatctattatcttaaaacaaaaagacagccgaacaattgtatctaaacgcaaaaacccaacataattatatctaaaaatttagccacaattatacctaaaaccaaaaacacaacattatctaaagactcaaacaagaagccttcttcttctctttgtcattcttcttctcaatttctttcttcttcttcccttttcttctagtttttatcacaaactatctctaaggaacaaaattcaaattcattcgaatcccaattgtaatcctaaaaactaagtcataatggctattagaagaggcttttaagggacaatttcgattttaaatcgatcattaattcaaatttgaattgtaatcataaaaatccaaattataatcaaaatttcatccaaaatccatcattttcaaacaaaatcaaagagaaaaaagatcaaactatcaaatctaataaaaaataaaaccctaattaaacacaacaccatcaatcatcatatatagaatagagatggatttttggattgatagaaacaaatgaaaaggtaaaaaagatggatatttagattgatagaaagaatgaaaaggtaaaaaggagacgaaagattatatatggaatagagagaagagagtaaagagaagaagaagaagaaacaaatcaaaaattttgtttttgttgaattgagagaaaaataaattgaagatgaaaaaaaaattgatctgagaaattagattttttttttgttgagaaaaaaatatccaaaattgttatggatctagatccaacatagaggttgggttgtaaataagtgaaaactctagttttacttgtcttttactattattctgaattgaaataaataaataaacatatatttttttataagggggctaactagagaatgtttgaagctgagggggtggactagattaaaatcctgaaaaaggtgaggagataaaggaaaaatcaattgcagggatggtgaagaagatgaagtgaaaaacaaaaaaaaacgaaaaaaaaataactaaatgggaaagaggcggggttcgaacccgcgaactgaggattatcctacattattgttaccaccagaccaagacaacacacacgtaattttctgcaaattcattgtttataaatatcacaacatgtagggttaaaatttaacactgtcaaatgattccgttatggccatcaacgcctgttaagtggtaggttcgaaactaccacaatttaaaagacaatggttttaagagacaataaaaaataagtaaggtatttgtattccaaatttaaaactataggtattaaacggccaaattaaaaataaatgggaattttttcggtttttttccctttgctaaaacgacagcggaggagacgtgacttatacgacagccacatgagcttagtgagttcatttttttgtgttggtggtaattttttgctgaaattaaaaacattacaatgttgtagtaataaaaattggaatcggacttatataaaaataattcaaacgttagaaaatggataggttttgttaataggtcacactcatagctattatgagaaacgcgaaaacatataaattcgacaagtacgacctattaatggtaccaaatggatttaaaccggtttagtggattaataacatttggtataaatcgcattcaaccaccggtttgtctttaattgcggacgtttgaatatgtttgacattgaaatagtcattagtcacgttgttttagcattgaagaaaaagtctaaaattgatcattgtttggtgcatattagaaaaataataaattttgggtcttacataaataaaataaaatatcctttatcgtcaatggtttaatcgtctgtccttaaccgattcggttagttttagtactgaaaatcttcgtgagcattcgttctcttgtcgatgtcgtaccaaaagtaaccatcaccggcaatataaccgtacgattgcggattatcattgtgaaatgacaatcgctttctaaccaatcttaatcttggttcgttgttatctaaacaggtccggtttgatctctgttttggtacgctttgtggtcggcggaacctagccacggttgaggcagtggtagacatgtaatttggaattgaatgggcttgccgtgtgacgaaagaattgccacgtggcgtctggtcgttgagttgttggtggtgtgagtacgtattattatacttatcgatctcgactatcttgaccggttcaacgatagcctgatcggttgacattctccttccggtttcttgataaccgtacccgtttaatctactcggtcttttgtcctctaattcactttcactatgagcttctctttccattgttctccacatctttgatcataaacccaaaaagaagatcggtttgtctattaatatacttaagaaatggaaaaatcggagtttgattttattgaacctgtttagagaaagcatgagagtaggaaatttcgtccccgagcttggtcgtgagttttttccggtgatctagagctagagcctgaatccgaaccaaagcctggacccgttgcaaagtaatgctagttcttctacgaacgttatggcctctcactagggcttgtagtttcacaactccttttagagccctaaccgctgttcttgccttgagttacaagccatcaaaaccaaactcagtttcgtctataaagacaatgttatcattaaaaaccctcaattgggtaacaagacatttttgaaaaaaataaatctgttttaacattcaactttgtgtggtgactatattagttaacatgcaactttgtgagtattgattttaccaggcatcctcggaaagctgtctgaatgagaatagcagccacgtgtctctttaggtagacagacgttcgacagaaaaatacggtttctttggccgccggcgaaacagttttctctgtttcctccgcggcaatcgcgttaatagccgtggaagttgtgtttattcctacgtttattgcacaaggatcagaagaaactttcttaaatagccatcttctttttcttctcttctgcaccaacaaaattattattattctttaacaaaatttatagatttcattaataaaaaatgtaaatcccaaaatttccaagttttaagactttatcaaaaatcaggttttcatgctgataaatattttttctaaagtaagaaaaaaaaaatgtgttttcttggggatatattgaaggaatcttacatgtaaatgctgatgtattttatatagtatgaattaatgaagattaaaaaaaaaaggtaattgagtgtgaagtataccggtcgttggtgtagttcgtcctctacttcttcgacgaggtcgttgtcttgtcgacgatttattcttctagggattaacttctccggcgatcggaaaacattcttaacggccgtgaaccatgagcttccgtcggttttccccatcaagatcgatcaacctcgtctgcttaatgtatgttaattgtataagatacgaaacttatttatataaaatggaattgagttatataagttaaaggaacacacactctcttttatggagaacaagaacctttttgttaccctatatttaattaaaaagttgggaacatgtacatgcatgtatattttcatttttgcatattgcaatggtaagtaaattcattaagaagtgaaactcgaaactcctttctaagtatgatcgtatgtgttcattgttttatttgatagtatgaacgtttcttagttatttttgtatttctacaattggaagcaaaatatgcattgtcatgtaacggccaaatgcaaaacgatcaatcatcatacaatgctttgtatggaaaagcataaaaagaggaaaaatgttggaagaagaagaataatgaagccgaaaatcaaataaaatagtaatagataaagataaagaaaaatgaaaagaggaattatattaggtaggcatgctttgtgtttacaaataagatagctttgtgtcagaaataaatatataattgtaacatgaaagaatgtgtcaatgtggaatgcatctctcgagactgcagaaagttgttccttctcttctttgttctttcgtatacactttcgtgtattcactcttatagcttgattgtttgggatagtgattgagctccacaataagaaagactactaaatttttcttctgaaaaacactaatatatatactctagtttaaaaaatattacaagttgcaaatgtaacagctctttcgtttgagtgttattgagcaaaatctgtaatttttaatatactttatgtaaaaagtaaaatttcgtagtattttggagatattactaaaaaaaatgaaacagagatattatttagagatattatttatttgaccggaaaaaatgataaagcaagataaacatatgatgggaaagatctaacgattgctaagcagaaaaattcaaagaacaaagtaaaatcaaacaagacccgaattcagaaaagagctaactgaaattaagaaataagaacagtgaaatcctttttttttcctagagatataaaatttctccaaatgtcttaaataagtcataaaaatatccaaagggtatttcaacaacaacaaaaataatcaaatttttgtgtgtttggagactaaagaaaggagaaaggtttagaccaaagttgttgagttgttcaaagataccgggcaggctctgcgaccgcgaagcattaacttaaaataaatctagaaagagttttatatataaacacaaaacgcctcaagtaccttcttctttagacttcttcttctgctttctctctctctctctcgtttgctatataattttaagatctccggctagagtttcacttgaactcagcgcggggaaaatgcggccttactggtgtcttcgatggacttacccttcaagaaacagataaatcaacacaaagatgaatgaatacatgtttcccaagaataaagataatagtaatagctaaagagatttaacatatgtagacccgagaaagatgtcacattatatgcaaataaaccagaaataggattaagtaaagagatagccaagtcaatgactaaaacaacaacctaccattcaaaagttgtcattaactaaagttagaaggtaaaatgttgaaatctttaccttattgggagtgcccccaagacaataccgctgcagtgaagcgcagcaattgcgctttccgcctgagagaagcaaaagcaagcatgaatctccagtgacaatccaaaacgaaactttgaatcttgaaccgttttacataaacttcatagttatgtttatgcatctaactctgagaatcagagaagctcaagaagatgttccttaaatggatcatactagcaaaactactcaatcaccaagactaatgtccaaaatgggaacactttaaccaagagaattaccatcgcaaactcaacaaaagcaatacgggtttggtggtgatagtctccaagcctcagacgatgaacctaaaaaagatacataacaaaaaaaaaaatgatgcagagcaaaaaacatatacataatggtcgcattccaaaccaaaatccatacctccccgcaaagcatttcaaagaagcctttcaagtcaatttgagtgatctgaaaatataagcaaaaggacattgaagaaagttagtatctccaatactttagcagttaacagtttccaaaaacagataaattctcatcaaggaaatggtgaatgaaaattgaattacccgcttgtcaatgttggtacagtaaacagtcctaacgcacatctcacgctcatcctcagactaggagaaagagagcaccattatgctcaagaatgcttatacttataaaaattattagtgccaagtttagccattatcatgtgaacttactcgtggaagaaaagtcgggttaacaggagcaatagctgttttggaaggaagaaccttaagagggtaaaaacctagcacagtacccgacatgctcaaagcagctctagctccctctgcatcaacatctcttgattagttaagaaacagtgctataaaaaaatctcaactagtaaacaaagggttgacacaaagagtaccttcattggtaaattcaatgaaagcgaaacgaaggacagaatttggatcaccgcatacacgacaatcaacaacctttcgatcccaaaatgaacaaaaatatgaggaaacgagtcactgcaaataagcaaaatatttcaaacatagtcaagatcgttgaagtacctgtccacagttaataaagacacctgcgaggttctcctctgtaacctacaaacaaaacaaagtaagagaggcagtggttataaaatggattcctttaatgttatcgaaaatagctttccgctttttacctgttggtcgatgtcagagacatatacagttctcctgattacatcatccttctgagccaagcttgtccttttgttcattcttcgcttcccttggccaaaactccttctctgtaacaagaagcacacgaattaccaacagacgattttaatcaatagtacagttttgcatactttcctttcacatatctgacagctaataccattgtttgaactttgaagaatgtcaccacagaaacgatgaaactttctatttaaaacccgaaaaattcaaagctcatacaaagtgtaactgataaggaaaagaaaaaccaaacagtaaacaaatcaaatcaacaacaaactacacacaaagtgaaactggttttgtatcaatgatcaagtgatagatgcaagaacacgtaaagctcgaaacttttttccgttatccatttgctgaacgtataagcatacaagctttcccaatcaacaagcaagctagcaaatcatggtaaacaaaaacacacaaaagctcgaaactttataccatcatttctctcacttcactgtaacatcaaaatactaacggaagattagataaatacaaagatcagaattcacaaactaatgaaaaaaagaacattccattcaccaaaacacatccattttctagagatgcaataacgtctatatactaacaatcaaaacatacaaaataactatatactcaacacaacacaaaaattttacaatcaaaaaaacaaaacaaaacatagagatcataattcagcgagaatgtgaaagaatgatgatatacccttctaggaaaatgatcattcccatcagcaagtttaggtggggctgcaaaattgttagtaaaccctaatccatttctcaaaaccccagattgacttcgagcaagagaaggaggaacaaactcctgagccatcggattaagcttagaaaacgcatcagccaaatctttgatctctccattgttatctctctcaccatttccactaaacccatttaaagtctgaaccttttgagcagtctcattgatccgatcgtcagtttcaggagtcgaatcgatggtaagaggagtggatgagtcagatttagggctttgatcatcatcaggacatggcggctttgtcgtctcggtagctgaagcagcagtgttgttgttgtctaaattctgaccagaagagtccactttgacaccagcattctcagcaacagccatgatcggaccaaaaaaggttgaatctttaaaagatcagacaacaacaagttacgaactcagtcgatttctgcatcaaaacaaccaaactaagaaagagaatttgagaatgagaagaaatggaaaaaaaaaaactcagaatttgatacgaaccttggagagttatctcgatcaaatggttaatccataaacggagagaatcaaagttaattaaaagatcaatgagcagaagagaggactgaaacaaagaaaaattggatttttattttaagggaaaatagttagagaagacaaaaggagaaaacttggaaaattcaaggggatgattagaatagaaggaacacaagagacccctttggttataaaattaaataaacttaagctagttttcttctgccctttggagtttggacaacattaaaattaaataaatcatcatcagaatatttttatctctttttactttatcttctttcttaggaagcttcctacttttcctttttaattaaaacatacatataaatatatatatatatatgcataattatgaacactctattaactgaaagttttaataatattggaaaaatgaaaatttgcaatctaatttttttaatcaatttttaatttaaaatctcaatatttttattttttttatccaaaaaattagaaatgatagatttaatttaataattgattttttattattattaatcaatgttcaaatatgctttctacaaccatataccgaaggggtcctcaaaccagtttcagttgttatcaatggacagatgttactagtagagctaaaccggtagtacaatagttcggtttgatatcagagttgtgttaaaagttaaaactatattgtaaaaccaaacgaaaacatgtactttttaaacgtaataaaaaatacaatgcctctagtttaaataataagtaggttttctctcgtaatctctgttcctttatgttcttgtaagactaacctttagtggggataattttttttagatttagacttatttgttagaagattaagtgattaggttttagattcacgatgatgcttaatatgttcggataatcgtttttagttgagttttgacttcgccgtttcctctatccttgggtttcctccgttggtgagtgaaggtcttctagtccatgacttttgagctcttaactccgcgactattgttcttctctgactttccaatgattttgtgaggtacacctcttgacatttgaaatgttttgtatttcccgtatatcaggcttttgttttcggagatttctctgttttctatcggctctttgtatttcaaaatcgcattccaaaaatttattacaaccatgtatttctcccttgttataaatgaaaatctttaagtgaaaaaaaaaccgtaacaaaaattcttaaaaggttaataaaatatatatatacaccatcgcctatgggacgatgaggaaattcacgagagtacatgttcatgcttatggaccatccttgtatatatatgtaaagtacaagtttacacaaacaataaaatacatgatctacttaatcatttataaataaccatgaagttatcacacaggtgaggctgagagcagaaactcaggctgctttctctgcaagagaactccacagaagaggcagaacggtttcgaggcaactttgctaaaggaagattttggaagtgatttgagatcactcgggaacgaaggcaatgcaaataaggtctctggagcgagttctaaagtcattcggttgcagcatttgcagaaccataaaggagttggtggacatacttgcattgagacacaacacctctcaagcttgtggctttcatcacatctctctttgtctttgctcttcttttttttttggtgcgaagattcgcaaaaggcttcctctgctgagtggaaatttactggcgctgcacaataaggacatttctcttcctctaatgcagtttctgtgctattacttgatctgtgatgaattaaagacacagaacatatgaatttgaaaacattctagtatctattatcaagggaagaagaagaaggtatatgagaaaattacctcgttcgactagattttacttctaaggaaagtgtttccagctgactatggacaatatcacgatttatctcaacccattgttgcaacagagccaatccagctggacgccaattccaagagggaggcgaaatagtaccctgagatgactcagcgagtaaataagccgagaaactgagaccaaccagtctttctcggagttctcgttcactttcttgaagcagtttgagccacagatcaatttctccttcatcgttcgttctctgaccttgcagttttctgttgatttcttctgttttgagttccgataacattacacgtctagagattacgttgagaatgtgtaacagcctggaaggaacatcagagaagcgtttggtgatctttggcacgagatcttccatggagatatcatcatgaaatccaaggtatgacacagagagccatttagttaatactaattcaacaaactctggcattgattgtttgaacgccagcattgcagctaccatatcccaaagaactagaggcttattcaaatagttgaattcttttaacgaccagagaatattggattcccaatttgcgaattcattctttgagaaacccagaatagcttcggttaccgtctctgtagaatcttctgactcaccagattgttgtgcaccattccagaggaattctacagcagccttctgcgacctggaagcaagaaggaatgaacagtcagcttttgtaagaagcaggacgcagaaacacttctcaatgaatgaatgaaaattacctggcttggtacattggattcaagagttcaacgttaaagttgcggacctgcaaaatttcaatgagaagtctaagttttctaattctgaaaagagatagtttaaagtcacagcgaaccaggtttcggggaagatcagaccaaagcaacagcaaggtttccaggtgacaatgccacaccaaggcatgatagaaaatcatcaggaagctgcagaaaattttcattgtttgtaagataaactagaggaagggataaacaaagagacaagattaaaaacatcacatacatcagtcgtgctactgagaccaggagtgtttgcaggaattggcacttcagagatggcattctcacataaaatccagctccggacataattatcctgcatattacaaagagtaatgcatcttaaaagctaagaagaatatgacagttgttgatagatcacaatgtagtttgtttgtctctcagaagacaagcattacaaagctgtttttacagagaagaaatataatacctgactgcaactgtacaaacaacggccatcatatgaccaagctagacctgtaacctaaaaagagtgccatatgtatcaataaatcgaacacgtatattttattttataaaaggtttaaagtaacagaataatgacttaccacttggttatgagcattagttgaaacaatttgttcaaactttcttgtagatatttcacacttccatacttcgaaagaaccagatcctttaccgattgccaagtgcattgcattataatggttgcttacaacaaaagaaagcgttgaaacctgaacaggattcactgctacaacctataaataagccgtaaaatgtcaaaacgcaaaactcttagtgtttgctcgatgataacagcctatacacttgaatagaatgcaattatagagaaaaacagacagatcctgatattttcataaacaaggaaatagatacaaacagagtcaaaagcacaaggatctacagatacaaaacgctatataaatccaacttcacttacagaaaaattacaaaaaggatcacaatcaaaattcaggatgatcttaatcaactcacatatcacagaagctatactcaatctgttcgtaaacagaatatttagaaaaagtagaataaatagagaagaaataaaaacttttacctcttttagtagaaagaatgaagatttatagacctccacagaattttgcaagtcttctttgttgctcatccaaattttcacactgcaggtatgaaaagaaatggactgaaaagtgtgataaaaaaaagattccattgagaagtatatgcaaaagattccaatcactgacgacattttttgttatggttttacaaatatcattttttcttgtaatataacactaacttacctaccatcacaactcccagtaaccaacaccacttgcggattcgaagaatcacagccaaaaattccccaactcattgttgaaacccatgagctatgggtctgaactatagcagtaagttccaccatgggagatacattgctgcgttcaatgtgatagcattcaggtgcatgaactttccatatggaaacgctcccggactttgaaccaattgccaaaagagagaatcttaacatattcccacaagaactttctgatgagaatcttagaagagatgaccaggcaacggaatgggaggataataatgcctcacgagacacatacgtttgcggacttatctcttgactgcatttttttagagctttaggcaaggaacgacgatcttggccattgcttgcctgtttatatacttcaatctcaagtacctgggaatataaggaatcgagttagatatgagtacaatgcgacgatttgattcttactagatgacacttgagagtgggagtgtcaaacttctaagaaccatatggtgtgaacgatgcattaaaggattcaggtggaattcaaaagcatgacaagattcgaaatgcatcaaatcaatgacaagacaatataaaaaccacacacatgttctttctataagaacactggagggaggtacaaaatgtcaaaatctactcaagatactaatttacttgatgaaatgacctagtttcttattaattactaatcctaacaaaaagagtttccacaaaaacaacggataagatacaatctgcaggaacagagttagaatctgaaacttgttacagaatacactacaaagtgaggaacagaaataagttggaggaatcatgatagtattttttcaaagcaatgcactacaacagaaagaagttaagagatatgaggacttacattatgctctgctttactgtcttgcttggaacatgatgctcgatctgtataattcttttcatgcaagttgctaaaacaaagaaagtaagttagtcaagtgatcaaaacagaaaaaagaatatggaaaacaatttctcaaaccactggtatgcatctgacgaaattgaagagtgaaagaaatgctctttacatgttatttgcacttgtttttcttcgcttgcgtgccttcagacttgaaatcctttcatcctcctcatggtcatgttctaccacttgatcctgttataaaagagcacaaatcatttcaataatatagtttggataaaaatattatgcagacaaacatcaacaattccatcaaaacgcaataccttccacaacaacatttgtccattaataaaggataactaaagatataaacgatttgtttagatgcgtctttatctaaatgtgaagagtacgaagtataaactatctacatatcccttataggaaacacatacatatagtttgcgggagtagtaagtcatccttcatggttatcaaacttccactgaaaacactttagagatacaagttaccttagataatgaagtagaaggatttttggactctccaaagttcatgcttgatagattctcataaagcattttagatatatcaacaatctgcgaaagagaggagaaagcaactttaaatgcataggttagttataaaaggcgaaagagaatttacgacctacctcaatccactcagcacagaaatcagaatatggaggtcggtatagcttaacccttccttccgctgtgcaaacagccagtaagcacctgagcagagttatttgaatcacgaatttaggaaatagagaaacaaaacaaaactgaacatgttacaagaaatacagtacccgtggtttggagacattcctatctcagaccatgagagagatcgaacacatggacttctttcccgcttcaaactcgaaggcaagagtccaccagttagcaaatctacaatcacatcatcactcacattgttatccgaaacttctgaatgatcgaaaacacagaaaccaacagaaatttggtctacaaacacacaacttcatgaagaactaaacagttgcaaaagattgaatttttatcttcaaatctgaattggcaaacatacaggcaggattttgaaatttgatctgaattttcataaaacaggtacaccaaaattctgtatttatcaataaaaaaaacagaccttgagagcgaacacgaccaatctgataaagctcggcgtcagagattgtgatcaatccacgagggccagtaggcaaagccggattctgacaattacaaaagtcatcaatacaatttaaaaagactcaaactttaacctcaaaaaacgaagcagaagaaaacttacaatgatgatgactagatgaccagcagcgacggcgatgagattttccgatgaccaagcgacggcgttaggatacgacggtgaagtaaccagtgaagcttcctgaaaccgcgacgccatcaaaaagtgaagatcaacttagaattttggagggaaaataaaacttgctctgctttgcttttgacaacgaaacgaactgatgaagttgattcagtacggaaaccctagttcgaatcgcagtgacgcagatcagatcctcaattatttatttcttcccgagtttaacaaaaagtcaacgtgctcgttttttaaaacggtgtcggttagatgatgggctaagcccaaatccttttgagtccaaatacggagaccagagttcgaagcgcaagtgacggctttataatctctttatttaataaaacgatgtcgtttttgcttaagcaataggcccaaataagtaaaaagttcaaattaagggttttgaaaatattcgccgtcgccgatgtcgggaaaccgaagaatttgaggcaaaaaaaattcgtatttccggtgagtctgaagttcctgaattataaatttccgatctttgttaaattcaccattcgttttcctaactctccgtcggcaaaaggcgacacaatgaagcacatataaaactgaaaatctataggaatatatatacacattataattctctaattgcattggcattggatttatctctttgttttacagaagagagtaatctctggaaagaatcaatgggaattatagaagaaggaacaatctcaggtaccttgccaagcaaggaggcgtttgtagtacacttccctggttacccatcttctatttctcgagctattgaaacacttggaggtatccaaggaattacacaagtaaaatctttcaattttggttttaaagtctcttccttttactgagattgtcttcatatgctagttcatagagtggttttaaagcctatatgttgttacagtcttggtatatgcatccaccagcttttgttaaatttgttgcacgatttattcagtttgagtcttttatttttatatggtaggcaagggaatcaatttcaaataagcttgagctacggtttcggcctgaagatccttatgcacatcctgcattgggagaacaacgtccttgtagtggttttttgttaagaatttctaagcaggatatcaagaaacctgaaagtcagtctgttcttgacactagtagggatgtatgtttagaggaagctagtccagttctatgtgcagatatcgtagctcgtttgtctgaatcgtttcactttgatggtaaaaacttacctctccttttgcttggttcttatgcctctaaaagtgtttcaagatttttccctcttcttcgttgtctaggcatggctgactatcagcatgttattcctattcacgcggacattgcgcagcagaaaaagagaaagtggatggatgtggatccccttacaggtacaagatcaacttcggatattgattttctctttttttccaatttattccagatttcttgtggtgtgctcacctaaactagatcggatatatatgcaggaaaaagtgatttgatgggcctggctgatgaagatgtaatgatgttattgccacagttctttgcacccaaagatataccggacaatgtggcgtaagattacactgcctttttctatttcttattcggtggcataagccatttacttatagttgattacagtgctgatttcaattttcttgtgtgattacaggttgaaacctccggcgacatctggtcccaagaagaaagatgatgcagcgactcagaacttttatgaggtaaaaataaagaaattgaagcatatgagctttctaaataaacaaaacatcttgcggaatagacagttaggaactcatgactttaaatatctaaccttcatcttgcggaaattagagaggtttggcatgaaattagagaacttatatctcaatccttcaaatgcagtagtaaaagatttgaagcatgtaaaaactcttggtttcactctaatgaaccgtcaagaatgcgttctgttcatttttggatttcaaagatgccatgacagcttccttatagtttattttcggttgccatatcctaattgatctatgtcatgactattttcttttatgtgcagattgatgttggcccagtgtttgcaattgatttcagcgtcaaagatatcctttttcttatatgctagttcttcttccaatattctttgacattttcttatctggcgagtagaaagagctgtatttgcttggtctgtccttagctttcaatacagatcccaaagaaactgaagtgggaagactttgtttctcgcagctccaaccactggcaatggcaggtagcagtgtctgcattgtttgaggagcggcctatatggacaagggattctgttgttcaacgactacttgataaaggtcttaaatgtacacatcatatgttaaacaggtgatatagctttctaatacggggttcttatactgaggtgtttttagtactatattgatcaatttggtctctctgcaggtttctgctcagagctgcatattatttctccagtggtccgtttcttaggttctggattaaaagaggctatgatccacggaatgatcctgagtctcgtgtgtaagttctcttttaagacattgatttgtatattcttattgtatggtttgtgacattttttaggtgaaatggtaatacacacagatgggtgcataatgactagttttcacttatatctccattgaataattgtgtttcagatatcagagaatggaattc

SEQ ID NO: 1069 - DNA, 104204 bp, Arabidopsis thaliana
aagcttcctgaaaccgcgacgccatcaaaaagtgaagatcaacttagaattttggagggaaaataaaacttgctctgctttgcttttgacaacgaaacgaactgatgaagttgattcagtacggaaaccctagttcgaatcgcagtgacgcagatcagatcctcaattatttatttcttcccgagtttaacaaaaagtcaacgtgctcgttttttaaaacggtgtcggttagatgatgggctaagcccaaatccttttgagtccaaatacggagaccagagttcgaagcgcaagtgacggctttataatctctttatttaataaaacgatgtcgtttttgcttaagcaataggcccaaataagtaaaaagttcaaattaagggttttgaaaatattcgccgtcgccgatgtcgggaaaccgaagaatttgaggcaaaaaaaattcgtatttccggtgagtctgaagttcctgaattataaatttccgatctttgttaaattcaccattcgttttcctaactctccgtcggcaaaaggcgacacaatgaagcacatataaaactgaaaatctataggaatatatatacacattataattctctaattgcattggcattggatttatctctttgttttacagaagagagtaatctctggaaagaatcaatgggaattatagaagaaggaacaatctcaggtaccttgccaagcaaggaggcgtttgtagtacacttccctggttacccatcttctatttctcgagctattgaaacacttggaggtatccaaggaattacacaagtaaaatctttcaattttggttttaaagtctcttccttttactgagattgtcttcatatgctagttcatagagtggttttaaagcctatatgttgttacagtcttggtatatgcatccaccagcttttgttaaatttgttgcacgatttattcagtttgagtcttttatttttatatggtaggcaagggaatcaatttcaaataagcttgagctacggtttcggcctgaagatccttatgcacatcctgcattgggagaacaacgtccttgtagtggttttttgttaagaatttctaagcaggatatcaagaaacctgaaagtcagtctgttcttgacactagtagggatgtatgtttagaggaagctagtccagttctatgtgcagatatcgtagctcgtttgtctgaatcgtttcactttgatggtaaaaacttacctctccttttgcttggttcttatgcctctaaaagtgtttcaagatttttccctcttcttcgttgtctaggcatggctgactatcagcatgttattcctattcacgcggacattgcgcagcagaaaaagagaaagtggatggatgtggatccccttacaggtacaagatcaacttcggatattgattttctctttttttccaatttattccagatttcttgtggtgtgctcacctaaactagatcggatatatatgcaggaaaaagtgatttgatgggcctggctgatgaagatgtaatgatgttattgccacagttctttgcacccaaagatataccggacaatgtggcgtaagattacactgcctttttctatttcttattcggtggcataagccatttacttatagttgattacagtgctgatttcaattttcttgtgtgattacaggttgaaacctccggcgacatctggtcccaagaagaaagatgatgcagcgactcagaacttttatgaggtaaaaataaagaaattgaagcatatgagctttctaaataaacaaaacatcttgcggaatagacagttaggaactcatgactttaaatatctaaccttcatcttgcggaaattagagaggtttggcatgaaattagagaacttatatctcaatccttcaaatgcagtagtaaaagatttgaagcatgtaaaaactcttggtttcactctaatgaaccgtcaagaatgcgttctgttcatttttggatttcaaagatgccatgacagcttccttatagtttattttcggttgccatatcctaattgatctatgtcatgactattttcttttatgtgcagattgatgttggcccagtgtttgcaattgatttcagcgtcaaagatatcctttttcttatatgctagttcttcttccaatattctttgacattttcttatctggcgagtagaaagagctgtatttgcttggtctgtccttagctttcaatacagatcccaaagaaactgaagtgggaagactttgtttctcgcagctccaaccactggcaatggcaggtagcagtgtctgcattgtttgaggagcggcctatatggacaagggattctgttgttcaacgactacttgataaaggtcttaaatgtacacatcatatgttaaacaggtgatatagctttctaatacggggttcttatactgaggtgtttttagtactatattgatcaatttggtctctctgcaggtttctgctcagagctgcatattatttctccagtggtccgtttcttaggttctggattaaaagaggctatgatccacggaatgatcctgagtctcgtgtgtaagttctcttttaagacattgatttgtatattcttattgtatggtttgtgacattttttaggtgaaatggtaatacacacagatgggtgcataatgactagttttcacttatatctccattgaataattgtgtttcagatatcagagaatggaattcagggttcctcctgaattacgaggttattgtgatgccaatgcaactaacaagtaagtctttttctatttctgtggttaactcttcctgtatgactgacacagcctcctggagatttaagcctgaatactctctatagcattctatggtacttgttgtaggattgtataatagattaagcgtgatttgttttgcagctgaaccattggatttatgcaggaaaaagtccgatttatatgttttttcttttctttgctacagctcaaagccaagctggaacgacatttgtgcttttaagttatttccttttaaatgccaaacgtttctgcagttgtttgaacttgacgacgagtacatccagcgagagataagaaagcctcccaagcaaactacttgtagtgtgagttctcagcttagtttttcatgaaatcaatacccatgaatcatggtcttttgcctgttgaattaaagcttaagctcagacaaagtgtcgcatctacgccaataaataaactttggcaagtactcttcaagcttatgatctgattcgtttcttgtttgcagcataaatcaggatggttttcagaagccatgcttgatactttgagactccgtgtagctgtgaggtttgtgtctgtgtttcctgagacaggtttcgaagatgtatttaaatccatccaagaagaatttgagagatcagaaaaagtacaaattcagaaagagacacttaaaccatctttagtgaagcaccgggaggcaactaaaggtaagatcatcaacaaaattgtgtgtatatctcttttagcgtttaggaagtctagtgagtgctttttgatgtgcgttcagcatattccctaatctctagtgtgttagacccttattcctttgcgtttgtcgagtattttccggagtcatcaaatctttaacagaaacttgagcctcaaaacctaagtgaaattgacaggaaaaattggctgcttatacagcataagttatactgctctacgagatgtacataaatatatatgagataaaaaaaattgtgtaataaatattctgcaatgagctaaactaattttgatacgtatcatgtgttatgcttattgtcataagtcaatgaacatgtttccttgaatattctgaagtagcagttactgaacagttcgtttaatctgcaggctctgaagatatggaaacgtttaaaagcgtaaacgaaaatgttgatgctaatgttaatgaggatggagaagatgaaaacctggatgacgaagatgaagatgaagaagaagaagaagaactcgatatggtaatattactgttaaaggaaagttttgttgttttcttcattcgctaggattcacaccgtttctctgctcctcttcttttgcaggctgcaggagacaatgagatatctcttgattcccatggatgtatccttcaaagtttagcgttttcttgcattgcaggaattaagaccgagaaattaagctgtgtgtttggttctaacacccttttgacactctgtttcgtttaaattttcctatacaatgataagatcttgatactgagaacagctccaggacgtaccttcaaggcttgtttgatagttttccatcgagtgaacctaatttatatggagactttgctgttgatgatgggagtgatggagagtttcagatatacgaggaagaatctgagggattgtattccattgatgatgaccacaatgatgacgatgaagaagaggatgatgatgattagtgatgagtaaagatcactagtccacaccacaggtactgtttcttgtcatttccattacttaatcaaattgatgatgtaaaatgcaatctagttgattcatcttggagcattttggtgtgttagtttgttgatatagtctcgtgattggtaattttcacattactttcttttgttatgtttcaggtgaagttagatgaatcttcgtccagatttatgaaattggttgtaaattgccacggaatgttgaaaatgtaaagttttattttttgggttaattatataggttacacctcaattttggaaactaattcaagagaacaattgtttcttttcacaaaaactcattgtaaccattacgcattggggaaaatgtcattaaaatcttcaacttatgactggttctatttgaccaaaaacaaaaacttagaggttatattgagaaacagattgcttaaagagggaccgaaaaataaaaacactaaagaactgaatgaatcaacttaagggtagttccggtaattcactaaaggataaagtagaaaccctagtttgaattttcacggccgacctctctctcatcctccgagtattgttggcttcagaccaaatcttctccggcgctgcggcgtttcccccggtacggagtcattcacctctctcttttctctctcgcgctccctctctctctctctctctatctctggctctttttgattgtacaagtattgttaggattatacgtttgattctgtatgtagcatctgtctagtcgacgtcaaatcgatattatgtttccaaatattgattggttaccaaaactgatacgagaatattgaatctctatgggctatgtatgtatatcagagtcatggctaagccatgggcacattttgtaaacactaatgttgtagtttcaactttcaatggtctaattgctgaacttcgacatgtttttaccatggcagcaaaaggtagaagtagctgattacaggaacaatgatgtcctttgaaatgaatgaccggaaaagtaagttcacattgtgagttctataaatattttctgctattggaagacatacctgttacttagttatacttaattcttcttttgcttatcacgttcttgagttagtagatcattcaatgtcatgttgttgttcggaaccccatttagtttcagtatatcttattaccaggttacgaagttactcatgctgtacttggatatacttaaacgtttcttatgtgatttgaaacagaaatcgggttaggcctgacaggatttggcgtattcttctcgtttttgggaatagtcttcgtctttgataagggattacttgccatgggaaatgtaagtatctcatgtatctttgtttctatactttgaccactattattgcatacacgtacagaactagtatgagagcttgtttcttttcatattttctcagattcttttcatctcgggggttagtctaaccattggcttcaagtctaccatgcagttcttcatgaagcgtcaaaattataaggtttgtttctgtctttgtctacattatcaatagcttgggccagtctctgctggatttttacagatttctacttaatgtcatctatgtgtgttcatttggctttatatgttatccactcagggaaccatctcttttggcgtcggtttcttctttgttatcatcgggtggcctatcttgggaatgatgttggagacctatggctttttcgtactcttcaggtacttttgcctattttcttcttctttactggtattgcttgaggaaatgtaaactgatactaaaaacgttttgcttttgcagtggcttctggcctaccttggcagtctttgctcagaagatacccgttctgggttggattattcagcaaccatatattagatcggtatgtgtccaattgcaaacaactatagcaaactttgcatgaaattcttagatctcgaatacaacacatacaaaactcataatgactcccagttttgcctttccaaattacagttgataattctctctttgtttctgatgatcttgagttgctaggccttttctcagtttggcttaactttaatagtaattctgttgcatagtctgccaattgttggctaatgcgattactttacactttttttttatgtgatgtgtagttctttgacaagtaccggggcaagcgagtgccggtctagtcttccatcccgagcagagagacgattcactgagctagatgcagctgaacaggcgattaaagtttttggaagaagaagtttcgtgatcctgtagaaaactaaaaccataggagaaagaaaataggaaggaaaagaacgtacaatttgaagctgtgtgtctatgtttcaggtgaagtagatgaatcttcgtccaggttgcaaattgcaacagaatgttaaaaatgtaatgttttatttttgggttagttataggttacacctcaattttggaaactaattaaagagaaacaattgtttctattcacaaaaactttttgtaaccattacgcattacataattttaatcatattgttattaacttaatggttctatttgaccaaaaacaaaaacttagaggttatttgacaaacagattacttaaagagggaccgaaaaataaaaacacaaaagaactgagtgaatcaactaaagggtaattccggtatttcaggaaagttttaaggacgacccctactaatggataaagtagaaaccctagtttgaattttcacggccgacctctctctctcatctactaagctctcctccgagtattgttggcttcagaccaaatcttctccggcgctgtagcgtttcccccggtacggattcattcacctctctctctctatcgctctccctctctctatctctatctatctgttgttttctctgaatttggtttccgtgttcttatgaattcgatggtttggtgtttcaatttcgttaatttcactgataattgttggtcttttggctctcttgaggtgaatatacttcgctatggtcgtgggggtagtttccttgacttcaattagcttttttatgtcgaatgttcttgagttgtttaaggtgatttttgattaaattcagaaggtcttatgtttgttagaatctgtcttttattcattgtccttactgaggaaatttttttacttgcattgaaaagaaacataatttaccaagaggttctatgtaacgatgatttgtgggtcgatctgtattttaaatagtcgttaaaagtagaatttttgttgtatgtttgaaaggaataatggtttgagtaaggaagaagaacaaggtagatgcatgagtctatgttacatgatgtcatgacacatgctttctttatgatagatggcaagagcttggaacatgagcattgcaatggttcatagggatatagagagggattggggagatcaatgtggatattgtttttattattaatggagattcatgggaacgatctggagaaatatatatatttcaatattttaaatagcttttggagcatattggagcaaataagcatttggagcttgtggagcactgctctgacccaggattgctctcacttggtttgcttcatatatattttggtcttaccatgttttctttttcttttcttatcatcgtctcattttgatgctggggctatgtcgaaagctgtttgagtggaggttctttgtctatagcagtaaattttgatcctttatttatttcgtttcctttttattctcatgtgcagtttcccctttttaacctttgcaaacaatgagtgggcgattttctcggtcaatctatgttggtaacttgcccggtgacattagggaacatgagattgaagatatcttttacaaggtcagtttttggttatttgtttgattcagttacgggtcctctcttgaatcgttatccctataagacagtgaagattcttgagcatcttttgtattcatatttaatgctcttgtttgcagtatggccgcattgtcgatattgaattgaaggttccacctcggcctccatgttattgctttgttgaggtaagtgtattcgcttacattacatgttcctaaccaactttaaatttcgctgaaccaagctctgttgaatgtttgtagtttgagcattctcgggatgctgaagatgccatcaagggccgtgatggctataatttggatggctgtcgcttgagggtaatcagttacttccttgctattttttcagcagacaatatgggcttatgcttcacatatccttacagcagagtctaaacttttctggctgttttacattaccttgtgatgtttctttttatttttcaatagtttctaatcattatgaatgcaggttgagcttgcacatggtggtcgaggacagtcttcaagtgatcgtcgtggtggctacggtggtggtggcagcggctatggtggtggaggtggtggtggtggatcagctcggtttggcgtctcacgacactctgaattccgaggtttgtgtttcttgctagaagttggtattattaaaatttggtttcacttcacttcttctgattcttggatggctattttgcagttattgtacgtgggctcccatcatctgcttcatggcaagatttgaaggtctgatgacacttaatgttttgctgcaacattttggtttctactccctagtcttgtttttcatataaaatccatttttttcaggatcatatgcggaaagctggtgatgtgtgctttgctgaggtgactcgagacagtgatggtacgttaatttacagtttctgatgcatacttacttagcaatatatttactttttcagctttgagcagagttttgtttgggatattatacttacgtttttctcccacaacatgactatttataataatatgatcaggaacttatggtgttgtcgactacaccaattatgatgacatgaagtatgcagtaagtgaactctgtgcgtctctcttactgtattgcatgctatggtttgtataattactgatgttcaatagttgtgatttcagataaggaaacttgatgacacagagttcagaaacccctgggctagaggttttatccgggtaccatttctctatgcagtctcttcttttttccctctttgaccataattaacagatattagttatctctcaagtctctcaacattttacttcgtttgatgcttcattctctatcttcccattcgtaaaacatctatgacttttgtagtctcaattggttaggctaatttaaaatcatgatctcacaagtttgtattcatcttatgtctgtgttttctgctcatatgcaggttaagaaatatgaaagctcccgatcaagaagcagaagcccaagcagaagcagaagcagaagcagaagtcgaagtcgtagccgaggccgtggtcgcagccatagccgcagtcgcagccttagcaggagcaagagcccaaggaaggatctgaggtactacgtttgttatcactgaacctttgtatatctcccattttcaatacctaaaaatggagttgtgtgtttaccaatctttattgcagtaaatcaccaaggcgatccctttccagatcgatttcaaaatctagatcgccatcgcccgacaagaagaagagtccccccaggcaagtcttctgcccttcttttgtgttctttctctcaaccatcatgatacttttattcgttcttttatttctcctgtgattattgtgacatgttgctttttaccaattcagggcaatgtcgagatcaaagtccaggtccaggtccagatcgaggtctccgtccaaatctcctcccaaggtatagaactaagctgcctgcgttttagcatcattttaccaagttataggcaaaacaccaaacagaccaatctaaaaaaatctttttctcaggttcgcgaaggcagtgtgtgattttgttaagcggtgaaaatggccaaaagaaagagtgcgaaaaattctcaagtcaagatccattctctgtgtttttttttttgctgttttcggataattgacattttctgctgttctctgcttctttactcacaaatgatcatctttatactattatgacctgttatgttatggatgtttccgtgaccatcacaatacctctgagttttgtattgttagtcctgttcttgtttaaaccctatgaagtcttagcgaacctggatctctcatctaaattatcaaatatttaactgatttgtatgaaatgggcataatattaaagaaatcaaattaaagttaagatatttgacatggtttatagacggtcaaatgagttgtttacctaacaaggttcttccacaaagtcgacaaaatttatatatttgacatgatctgtttgtcggcatcttttagtattccatcacaaacaaaagttgagaattaggatgaagtgcgcatttccttgcataagtagggatacaacttcaacatcttaggtataatgttaaaacatttttgtacaaacttttagctaatatgtatctttacaagaaatatcagaagagaaaatatatctatcttaatacgtatttttggataaatagtggccatatatataaggtccccaacttagaaacgaaacaagatgttataaattcttatgtagcccggaccggctaagagaaaagtgggatcatgtacccatttaaaaaaaaagtttatctcttatactatatgtatagatttgggccttttgtataatttttgaaaaatagggctataattgcttaaagaaatctgactaaaaaataggaccctattcaaaagcaccctttgcacaccctctcagccggccttggtagccataatcgcttccataagcctcacatcttctatatggtcagtaaatgtaaaaatattccgacccttaaaagcttccatcccttggattttgattcttgtaatagtcttcctcttcatattgtaacaaaaagtgtagaaaggatcatataactcgagtgaggtcaacacaatctcaccgttacgagtcatcctgacaatcactaaccagtaattttcaactaaactctcccacaaaggcggtatgtaatgtctccaccatttatgttcctcaacatcatctaaaacccaaaactcaatgcatgtagtcgctctagaaaacataccatctaaatcggtgataagcgcacctaattttaccttgtaatctatcagagtccgaagcaagaactggatctggacagcttcataattattaatagtagtaaacttgaacttctcagacctaatgtcaaagcgaactatcatcaactgatattcatttcccatagctttataatacaaatgcccgttgatgcatatcccaacacatttaggagtatgaggaatggaacaatcaacaaattctccataataattttcctccattttctaacgtcaaaacttgatgctttcgagcttgacttgacacacacaacaccttgtattgtctttcgatcggatcatacacaaaatagggtttctttattttagtgctttcatttaacgtgttggaaaaggttatgtactctacagtgctagggttatatatcatgatcagattcctatctttattacatagcaatccgcagacaggaggacaaaccttaaaaaaactgtaaggaacctgggaaacacatgtggcgatcggcagctaaaacggaagacgagttcttgtctagatttaaaggctgagttgacgtgaagaagagccacgtatctcaacaagttaggtgaagagaagaagtggacgagccggtgagatggttaggcaacacgatgactggtgttttccgacaaatatttgatgctcaagtcagaaaacatagaaatgtaagaaagaccacatgtaagtgaagtggaaaaagtgagaaagggtcgaaaaaagagtaaaatgaaggtttgttcacaccataccgaaatatcctaataaatgttgggtagttatttaaatggatcgagaagttacatgaaaacgacacgtcaacatgacatttttgttaatcacacgtgagaataaagttatattttaaaaatgtttctcaattaatatctatataggggatatgttgttatgctaatagatacacaaaatattaggtattttattttgtatattttaattgtattttcgcctgaattaattgagaaaaataaaagcattaaaaaaaataaaaataagtaaaattaatgacaaaatctatagatatcataataaatggatcgaggattttagtgaaaatgacacgtaaacatgacattttagttaatcccacaaaatgcttctcaataaccagacatagtacttatgaaagattaggaggaaaattacatgatcactcatatcttaattataaaaaaaaaaaaaaaaagaacttacataataagattcacattctcgatatggtttacaaatgtgtaaactgcttgaccttcaagaggtccagtccctttgatttcaactcttgtgatagagttgctcttcatatctaagtgaaagatgtagaaagggttggacttgacgaatggagaaaacacaacttcacaactaccgattatcccaacaaagtaaactctagtctccccaacgacatccttccacataggtggcaatacgtgaatagaccttatccattcctgatttacaacatcaagaatccacaactcaaagcctacatctccaccatccataaagccaaatgatttatgacgaattcctcctaagcgtcccttgtaatttattaatgttgacaacagatcttggttcggtataaacatgaaattctcatccttcatatgaaaggaaactgtcatatattctttagactcactcttcatagctaagtaaaacaaaacgccgttgatgcaaatcgagccatgataataagggtaatgatcgacagaacattcaagcattctccatttcagtttgcccgttcctagtgtaagaacttgatgctcttcagctttgaacttaaatggcttctcacgaatcgtcatgcacaataccttatattgtttttcgattggattataaccgatataggttataacattacccctacacgatctcactttgggtaaagatttgaattgtcctgtgctagggttacatatcatcatccttgcatccctctttctacttaaaacccactcattgctagtacacatcaatccacaaacaggaacacaaactccaaacgagtaatctttagggacatccatatgattatcaacaactacaagatttgagttctggtctgaaatcagatactcgggggatgagaagaaagaccacttaccctcagcttgaaaagtgattaggagatgtggccgagccgaggacctcttcaggaacaggttggtgagatatggactgcggagaagagaattccaatcatttgacacgcaacggaacctcgcggccgatttcgcaggcaccctggagagtatttcgaccatgagatcagttggcaacgtacccgagttctctccatattcacccactgaagaagatatggttagggcaacattttccttggagactttcctcttccgttttttcatcatggcggacattgcacatgaaaaagaaatgaaacccttagagttctgagtaccgatagacaaacacaagacgaccttataaatgaaacccttacagatccactagacagacacgattttgccacctttcggattatgtctacctaccacattttttttttttatctttctccctttttctaaccttatctttttttctttaatttcctttttgtagcatccttattagataccattacatatatagataattttatctataatttttcttcttttccttctaaattcattgataccaatcgagattacaaagttattatacaaattatttatctataattaggtagtactttttaatgtatatatacatacatacactatactaattacccaatcataccgttgctttcacgcctttttgtatatttttaaaatgacttactaaaatattgagtgtgattatcttgaaaagatatcaaatttctatttaatcaaattgaataaattttgagttcaatttattatatgcataaaaaatatgaaaaggatatgactatgaggggatcatatagttttatgaaagtagatgaaagagaataacatacagtaaaagtaggttttagattagagaaagaaaagcaatggattaggtcgatgaaccgcgaccaccacggccaaatcgtagtacattgattctcttgatatttttgcgtaggcttgattggccttcctccttgggcttttagagaggagtcacccatctcaaaacaagtatcaccaaatcctgagtttaaggaagcaaaaatattgctttcaaaaacattaactagattttcatttgccaatgaacctcgttgggtaggaataaatagggtgtccacagatgaaggagtatcaaccatagaaagaagcctcagttggtgcagcatttgaaaaggctagtaaatttggcgtttattgacgccagtagagagagagaagctaagtatagtggcagatggcgttgctgggggggcatactcgtttgtccgtgatataacgtgcttaacaatttcattatggtctctacatttttgacgaatgaatgcctatcacctagggttttcttgtgttttaggaaacattcttcctcaaaataattctccgcatatcagatatatatcaacttaactgagaatagcgattagtgcaatagtttcaaattaaagaatgatgtcctacaagtaaacagcctattaatttctcagggacaaatctgtcagtaaacctcggaaacaggcgtttcggtatctaaatacaatccaaacttagtcatatgtagggtttactgtttaggtaagcgagcgaaattaaccgaaaaagtgttatagcccaacattgttgcattgattatagctcaaaactcatgataaaacctgtcccaagtgtttgccaaaaaaagacatgttccaagtaaaattactaggctttcctaagaataaaataaatctcaaaaaattgagtcgactaaacatcaattgccttcaaaagataggttaaatctattagtcaacaatccggatacaaaatcatcgtcactctctcccttcacgtcctcctaaagatgattcatcacaagaacaaattaaaccaagaaattagatatttatattgaatatcaacagtaattacaattatgaatttatgagtatagtatattaattagtaaaagggttcaaggagagaagaatacgataccttatttttctcttcagctactggggcagcttgagtggcacttccagatgaaagtgcagaagaaaaaacggccatgggagaagcagcagatccaccggcaccagcattcatgatgagatcatccatgtttttgttctggcggaagactaggccagtatgattcaatgttcaaattggctgttttcaccaatgttgacatctttctcagcctagtttacaagtaaacaaaatagtttgagtacatgttaattaaaacaaacaacctacaagttaattaaggctccagtaggattgatgtcaagattgagcctagaaagtacatacggtgacatggtcatggaggaggagagctgcgtaagtgcaagctagctcaccggtggccattgtaggctagctcgcgtcccacgaaagatctacaaaaccatcaatagagctcatcgattcataatctgaacttcaagtgaaacataaaaacaaaacgtgtagagtctctgaatcgaacctgtaaccaaacagaagattaggggttaacgtacgaggtcactatttatttcgatagagttattagggtttctagaggattattaatgtttcgaaatgggcacgtgaatatcatgtgcggcccagagaaaatttaggactggaatttcatggcctatatagataaccaaaattgttcttattaagcctcagaagcccaataaaaggcccaattggacaacgacaaagcagaacccgagtcgttaccacacacacagtcgtcactcaccacctcaccgttccttatccatttggctgacgcaaaatcgaatcggaaccctaaaatctctccgaaagccatgtctcctcctcctgctgtagtcactgaatctgccgatggacaacctgagcaaccaccggttaccgccattgctgaagagctggagaaaaagcttcaggttaagacgattttacgtagatttgtcacggtttttacttcttagtctcacgctcgaggatttgtttttgcagactgatgaaccgattgtagaagatgttaaagatgatgaagacgatgatgatgatgacgaagaagaggaagacgacgatgctcaaggtgcttttgattcctccctcttttctcaccagtgtagctcggcttttagagttttgttcgtcatcaatcattacttaattttccagatagtgttctttagaaatgtcattgaatattaatcatattaatcattggccttgttcgttctcacatttgtagtttcgtgtatgcaaagagtgtcacatttcaagaattactgcatagttatgtagaaatggttgatttagatgtttctgttaacatatagagatgtgggagatgaatcattttgctgatagattgaggccaagatttatggatttacttgactaagtttcggagaatagagatcccaatatgtttatagcatagtgaattgttcttaaaattgaatgaagttttgttgttgtaggtgtaagtggaagttcaaagcagagtagaagtgaaaagaagagtaggaaggcgatgttgaagctcggtatgaaacctgtcactggtgttagtcgagtaaccatcaagagaacgaaaaacgtaaacctttctctgttttctcaataagtttagatttttttctgcgtgtgtgattctaatgatacactacattaatgttatcaggttctcttctttatctctaagcctgatgtctttaagagcccgcattcagaaacctatgttatattcggtgaggccaagatcgaggatttgagctctcagcttcaaacgcaagctgctcaacagtttaggatgcctgaaattggagccacatctcagagagcagaggcatcgacagccactgtagaagcacaggtggaagaagatgaagaggaaatcgatgagaccggtgtggaggctcgtgacattgacttggtcatgactcaggctggagtttctcgtagcaaagcggttaaagcactcaagagtcacgatggagacattgtaagtgcaataatggaactcactacttgagagttaagagagattgagtctctatgctttattcacttgcagattgttttcaaatacttttggatttatcaggaaattggattattgttgtccttacgagtatctaatctagtttgtttgttatgatgcttatgcagtatctgagttgtactctgtttttcacgacaatgtattggagaaaatacatatcaaaattcgactaaacaaagttcgagaaacttccaaattctaggattagaaacatcacctactaacaaatagacagatatactaatatctaaatgacattcgagcagaggacagaagcacagacgttggagtcctatgcattgattctaactcctccatcttctgtttctcttcaccactgaaggttgaattcggtgagattcccgctgtttttaaatatttggagttttctagaatgtaccttatgatttttttctcatcttctcttccaacatatccgtcccactcaaagatctcgagatgcgacgacaaacatcttggaatagaactcggttgattccataaagctgggtcatgattccatctcggaatgtcggagtcgaccagaaaaactttaagcttagaacacttagagagcaaaaccaaaagtgattccaacaagtcatactcagatagatgtatcatacattcaacaagtcgagagtagttattaactgcgtcacaccacggaaccattgtatcgaacggagatagcgcaagatacttgaccgaagagagaggcctcataaatttttcactagggaacagctcatcagtaactactgtgacaagatggggcatgtaccaaactgagagagagtatcccacagtatcaaagatgtgaagagacaataaattcggagtgtctgtaaccaaaaacggatcagacatatcactgtcttctcgaaacatcatacctgctttgtagtctaatctcaataaagaaggcacttcaaccctaaacgttctcacattatcttccacacgtctatttcgagtcacctttagatgcttgagaacgggacaacttgatagaagcttaacatgagaatcttcgtctttgtacacaacacagaagagatcaagttctctaagtgatgggagagagacttgacaaggaacatccacaagaatcttgtcggagagagtcaatctctcaagcgttttgcaaaagtaaaagctcttaggcattctgatcggctctcctttccaaaggagcctgaaagttagccaacgcacacgagtatcaagcagtggcggacccacgttggaggcaggtggggcacgtgcctgatactaaattctataaatattttataagctactactaaacaatgtaatacaggtaactcaaatggttttccagcaaaaagtgcctcatactaacccgagttcaagtctccgcactgttatttttgtaaaaataatttataatcacaatacaatttaggtaattaaattatacttagtactatttatatatatggtgccccacattaaattacattctagatccgcccctggtatcaagtacttttgcaacccactttacaggattaacattaataggacattgtggaccgaggtcgatccacaaacgttctaacaaaggtgccttgtgaaaacggaatgactcttcaagaaaccaccaaacagtattgctttttacgtcactagtggtttctatgtaattaagtctaggtaacatcctccagacaaaccgccatcgtttggacaaaaacgtggtggccgctgcatctttcgtaggaacgcacaataaaatctttacgagaagatcgtcaggcaaagaactgattctatcttcacaaactctatgttcgacgagttctgtcataattaacaactaaaccctagacgaccttagggttgagtcaaaaaataggaatcttttccaaattattcactttttttttttttttttttgtcaaccttttcccaacctcttttattctttttattttttttaaaaagaagttaaaagatgtattattgtttttttcggtctcggctctacatacaaaattttgttcatcttttccaaaattactggatttttcatgtgaaagttgcgtaaattttgtttatatttgtgtcacttccatataataattaaataagtgggagttgaattaatcaacggtaaagagagagttgaataaatttgatggttgtaatgtaaggttgtaaaatatcataacctaaacttgtactataaaataccaaggcttagaggtatgttagaaccaagctaagtaagtgactttgagagtcctcagtcttgtaatctatcttaaacactttgtttccttatttgatcctaaatacctcctacgtggttgtatatactacgtgtctaatttcagagtattaagaagtttgacagtagtttttaaagatatgtcttaaattcgttttgtagaacaagaaaatatcatattttgaaaatcagtaacttaaaactatcatattatgaaaatcagcatccaagcagttttatccttttatcatacataacaaacgttttcataatggccgttcatgttattctacaaataccttttatttataataacaagatttcattataggatcgaaacttcttgtccaaggaaatttcactactcaatcatccttgatgacatgttcccagtccgaggtcgggctctcgtatcctttgccagatgcagattgttcagtgtccgcggcgcatgtttctctctgagaatgtccacgtattgggaataacgaatctgaccagagatgatcacgcttttgtggctggtcattttctgaatccgaatctacatccatgctgttgagagatttcttcacttgttcagcttcccggcgtttcagtatctggaatctatccataacatcactcacatcgctgcttctgcccatattagccatcactgaaccttctagtttgtcctcctggtcacccttttttgtttctggacatttttgagccttgagtttgcgatttgtttcctgctgcttgagaatctgaaaccggtctataacatcaatgtctgaatcagggagcttctgagacttgagcttgcgctctgtttcctgctccttcaatatctgaaaccggtctataacctctctatgtttgttctctgtagtggatgcagaggtttcctgccatatcgcatccggtatctttgcaaaggttgcatcatcaggccttaagtttccacgaatggtctgctctaaaccaccagtaaagcttctggacataaccgataatactgcatccacaggatctgagttgattctagagctttcggatgcatcatgactcattgttgctgcatttttcccacaattgcttccatgtttgatgatagattcaggtgtatccttgtctgcatttgcattcatgatgggaaccgatttctgtgtgttaagagaaggttcctgcataaagcttactgcatccgcagagatctctgagaaagaaagcaagacatgtacgattaaaacataggtaaaacaaatattttcgcaaaatgaagcgcagggtaagcatttctgatactaaatccaaggcatgactaaacaaccttttagtcaatgtttaaatttggtaaaccaaagttgacctataactgggttaaatctgatccataaaggaactactgccattctcagagaaagatacaaaactgatcgtagacagataatttacttaaattcgtaaaggacccgagagaaacagcatcctaatctcctctatgacatttttagtatttaagtgcctgtggatctgttataagcgcattaataaatatcaaacagatgagacggttggtttgaaagttaccaacctttattgttcaatttgagattaccaatctcgttcttgatccgatgataccgagccatgcaagttgtggaacataaggcagcttcagtttcgagccagagattcttgtacaagagagtttgtgggtggttttcttcaccatcaggaaagttggaagcaagtatgttcttaatactctgcaaagttaagattcagtaggcaagactttataaatgatgcacaaaaataatatgcaagtatatacctgggtcatttcattcttatccaccggttctttgacaccaaagctgtctagtggcttgacactaaacctttgaaagtctttagcaactcccgttgcggcctgaacaagggtaccgttaaacaacaaacggcaaacaagaacaaacaatgtgttttttatcaaaaaccaaataggtcgggaacataacacaaagtaagacattacctaggctcatgtgaaatactctagatattacaagtggtgctctagattataaatacattaatatctcacatagagcatgcaacctattttttctttaacttctagctacgctataaatcacaaaatgccggggtaaaactgcagcatacctcatgaaggtcaaccacgtttggacaggtgacatgcatagattgcgttggaagtgttgcttcccctgctgttgtcttattatcagtaattttcttcaaacactttgtgagattatctactactttatcaaggttctcaagttgctccagcttcagccagcttccattgttaaagcattcataaacaagcacttctgacaaattatgcatggcgttaacaacagaagaaactcttggataagaagttggagatgggaaatctccttgatcacagaagtgcctttcaggtgatcggccagttgagacatcatctgcatttgatctactactcaaatcgagccccacatctgtcaacgatctgatcttcttatctctatccattatatcaaatgtttgtttctggagattacaagactcttggttggttggaacatcttcactaggttgagtagtactaccttcgaaagggggtttgtagttgccagctgactgagcattctcattatccgctttcatcgtaggagctgaaggtccacctgactcacttcccatagaaaacatcgtgggagctgaaggtccctcagaggttaccatgaagtggctccaagatcgaggctcgtgacaatttaaatcctcagttgcattctttaaggagctctcagaaacaccattctcactgtcagcaaccaaagtataaggcctctgataaagggaggagacaccactaccttctacttcatctttaatcagtgacacagaggaattaataatagatggtaaggggtaggaagatcgcggacttctcgaaccttgcgagccaactaccggatagggaagatttggattctcgggcaaaggcttgatatgaccagtagcttcaccatatcccagtaacacatcgaagttaactggttcaacagaggaactctgcaagctggattgagctcctaaaaaattctgaggcgcatgactacaaacatcactgttgctcgggaatgatctcccatctcctacacgaagcccagtctgacttccatcaaagagagcttgtgttataaaattcggcattggaaaagaaggattacaatctgtatcacacatgtaaggctccacacgagaagcagagacaacattcatagtttcagatctatctgagccaagaaagtaatatccaggacgtttctcatcaacagcattgctagaagagtaaacaccagatgacgcgataggagtaaagaatgagtcctgagaatttctgattagcatatctgcataagaagacacaggagctaaggtagctgagctgtaggtaggctcaaagttcaaacgttgcctctctgagaaattctcagtgggaggaagtgacacaaaatcagatgatgattcccttgaagagtaaaatccactcggtgataacatatctttataagaagaatcttcacctcgaagaccactatttcctgcaaatgcataatcttcatgcgttaaaactaagatcaaaccaaaacgaatcaaaatcgtcctaagaataaattgatcaatcctcaaatccaaagttctgtaaccatcacagtaccgttaaaccccaaattttgtttttaaaaagggatttaaatcataccatgttgagtgttgtcagcataaaacgatgaagaaggagtctgagagcgagaattttcacgatacgatgggttatttgaccaattagccggcgatcgttgataagagtcatgatacaacatcatcggatcaaacacttctttggctggatcataggattcaaccggattgctttgttgaaacggcggcgcagaagctggatgatgtggaggtgtaggcggtggtggagatgagagccaaaacgggtacgctattccagagaaaccattatagcgaaatccatcggtcatcgttttctcaccaaaacgaggaagagactggtgaaggaaaaagtgttgttgcagctcaagtgtttcagaatgtcaatgtttatcggaattagcttctcaatgggcctttaaggccttataaggaaagccctataatgtcactaaaaaatgaatttataagtcatttaactgtttaattataatcacagataaatacaggagtcaataaaaatttaccaattcagatattttcctaatcatataataagtacattttatgtatttcacattttgattataaaagtctcaagactctcatttgattcatcttaatcaaaccagttaaccaacatcaagtataataagagcaaatcaaatttgttttgaaaataataagagcatatttgacgataatatagtagaatacattacacaaacaatggcaagcagttgagctatacaaatcctgaacagcaagcagtttttgcaaagacaagatgtttcgtcacacaaaaaaatccacagatacatggcagagtggccttacggcattaaacataaccttttagagacgctgagcaagaaacttagccaaagaatcaacaggcttggctgagtcgatacttcccatttcccgtgaccggattttgattcttgcaagataatcagctgcaatccaagcaaaactcagcatcgccgcatgactggactcatctggatcttgcagctctaaagacttcttcacccactcgggatggtaagttacatgataccaagctgaagccttcttctcatacaagatgtttttttcctcctcgctgagattttcatggtcagggattgtttcctcaaatactttcctgaactcctttttaagggaattataagaatgcttcagtctttctttcagttcgccttgtttcttgcttgtgtatttgggcatggaccagatgtgacccgtcacaatctcttcctctttctgcaccttgtattgcccaagaagaccaatgagttgcccgtcgtacaaacatttgtgaccccatgcctcagggatcaaatcttcaaatcccggtatttcaagaacagcgtcataagggatggcacttgggtctgtgctttcttctgaggaagcttctgcatcttcatcataaacctcttttacccgtctgtaaagccgacccaagattttgttcgacttgtaagtttggtagtcttcttttcccatgaaatctgggtagagttttggttttaggtggaagggcattgacacaattttccctgtctttgggaaatcaactgcagtggcagctagttctgccagtagcaaacattcttcgtccatggctccatactcacttctatcagcatgaacgacgtgtgcattgcaaattgtgcccaactgctcattcgccaagtttcttgcaaagaaatcgattatgtcctgtaacaaaagcaatcaattacccaagacttggcaagcacagcaagaaaaaataacaaagaattcataactacattggcagaagctactagcatcatgatactgcccttgatagtaactaaacagtcacagtcacagtaaggcatgcgaaaaatacaaatcagaatcaacaatatatgacaaagttttcttaaatgtcatcatcttagctcctacaggatgaacacagtatgctgttaacaacctatgccacgcaatctatgaactcagaagcaagcaaaagtaatcactacaagcatccaaaaacaaagtttccaccacttccagaaatatcagagagttatactggaatcacttgtccattttatcttaagcgtcatcatctcagctaacagaaaaaaagtggggaagtagatattgacctggtggttgacagcacggcctaaactcttctcttcagctgcatcataatgcatggccggatagcttttcctgttgggagggatgagtttctgatcccaagccacaaagtacaggtccccgtcaaggtcactgccagaagcttcgtttgtatgcggcctatcacctttctgagggaaaataaggcagtcatacatgtgatgcagctggggtacatcaacagcttctaaaatccttacatcccctgggtgaagacaaggattcttagcaatggctacatagcctttaactacttccagatctgtctttgtctccttaaaacgagacccatgtttggagaaacaattttctatagacggtttagagacttgaataaagcattggccatgttcaagtatccctgcttcgtctaggcaacccattagccaccttcctgaagtaacaaaaatacgagatttttctctgagaccccagagttgtgcaattctgactgaagacaacatcccgcgtagatgcggctcggtttttggtttgaaacctgcactaagcatgatagctgcagtgtttccctgttcagcacatgatgccgtgagaacttcaaatgccacatctgtatcatcaaggatgcggttcagtttatagagcatggattcctgcatatcccagaatatttcatccggaacacctagtacggatagaagggtaattatctgccgatttaagaacccaggttgaaacctcgtccaggaacagatctccaagatcgtatgtttggaaaagaacttcttcatactgtctcgaagggctagcctgattccatcactttttgatggccaacgagcaacaacccctttgaaacctgcgtaacgtatctgataagcacaagggctgtagtgcacatccaacttaagtttctccattacttcgtcagcgaggtcaggtgtgattgtaccaattccgtcagagaaaacatacccatttctctcaatatctggaacctcagtgtcaacctcgtgaggcatgacatctacagtggcatatgtggaggagaagcacaggcccatcctagcagcacattttgccacattcttgtctttgaacttccccatccatgtttttatatctgacacacgtgttttcccgtcttcagcaaagaaccatgcagagcggtctctcagttgattggctgagaatgctagaaaactgtattttctaccacatagtttaaacccatcggttaatatgctcttcactcttttaaaaacgtaggtcttctgggagaaagaacttgatgtcaaatccttcacaataggagcaacaaagtaagagagaacattcgaatttatggtctgcatactttcatccatgaaagttacccgcaaaaatctttcagcaacagctttgtatctcctgagtaccctgttggagagctcaacttctgggggtaggcaataggctctggttggggtaattactagtcttctgatctcagagatatcctcagattgttcatgactccctaaaagctttggatttttctgaatccattcctgaacaagcttcaacctcttgtacgcatcaaaaactggtcgtttataggtacagagatgcttgagagaagctatattgacgtccttgggttggtttcttagaagatcaaagaatcgctcagtcaactgaaactggttaaagacacccctgtgcaataccgaatttactagaaacatgatctcaaaagagattccttccttgtgatgaatgcagaagaaatgatctgacacaggctccccaaaacaaggctcattacggatacggggaggccacctcacacgttcctcttgcaccctccgcatcctaaaataatctaaggctgttctcagtttattttcataccgcggagatatgagcactcgatatgaatgacatcgaccaattgccccaacttgagtaaaatcagtggtacggatccaaggatcatcatcatccaagagatcgccagggacagtatcgtaaatatcatcatcagcagttctgtaccagacacggggtgaagaagccagctgcaaaataagcacaaagccatgcaaggttttatactgcctgactgtttgtatatctctcaccaataactccaacttataatcacaattgatcacagcatgcatcactgcatccttgaaagagaaggcagtgctctttctgaaacaaaacttgcacgtgttgtcaaaaggatccaccaggaaatcaaccccttcagctctccaagaaacaaaaaaatcatcccgagaaaccaatgtcccaatctcaagtgtaataccagccaacttataaggtacagtcgttcttcttctttgattaagggaatatggattcttaggacccaaactgacttttaacggctggccatccaagatgaggttgcattgccctgcagcatccatggcacgaccagctgattcaaaaactgcgaaatggacaaaggcatgaggctccactttcttatattcatcaatactggggatatttgaagtgtctgcgatttcaaaattaggataagacccaggaggagtccacgaagtttttaatctgcaacgccaaacaattcctacttcatcttcaaggtaatctgtgagttgttttgcagtagtggattccccaaatccaccaatgcttacttgtgtcacaaccgacttcttcatatttccctctgaccccatttctcctgaaaaagaaacatactaaacagaaataacccccacatgataaggctgataagagaaaatattgaagaaaagccctaattcgctactccgttggaagatctaagaccataaatatcaaattaagagacaatatcgatgattccaactacaaatactattgaaatcgatcacctaatacattgttgattgaataattttggaatcaagcgggaataaatacaaaagcacttacacagtgaggttctggagacttacacagtgagatctttttcaatctaatactggatacgaggtagaaatagaagcaatgcggagactggagagaggattagtgagtatgcgaaaaagggagaacccgccatagctgaaaccatctctcgtttttatttgacttcggcgagtaaacgaaagagagtctgagactgatgagggggaaaatagactggagaagaagtgcttgtgctgctcacgtgctatttgtctaattaatgggcttttaaaatatattcctatttgtttccattattgtacataggcccatttaaacaacctgggccaaaccaaaccgttatcaagaaaatacaatcgagagatccgacattgacacagtaaaggtagcaacagagaacagactgaaggagaagaacaatacacaaatttctggagaaagttttgaagaatgacgacaatttccgatctatcagatgatttggtaggtgatattctttctagggttccatttacatctctaatctcagtgcgatctacttgtaaaaagtggaatgctttatcgaaaaatcagatctttggtagaaaaacagcagcaaggaatcaatttctagagttcatgattctagattctagagtttgttctttgagattagatcttcaaggaatccgtaacgaagacaaagaagacttcgttgatccatctatgaagctaataagtatacctagtaatgatgatcaagtcgagatatctcaagtctatcattgcgatggcttattgttatgcatcgccaaagagaactcgaatgtctttgtgtggaatccgtatttggggcaaacgaaatggattcgaccaagaaacacattccacagatatgacaggtttgctcttggatacgacaacaaccgtaaccacaaaatcttgaggtttctctatgatgaagagagcaacgaaagcagtcgaagaactcacattgatgtatacgattttagctctgattcatggagggttcttgatgtcaatcctgactgtgatataccgttttatcagaccggagtgtctttgaagggaaatacttacttcttcggtcaagaagtgacacaagcgacgaaagtaacagagattgaaacttgtttactctgttttgattttacaacagagagatttggaccgtgtttgcctctgctgttttaccctccctgtcctagttttgaaactgtgactctatcttgggttagagatgagaagctcgctgtgttatacaaccactacgtcacagctgagattatagagattaggatttcgactaagattgaacccaatgcggtatcctggagctcttttttgactgtggatatgtcactagtcaatggtttaccggatcatttttcgatgtactttgaagctaagagcttcttcattgacgaggagaagaaagttgttgtgctttttgatagtaaagagatcaagacctgtcgctaccaaatggcttacatcgttggagatgatggatacttcaaatctgtcaacattggagtaagtccgaattcccagcggaaaccaggcagacttgtgtgctcttcttatgttccaagtttagttcaactgcaagattagtcacttttcaatacttttgtttgtttcttgcatcaggttttcttttgaacaaaactgattttagtttgaagaaatagttgatacaagtatgagtgtatatatgacaaaatctcactttttcaagtatagtgtttgaagttcattttgaaatcttggtttcagactgaagatgaaaatatcatcgatttgtcttatagaggaagacttcattggcctgccgttctatgcaatagagtacttaaggtccatagtttacacatgagcttaaacttgggatttgatctctcttgatttcttttagattttgaattgtcaaaacaccatttcgtagaaaatgctagtcatctgatgaatatgtactctctcatctacctctattatgttctttatctcaatatactctcagtcatagaagcaatgcagaggccggagagaatataaagttagtaggccattagggagaaactgccatagctgaaaccatctgccattatttgttctaaagaacctccatccattgtctcgatatgagatactattaaaaaaaggaaaaagtaggagatagagaaagaaacggttctcaaatgaaaacctctcttttatgcatcgccgaagacaactcgggacttgtggtatggaatccgtatttgtgtcaaaccaaatggattcgacttagaaacacattccacagatatgacgtgtttgctcttggacacgacaacaaccgtaaccacaaaatcttgaggtttctttatgatgccaagaagtacagaaccggtcgcggacgcgacaatgatgtctacgattttagctctgattcatggaggagggtttttgatgttaatccccacaggggtgaactgttttattacagtggcgtgtccttgaagggaaattcatactttttcggtcaagaggtaacaatagaggaagaagaagaagaagtgatatcacaaccgagagattatttactatgttttgattttacaaccgagagatttggaccgcgtttgtctctgccgtttaaccctccctctcctaattttgactatttgactctatcatgggctagagatgagaagctggctgtgttatataaccactacaacacacgtgagattatagagatttggatttcgactaagattgaacccaacacggtatcgtggagcacttttttgacagtggatacgtcactaatcaatggtttaccggatcgtttttcaactttctatggacctaggagcttcttcattgatgaggagaagaaagtcgctgtgttttttgataataaagggaccgagaccggttgttaccaagtggcttacatcattggagataatggatacttcaaatctgtcaaaattggagtaatctcgaactcccagtggcaacaaggcatacttgtgtgctcttcttatgttccaagtttagtgcaactacaagattagtctcttttcaatactgcatttgctttgaagaaatagttggtagaagtatgataactaaagatcactttttgcagtttaatatttgaagttccatttttaatttttttttttctttttttttaaacatcttgttaatgaagatctttctatattgaaaagatcattgatttgtaatagatgaagtcttcattggcctgccgttgtatgcaatatacagtattacttaagttccatagtttacacatgaattgatgtgactcttgaattccctgttgcaaccctgtgtcctcttttgctcatattgcgaatgcatttacattaaacttgggatttgatctttcttgatttcttttagattttgaattgtccaaaacaccatttcgtagaaagcgctagtcacttgatgaattggtactctgtcatgtacctttaaatatgctctttatctcaatactctcgacacgtatatatgaagaaaccgccatagaagctaagcaattatatgctaagctattatatgacgtatatatgcagagactggagagaatataaagtgactaggccattagtgagaaaccatctaccattatttgttctaagatggtgcaaaaaatagtagtagagtaaataataatggtaaataaaaaaaaaaaaaaaaaaaaaaaaaaaaaaaaagtaaacaataagaaaataataagcaaacaataagttatgtacttcactaattctctaatgcgttaaattttctaattctctcgaggataaaaagttttattaactctcttcaacttcaatatatatttatgtttctctagaggaatctcgtctagaatctcaagaaactcatatatgtttctacttcatttgtaccgtagggagactggatttgtaaattgttgtgtgcagttcccttcaatttcagattggacttgaaatttgaaggtgtaatggagagaaaaccttgtagtccagaaactcaacctctatataccaatcaaaatatatatatttttattttatttttgaattccatgaggttctgggccgaattccgtaatcctctcaggcccgaaaccacaacatgtaatattagtttcgtctcaagcgtcactcgaatcggcgacctctaagcttcgcctaggatctttaccaattgagctaacgacagttggtaagcaatcaaaatatatctacaagttacataacacgataatggtaattactgttcaaacggctcttaagacaatcatggaagaaaattctggaatgtcctcacctcgacaattgtaacctcatcgcaagcattgctatgagaatcccggagattataagagaagattctacaatgccataacgcttcacatcttctgttttagtgaacacatattattctctaattttccatcaaaagcatgtttttctaccacaaacgtcactaattgcatttcttaggtgattacgcattttccgttagaaatatgttttgaatcttttcatcaaaatataatttgcatcctaaaattttacttataaatgatttaacaaataactccgaaggtactaaaaaattaggatgtgatctctataagttacacaaaatatttacacgattaaaacattgtgtatagtaaattttagcctcaggtgttattaacaaacttgtcatgttgacatgtccatatcagagtgacttttcactatttaaataattgtctaaaactatttacagattttgtcattaatcttataaaaacatataacacaaaaattaaaaacagaaattctaattaaaataagaattaattaagcatttaatctttaaatatatattatttcaaatactttattttcgttttttataaaattaagtaaaacaatatttaacatatttttgtattttgatattgatcataaataagtattactgtatgaaacaaataatagtacagcttcatatgaatattatcttttaaaaatatactgttatttttgttttcagattaattaaaacactataacatattttgtatttgaagagagatatacatatataaaatacttcttagatttattgacactaatataaagttaaattcagtgtttaatttgatttactaatttttaataataaatcctaacaaaagatcatgtattcaacattattatggttttaatcttagatcttagttgaatacactataatcactgttactatgttttcaaaactaaatgcaatcataaccataacactaaatctattatatatatatatatatataaaaacatgttttcctataaatagagtgtcaatatcatcttcatccacaataatacaaaaatttcacaaacatataatacataaaaatcgttttcaccccacaaaaaatacatcaaatagtactactaatgctctaagagaactattttacaatattatttatcatataaaagataagctataatatcaaaagaatcattattttatagacaaaacatattaatagaatatgaatattatgttccatatttgccaatatattattgatcatataatggatatcacatatagctatataaaacctaaagtcattatagattttggtcactacaatagattatatacttaatctaatgttaaatttatttaataattatttattattataacaagcattggtttagaattatagaaaattgtaaatcacaaaaaataatacatttgtaatcaacttgtaatatgttttcttaatatgtgtgtttttgctagaaaatcaatcaataaaaaacagagggtatattttacttctttatttttgggtgaatgatttgtttccaaactcattttctaattatttattatattaaattgaattcttatttgtttctgtttttgtaaattttgctttgttcaacttatataagcccatttaaacaacttgggccacaacaaaatattatttaaagcctatcaagagatacaattattcgacattggttgattgattgaaaagacaagacgagattgaaaaagaacaaaacacaactctctcggagaaagttcgaagcttgggagaaatgacgacaatttccgatctaccatatgatttggtaaaagagatattttcttgggttccatttacatctcttagagcagtgcgatctacttgtaaaacgtggaacgctttatcgaaaaatcagatctttggtaaaaaatcagtagcaaggaatcagtttctagagttaatgattctagattctagggtttgttccttgagattcgatctccaaaaaatccgtaacgaagacgaagaagacttggttgatccatctatgaaacaaataagcatacctaataatgatgatcaagtcgagatatctcgagtctatcactgcgatggcttattgttatgcatccccaaagataactcgagtcttatgttatggaatccgtatttggggcaaaccaaacggattcgacccaaaaacacattccacagagatgacagctttgctctgggatacaacaaccgtaaccacaaaatcttgaggttgaacgaggaaaacgaaagtcatattgatgtctacgattttagctctgattcatggaggacggttcctgatgataatccctatagggatgaactcatttatcaaagtggcgtgtctttgaagggaaatgcttactttttcgatcgagaggtaacgacagaggcagaagtggggacagaagacttgttgataacaggcattgaagattatttacgctgttttgatttcacaaccgagagatttggaccgcgtttgcctcttccgtttatccttccctctcctagttttgaatatttggctctatcttgggctagagatgataagctcgctgtgttatatagccactacgacacatttgacatcatagagatttggatttcgactaagattgagcccaatgcggtttcgtggagcacttttttgaaagtggatatgtcactaatcaatggtttaacggatgattttttgattagatttgaacctaaaagcttttttatcgacgaggagaagaaagtcgctgtactttttgatactaaagtgacagagacctgtcgctaccaaatggcttacatcgttggagatgatggatacttcaaatctgtcaacattggagtaatctcgaattcccattggataggaggcgaacttgtgcgctcttcttatgttccaagtttattgcaactgcaagtttagtccattttcaatactgtatttgtttcttggtttgaacgagactgcttttagtttgaagcaattgttgacattagtgaagtaaagatcactttttctagttttttgtttgaatatttcaatctgaaacctttttagaaattgaagatctttttagatttcgggtatttgatgttctaaacatggataatatctgcatcttgaccagagcaaacaaacagagtatatgattatgaaaattgaataccttgtataacaagtcactgagatatgaaaattgcataccttagaagcttctctagaagctctccgatcatcactttttgatctcatttcacctgtccaagaacagtgtttttcggtgattgtagtattcgatctataaaagctacaagctttttttatcatcctttctttgttgtctcggacttttggcaacacgctgtcttttgtcatccttcaactttccctcttcttcttccctctgtctcttcttctcagctattgctgcctccatcttctgcttcaaagtcatttctgactcctttttctttcggtctaaacggaaccgcttttgactagggtttcatttccctgtcctctcaaaccaaagggtgatacacaactagctccaacacatgacaaacggtcagaattttctgatacaacttggtgatcttcatcaatttgactcctctctacacttggctgttctggtttgaaggagcacgagccatgactcatcgatccagtttcctttgacaaacttttcctctgcatctccgtctctcttttttctcctctcattttttagctcattgttcacaagctaattagttgcaagtgtgatgcatagaacaaatcgccacgaggaggatcctagacaaaacttttcctctagggttggttttagtctttgcctcatcctagacaaaaggaagcaagagagaattctgaatctttcacaagtcactgttaatatatactgtatacacttttataaaacgttcagaatcaaaagacaaacactaaagacaaaacaaaatcaaaagacaaacactaaaaagacatttcagtggtatttttgagtaaaagaaactaatgatgatatttttggaactaaaactcattctaatggtaatttaaaaaattgccaaaaaacatttatagcccttccaattttgtgaattattgacacgaataccacacagtgaatgtatactcctctgcgactccaccacaagctccactttttttcttgcgtctagcgttgtaaacccaaattcataagttgtattattaaataaatgcttaggtactaatactatttatttccgttttagcctcctctccggtaacgtctgacctttgtattcctccgtccatgagattgctgcatttgctatcttgtttgtggtgttgggtggtacaaatcttaggtttaggcaattttagaaagtgtgtatgttagtttatgttcacttctacgggtaatccaggattatggtatggttgcctcgctctcctttctcttgttgatagccgctttggtcatatagtttgcttgcattattttggttttgtgataaatgattttgttgaacttacttttgccctttgatgagttttattgtgatctctccggttcgatcgcttgacttctctcttccgagttttgtccagaatgaactcatgtgagaagaactctaataagtcaaagaagtaaatagagtcttgacctctctgtcatcataacgtttacataagcagcctaactacatgtaaaaactacaaacaaatatatcttataaactggcgaaagcctgaaaccaataacagaagcaaaaacacgggccggttcaagcactatatttacaaaaagtttcagttttcaggacactgcagatgctctgaagtcgacggttagactgcagactgacatcaagaacacaactgcaactactgccgccctaaagagtcctccatatgaacatttcaccgacgtaatctttttaaacacaaaaccggtcacgttctttgatctcattagctttccacaccttttctttatactttctccaaccgtgtcctcagcctgcatagcattaacattttaatgtcatggatcgattccactctgcgacgtgaaaccacatacacgctaaaagaaaccaaggatgagtaattcatcagaaggtgggtgttattctcacctctctctttatagcttgaagctcaggattcttcgtgttaatgccattaaagttactttgcagacgcagccttcttggaccatttccctgcgctatatagtcattggtataacctgagggttgtgcctggcgactcttaatctggatacccgtcactgaaacatcattgctcatgtcaactgctgagccctgttgacacacttgcgcaatctgcaatcaagtaaagtagttaagagttaatacgatttctgttttctagaagtacatacaaatgatataatgagttttgaggaatcttcatgtacctgatctggtgctacaacatcaaaaccactttgcaaaacatacttgtgcttctctggatcctcgtctgggctcttgagaatcgaatcaagaaaatcagatatatacgtatctacttcatttgtaccatactgagtctggatttggaagctgttgttgttgttccctgaaaaattactcgagccaggctggaatgtgttgtaagaggatccaagctcagattggacttgagagtgtaatggagagaacagcgtgaaatctaaggactccaattccggataccatttaaaatctacaagctgcatgccgaaaataaacatcattagtattcaaacagacactagagacaatcatctaaaaactgtctaagagaatttttcaatgtcctcacctctgcggttgtagcctcatcacaagcatcactatgagaatctccagagattacaagagaagattctgctatgtcatgacgcttcacgtcttctgttttaattacctcagatacttctgacttagtcacttcgacagttggagacgagacagcaggttcttcaacttcatctgacttcgaatcttcttcccctaaaaccagttcttctttcttgaacaatttgcatataacaaacggactctgcatatatatatatcaacacaagcacacaataagctacagagccaaatttagttttccaatggttacacatctaaaagtatgcattatttacctggccaggattggtaccactaagatcatcctccgtggcacgatactcatgaataatccaattggttcgtgtccccctaggagctctacccgcgtggaaaactagagttctcttcacaccaataatgttagtcttaccggattttatcttccggtcttttcctgtggctttccagtaccctgcaactgttgcccggttctgtctacttccactcggatacttccgatccaatggacagaagtagagccactctgagtctttagttttgatcacagaaaaatctacaacaaaaaaaaatcacatcttttaatcaaatttcagtcacttacactacaccttaacagagatataaccacatacccaaaactaaactatatcaaacacatatgatcggtttaaagttattaactttcttcaccatagaaactaaagctacaaattttaagttctaccatttctcaattcaacataatgccagagaaatcaaagaggatctatagaaaaagtgtaaatttatgaataaagagatgaagaagtaagtaagtaagtaccaggtaaatcccaaggttcccatttgcaaatatcgatctcacggatagctttgacgtcgtcatcgtgaccgttgattttcctacggagatagtaacggattagctcctcgtctgttggacggaatcttaatccaactggtaacgaatccattgataatacatgaagattctgattcattgatgctgctcttttaaacgaatcgcgagaagaagaagaacccaagatttaaagatacgaatcagaattatttatctatctcagagatgcgattccaaggtatcgcgaagaagataacaataaaaatttagagagaaaacaaaaaccctaaaaatggattcgatgattttggtaaagtgaagaagaaggcagatgtgagctttgatttggttttttctttccttttgtgagttctatatggtgatggcagcgcgtggtgtgtacacgcggcaaaccaagtacgttacgcggtttggaaattgttaaagtatggttttgcccttgagcgactttgggatattaactagatgcaggggtaaaagcgagaagtgaatgactgttgtaaaagaaggtgatgagaaatgtcatagaacgaatgatgtaatgacacgtggaaaggaatggaagtttcggtgcatgtcactttgtttttgggatggtgttacgcttttcttgacttttggaaacttgtcttttttaatttatttagattttttcgctttctttgacttttggaaacctaatcaaaacttctttcatgaaattatgtattagtaaaaagctgcataatcattaggatattcatcatcgtttacacggcgtaatcctcttatctttgcaagttacaaaattcaaaaaatcgaattaaaattctggagctaggaccggctaaaaatagagctagcaacaagagacgagagaggtccacaaaacttccaaaagtttgacgatatcaatgaagcttttcaaatacagagaaacatctatctaaatttactcttacctctctgctaaactctattcttagccatccccaatttgaatacttcaacacacacaagaaaaaataccaaaggctctccataaaaatcggaatcatcttcatctatataaccatgattatgttctcttcatttgctcaatcctcgggtcaacattaataaaaaagaagagaaaaataaaaaagtttgtgtaaattttttttgcacactccacagcctaaacccaacccaaaatcacaaaaaccaaaaaaatatataataatgggtggctgtgcgagtagacccaaggaatcagacatgcaaaacgaagaaggctctgttcctaacaagcctgtctctgaaaacgtagtagccaaggtaacaattaatctctaggttttaaatatgaaaatttaattaggttttgttaccgaaccgggcttaaccggttatgatcttttggtatgattaattaatacaggagaacaacacagaaagcggtgagaaacagaaccagacagtggctgagaccactgaaacaacttctgtcgaagctaaggagacatttccggtcgagccgaccaaggaaacaactcctgctgttcaaccagaggttgcagccgtcgaagagtcttcttctgctgatgctggtgaggctgcagtagttgcacctgagaaagtggagaacgctgcaacagaaaacgctgaagcaaaggtggaggcggttgccgtagctgcacccgaaaaggttgaggttgcagtggaagcggagaaaaaggctgaagctgaaccagtaaaggctgaggctgaaccagtaaaagctgaggctgaaccagtaaaggaggagagtaaacaagaagagaaagaagctgttgtcaccgtttgatgattaattaaatttgtgaaagtattttgaatgttgttgtatgtcaccttggtttgatttgctactaccagattggtttggcttttgttgttctttgtatctcaaaatgattcttctttgattcaattaaatataaatcagttttgcatcgtgaaaatttgtaatcaacatttcttaagtcgaacgtgttcgtgtgtgaattacgatctctgattcttttttctccggaagatacaatcgaaaacattgaaagatgcaaaatcccctgaaaactaaaatctttcatttgatcattgatctttttattcttgtgatgtgactccatctttcatttgattgtatatgcaatcttaagtcctgctcataaatcgtaattggcagtgtcaaagaaaagaagaaaaaatatcaaatattactaaatgatttcaatttaatgttagaatgttaagagatgtttgactacttcacgaggagatgggatctgcattgaaatactacatcgaatattgaggatttggagactgaatattaacacttagaggatgaatgttggcagttgttgacaccggaaatcaacattgcatctgttggagtatattcgaatgttttcaagtggcaatgaatccctttgattctgatattatctatctatggagtcaaaaacactcttgttttgtatctggtaacttgcggacacaagagttgacagttcatcattcatcaggattcggaggattggactagtgatgaaggttgttgtcgcataaacacttctggttttaagcagtatatgaagtatacggaacattgttctcgtcgctacaacaaaacttctatcatcatgttacctcaatttgtggtctcacggtggatggattccgtacaccttcctccaaattctgatttaactctttctattggtataatacaaaacaaggtgtttacgtattttgttttatccttgtttagctagctttctctaggtctagctactcttttgtgatgaatgacttgtgccatctatttatagtcgttttttcttcttcttagttcttgtttggccaaaagagaaaaaaattcaatttcaatggttagagtcttgagaaatgtgagaatggtttgattcagttcctcttaccgttacttcacggacttttttctgccgtcttactctataaataaatatccaaataactaattaattacattatcaaataccatttcctgcccacgcctattaaataggccatttaatatgcaaatatacgagtagatattttagtagtatctctaaccataaattaatagacacgtgaatttccccattaaccgccaagaaaagacaaaagaaattgtagaaaatcaataaattagctcaagaaatctgtaatcatttttaaaattgacaataaaaataaataaatataccgtttatttttcaagtaacggagttagattgatttctataaatagttaaaaatgaccaattcatcttcttcttcttcacaaactttctttctccaacaaatattattcagtgccgagtcaaaattagtgttgagaatttgctgcttctgatcaggtctgttttatttaatctctgtgaattttattacttcttcttgttggatctcataatgcgatttatcagctgcgattaaatctgtttgattgaaatttatgcctgattaggaaaaattatctctaatagtggatcaatttcgtttttttaattcgggttttcttgggttatgcagtgagtgaagaaagtttgaagctttgagtaactttgaaacaatggaggtatttggaaaatctcatgtggttgttggctctgctaatgttatttacttatctgctatattgggtcacgaaggacccaatcacaaatgtgattggaaatgcgagaatgagaatgtgtgtgggaatatgtaccgttgcaaactaactgggttgactcatgtttgtgacaagaactgcaaccaaaggattttgtatgataatcataactctttgtgtcgagctagtggtcggattttcccgctttctttggttgaggaacaggcggttaaaggagtgaggaggaagcttgatgatgagagtcaacaacaaccttctgaaagttgtgttaagcgtcgtcgacgtgatgctcagtttcattcttctccttttgagaggtcttttgctgctgtgagtcctttttgcagccaagctggtggagatggaatggagattaactagttcttttctatctcacctagaataacttgcttttctttttcgttttggacaagtatgcaataagagatatttactcatgtgctcttacagagagtctaggcttagctctctgtctgaagaagcacttttatcttagtattgttgaactctatgtagtatttaacgtaggagagactttatgattctgctactttgttctggacgttcttgttttcgctattattaggtgaagtagaataacacccttgtttcagctttctttctagtgctgtctgatattctcctctcgcaccttttcttagctttgtatcttgtttttgcttgcctcttgtaccattggtcattcttttaagtttattgcgacaggtttttgtcacattgctgaaaattgcagtgtaggtttccaccaagtttttcaagaccaatttctttctggtttgtcatcttgtagaatattcctcttcatcctctcaatggagacattgttgtatcctatactttgttcaaatttaacttacttccttgcagtgattgatgagcactagaagttctgaaagttttttctgtttgtgcaggtttcacaatcttgccatgcaagagagtttagttaccattatttgactgttatgtttcttaattctcagtgtttgaggagtaagtctaacaattggaagcttgaatttttctttgtaggtaggtctatgtttgtgctcagcaggcagcagaggaaggacggttgtcgaaagaaatgatacccgacgtaagattgcggatgaagacacaagtaatctaatatcttacatcaatggaactgcgtgaaagaaaggaaagggttggtgctcttctttgcattcaaaaatggatgattctggtacgtagtagcttatttacaactacttgttctttacttaatatatccagacagtgtaataggggctaaaagaaacatcaaataatatatgcatttcccatgtaatggtaattgttggaatggaaaatgttattttgtcagtgaggaaaattctgaggtggatttatattgaactatatcatataagacagaaaggcgaaggtgtggtggttgatgtgacaactatcttactgggacacagagaattttgcccaaaaaagttggcaaagtatcaattgttggctcgtcctctgctataaggtacaatgctggaacatttctccttagctattgattattatgatggaggttatattcaacttagagcaaaatatgtgaagtagatcttttgttgtttgaagaaatcaatgtaatatctaaattatgacatattcttacagtcttctgtgcctttcaatctgctacaatgctttcttcaactttgcagaaatctgtacacattctgattaatctttgacgttttcttaatcgaatatgaattaagtgttgtttcttctgtatcaaatccaggttagaggatgaaccgagcagccaaatcttcagaagttcagaaccacctagtccgaatcataatcagaatcaaaacagcaaggtgtggcagtggctccctaaggttagcatcaagatccaaacctaataccttgagcatcatcaatctacagagttctccctccacattcagcggcattttcgtttgtttttatagtaaccactaagctcaatctactgaaacaaaatatctcgttgttgatgatattatacaaacaagtaaaatgtctatttgagcttctttcatgcttcaaacatcatctaaattcagacacaaaacaagcttctctatacacacccaacttttttacctaaaaagaatggagaaattgagcaattttcagaaatcagaactgagtaaaatgtggcaaagacgataaatgggcttttttcaggcccagcatatcatatataacccaatgggagatgagaaggagggagagataagactgagaagcagagaaccgaaagaagaaaacaaaactctcgaagtcgcaacagaaaagaaacgagagagatatggtggtaggcggcggaggagaaggagatcagaagagaagcagcggagaaatgatggcgatggcgagtttattcaacgatcagcagaatccaattcaacagtttcaggttaaattcaaagaagtagaaactaatttcaagacatggttgtcgaaacagtcgattccggtggaagccgccgtcgtatccaccatgagcggtgtacaaggagctttcattggtggtctcatgggaacactctctcctgaaatgcctcaagccggcgttgaccctcaagccatagcttcgatgaaacaagctcaggtttcaactctatataaaccctatcctcattcaaatgtttgtaaaattgaggtatgagaattagggtttttgaatctgtaggctcttgtgggtggtccttgggtccaagctcggaattttgctgcaattactggtgtgaatgctggaattgcttctgttatgaagcggattagaggcaaagaggatattgaatctgcgtaagtttcattctttgtgatttggttaccattgagaatgaaagtaatggttttaagtttgcagagtggtggcagcgttaggatctggatttgcatactcattggtgagccaaggattgcaaggacaacctatgaatgcaatcactactgctgctggttttgctgtttttcaaggagtgttttttaaagtgagtgatcatattgaaaactctctctactcatggaaactgtatataagcattttttttggtttgattccttagttgggagaaagattctctaaaccgagtactgaagatccatttttcacaagaggaaggacaatgctagtgaagctaggtttggagaaatacgagaagaacttcaagaaaggacttttaactgatcccacattgccattgctcactgataggtaattatctgaactccatgtaaagtttctgctagcctttgtttatgttagcaactaaagttaatgactttattaatccagcgcgctgaaagatgcgaacatcccaccagggccaagacttatgatactagatcatatccagaggtttgaattcaacttctctgatactccattgatcaaatatacgaataattgctgaatttgtgggagctattctctgttcttttgtgtatagggacccggagataaagggcaaacgaaagtaggagccatgttgtttaatcaaatatgttttgatggtaacgatcttcaaacacatatgtaatgccttttacttttagctgctattgccatgaagagctcttgttagatacttctgtttctattaccaatgtttgattatctttaaaaaaattgagtagttcgtctcaaatcaaattggattataggttctgaataaaacgaaaatgaaatatgctttgtatgagaataagatgtttatattatgtatagttgattggcttaagatcaagactcgataaaattttggttcatacaattggccaatcaccaaagtgattcgatcaactcttgttaaattatttgattctctttctacctaatttgtactgttgatgtgaagctccattaattctcctttattaagaacaataagcgtgaccacgaaagaagaaacttcgtaagacgtctctgttatgtcgtaatcactaaagttacatgaatacaataacgtttttttttaatgcggtttttatgaaggaaaatattaatttcctatatcaaaatatctccattagaacaataagcgtgaccacgaaagaataaaactttctgagacgtctctgcaatcacaaatgttgcatgaattcgaggaaatataacttcaaattcccctaaaacaaatttttgtcaacatggttaaacacttttttctggacataattttaaaggattatgaagaaaatgaaaatttgtaatacttatgcaaaatttctttacatatctttttaacacattaaactacttggatcccacaattaaaaaaaaaaaaaaagctaaagacaaaataataattaatctatctacgaattcgtaacaacgacttcaagagaggaagaagagagacgagagatttggtccatgagaaagactatacgagagtgatagtcacgcgcctgatctaaagactcgacctctagctccgccagttgcgagcagagtctctcctcggcctcctccgccaccaccgtacgccgccacagctgaaccatctctttcttcatctcctccatttctctctccaactctccgttcctcctccgtaactcctccacttcttccgccgccaccgtcacataacctcctccttttcccattatgattatgtttcttgtatatagacaacaatttgagttaggtggttttgctgcttcttgtgttaaactgttaaattctcttctatgtgttgatggtccttttaataggcatattttgagttttggtatttgggattgcaaagtgtctaggttcaatgtatctcgtgttctcttctttttttttttgtcgacatcattgtctgtctactgcacgtggtacatatcatgcaagactatcacaataatttattccttttgaatatctgcatctagaattatcttcaagcaatatttaacattaaaaaaaaaaacatttagattaaaatataaattaggtatcgttatcagaaaatatataatttagatatgaactagtattatactaatatgtaaacacacaaaagtagataattatttatacaaaatcaaatacacaaagatataccacactaatgatgacgaatattaattagatatatatactagtaacctaataggtttaaaatgttttttgggggctgttttattacattaatctagaaaatgcaacatcagtacatacatatccatgcatgatagtataagtatatctggcctattgtagatatgtatcctatatcccaaatttgacacatttaagagaaaatctcatattctatcaaaattttcatataatttgctcatagtgattaggcaaaaatcttatagttatattccttaatagcttattaagatgtcaaatttcttttatcatcatcaccataattattagatacacaaaaaattagaaaatcatattaagacgttaattagtattatgcgaattagttgaatattaggaatcggtgaacgtcgtggagatacatatgggtgacgtcaccaatcacgtcgatgtaattgtcatatcccatttcttcgtgcctccagtggaccacttctacttatcccaagtcaatggccgtcgcaccaatgaaacacgtaacgattattcctactaattcattattcttgaatccaccaatattagtcattaaacccattaatctaggccaaagtctaagctatctctatttcctaaattgttcatggaactatagttaattaattacagtttggtcacccgatatcaaaagaattatagctttgtaaacagtcaaattcgatagtcgatatcgtagacaaatgattccaataatggtagatccttcttttcaagagatatcaaaatcagggataaagtagcataagaaaaaagccaaagaagaaaaaaaaatcatgaataatcgtttgcccaattattacaaaatgccaaaaaaagctgcgacatgaacaaattcggagcgtgggatgatcacattttagaccatacaatttgattgagttcctatactgtccaggttcaatgtatctgctttcttgtccggtttagtcttccaaaattacatactggctcacttcggtttaatttattctaatttggttcaactttgtttagaatgaaaaaaacacacacacacacatctttcttgaaacaattgaagtttcaattcatttttggcaggcatggtttactccggtaccgttgttgattaaataagaaatggtaataattttaaatctacgcatggcatattctcatcgtcaacggatactatctcaaatttattatgatcaaaacagttaattaacagcaaaacaaacaaaatcacgtcaaaatcgaatgtcaatattcctcttaatttgccagcaccacatatcttcatactattttaaatgatttttttttatattaacaaaataaatatataattaaatgaaatagaaacagaaaatgacccttgaaccaatggaaaacttacacaatttcatgtttcacgtcccctaaagactattgttatggttccatagaaaaatcattgaaccattctctcctacggtttccattgaccacaaaaaaaaaatcctgaagttgtggaaaatttccatgaaactcatgtacccaaaaaccctttatttttttctacactcaagtttcaattaactcttctacgattcctttgaaaattatggtaatgtaggatttcatggaatttaaacttcaaagttcttcgatccccttcgagtctccaatacctactagttccataaaattattttgatagttaagattgacattagatctcactcatatattattacttcattacttaaacatggtatcattccaaaatattatttgcttccataagaacttttgtaattaaaagtcaagacaaaatatgcaactagtaccagaaatactaattcattagaaatggagttcaacaatttgtatgattatcagaaattctaatttattcactagaaatggattcaaacatttaatttatgttgaaaacataacatattaccatcgatctatatacatgtatagtgattgtcacatacacaactatacataacttatgagaaatatcttattctacgaggaagagacgacagaagaagaagagagacgagagatttgatccatgaggaagagcatgcgatcgtgatagtcacgtgcctgttctaaagactcgacctccagctccgccagctgcgagcagagttgctcttccgcctcctccgccacaaccgttcgctgccacaacttaatcatttctgtcttcatctccgccacttctctcgagagctctatgttcctcctccttagctcatccatctcttccgccgccaccgtcacgcatcctcctcggttcgccattaagattctttgtgtaaaaggatttgattgtggttctaactttgtttcttgatttgttgagtgttagggtttgattatgtttctttaataggcgctttgtgtagcttttgcatgtccaggttcaatgtatctgcttcttgatttttatttctcctcacttttgatttcggtcaatattttctccttacttgaaacttaaacatactcatggcttatgtatgcatagaccaccccaaaagagaaaatttactatttttttcgaatgttcaatttttttttttcgtttttttatcacagtttcgctaggttcgatttaaatattttttatatgaaacttaaaccaaattaatttcgaaatttccggtttatccatgttattaactagttttaactttaaaattaataaacaaattgccgtctatacaactataaattgataaatggataaatatatgttaacgtgtaaatagaatagtaattaataattctaatgccgtggtttacacaaattcaatttaattatttataaatctctggtccgtcaaatttgtaataaaaatgtgttggtctgatctctgatgtatgtatgtggtatatattgattacattattgagttagtagggcttgaaataggtgacgtctgaagccaatcactatagtgtttctcactttcttgtgatattgtgagtttgtgacaaggatttattctttagattattaactaacaagttaataatttgggaaaacgctgccgcttaatattgcgttacttatattatgattgaagaactattatgggatatttcacgacatcatacatctacaaccactataaaatagaaaattagtgtactatcaccaaaaatatatttctcctgttccatgaaatttgatgttttagatttttttttgttccataaaaattgatttcttaggttaatattattattatttttattaatgactaatagagagaggaaagaagtagaaattatattattaaattaacaaaaaaataatataaataacataaaagttaattttcttaatttgggtgaaaaacccaaaacatcattcttttaggaacatagagaatatataatagacatttacaacttatacatttgttgataacatgcagtatgttagtttgaatacatatttttcacaacagtaataataacagttgttagaagactaaactacattgtaagaatcgctttctcttgtaatgatacaatataacatataacatttaaaataaaataaaaatctgtaggttttaaaatgttagctacgtagtccataacttcaaaaaaccaatggttttgaactcattccatagtgatgattgcaaatacatattatctggtttacaaaaaaaaaaaaaaagtgttccaattatctagaaatgttgggcctaatgcttaaacagtaagcccatatacttaaacatccgacttggcgcatttgcttcaccttctctaccaaaaaagcgcgtgagattcaggttcactgtatacattaagagcctattgtcttgtctcctgtaaaaccagaagaaaacaaaaattcaacaaaggataacaaggacgtggctattcttcattggctgcattcacaagagtcgaatattaattagtaatttcacagtatagtacattaagattaacgagacctattgtctcctgtaattgaggcaacaagataagggtaaaacgagaaaaacaaaagagaacaaagacgtggctatttatcattggttgaattcaatattaatttaattagtaatttcacagtgttctcaaatcgtgatcgtgtgtgtttcttctacctctgaaactctttttgtttatgttgatcatcatcatcgtcatctgcgtgtaaaacacactcacgccatcgttgacgtctcagatcttcacataaaagcttctattatcaaactctcttcctcacggtaaccctaactatctgtaatttatctctctacactttcttcatctcttaatcaccttaatcatcttaagctttgtatttctagatccttctcccaaaacaacgattcgtgatctccgttctcatagatcagtttcggatttggatatttcttagggatttgtgtgagatatttttagaattgtttcgatttagggatttgtgtgaagaagatggattttccagagaatttgccttcagatataggaagattagagcagattgtttctcatttcttcccaaaagcattacacatagttcttaattccagaatcccttcgttgcaatctcgtggtcgtactcgtgagcgtttatcaggtcttaacgttagaaaaagtgacaaatggtttaatcttgtgatgggagatcgtcctgctgcgttggagaaattgcattcttggcataggaatattctggattctatgattattgatatcattcttgtccatccgatttcaaacgataatttggatgatgatgatgatcatagtgattctgttgttagatcagctgagactgtgattgagcgttgggttgttcaatatgagaatcctttgattatgtctcctcagagttctgactctgcaacgcgttaccagaaggtttacaagaaatctatcattctgttgcggtctctttatgcacagactcggcttcttcctgcttatcgtgtctctaggcagctgagttcttctcttgcttcttctggttatgatttgatttacaaggtttcatctttcagtgacatattctctggtcctgtgacggaaacaatgaaagagtttcgttttgctcctgttgaagtgcctcctggtcgtctttgtgcatcggttacttaccgttctgacttatctgattttaatctcggtgctcatatcacattgcctccgaggattataactgattatgtgggaagtcctgcaacagatcctatgaggtttttcccttctccagggagaagtgttgaaggccattcctttactggtagagctggtcggcctccattgactggttcatctgcagaacgtccgcatagctggactagcggctttcacagacctccagctcaattcgcaacaccgaaccaatctttttcgccagctcagtctcatcagttgtcacctgggttacacgatttccactggtcacgtacagatgcttttggtgacaatcaccagctttcacctcccttttcaccatcgggttctccatctactccaagatacatatctgggggtaacagtccgcgcattaatgtgagaccagggactgctccagtgaccattccttcttcagccacgttaaatagatacgtttcatctaacttctctgagccaggtaggaatccacttcctcctttttcccccaaaagcacaagacgctccccttcatcgcaggactctttgcctgggattgcgttgtacaggagttctagaagcggagagtctccttctggattaatgaaccagtaccctactcaaaaggttatgcttcttacatcttatgtgtcttgctcaatgcaagaaaaatatcactatattttgtattgcctcatctgatattttgttgatttatttatatctactcttcagctgtcaaaggacagcaaatacgattcaggccgcttctcaggagttctgtcttcgagtgactcaccaagattcgcgttttctaggagccccagtagattatcttcccaagacgacttggatgaccctgattgttcatgcccttttgatttcgatgatgttgatgagtcaggacttcagtacaggttggctttatcccactacctaacttgaatcattcaaaggaaatattatatacttggattagtttacagaaatctttacacatagagctggtcaatgacaagatgccatgaagaaaacactaatgtgttggctgttttgtttaatgtgaaattgttggcattcacactctatacttggcctttctcttactgtttctttatcattttttggtctgtcaagttcacttcttcttgggttttttagtctttggtagtaagaaaatgacagatattttgcaattttttcgatgcagccatagtcttgaccggaggaaaacttcaagctctatatcgcagtcgctacctctagggagaagatcatcacaggacgcagcggttggtgttctggttcacatgctgaagacagcaccaccattacgacaagactcaagcacttatatggcgtcaatgtctggggttcagagagaaggttcagtgtcaggtacagaatctgaattttcgatggctcgtagcacatcagatgcactagaggaactgagaaactacaaacagctcaaagacttgcttctctccaaatccaaaagtgggtctggaccaactcgcgtccactgagccaaatcaaagagcgatcaagatatgagttatccgatggttgtttgtagatatgaatttgatgacgaatacttaactctgttgtatattgccaaagagcaatcacgttttggtttctgtaaaagaacttgcctttgaatatgcacataaaataaactaatcaaacttgaatcttttcattatgaagtagtgaaatttattgagggttttgttgttgttgacaaatcatgtgaaaaccttgttttctcatctggacctctttctagaagaaacatgaaatacacaaatgttgaaaaccggtcacctatactcttttaagatgagtgtgaaacgaagcaaagagtcacattgatagagagatcggatgcatgatagttcctactgtgataacaagctatttgggtataaggtcacaagatgtgcagcacaaaacgagagagagaagagttttaaacgcaatgcccatttagataaaaagtacaccaaaaacacacacacaaaagtcagcttcaaatagccatccacaataagcctttgcatctacacaaattcagcttgtgctaagctttctccaaatctttgcgtttgttttttacacaaaataaagctccaaagccttgcctgcctttacaaaaaaactgacccaaaaaatgtgtcgtccgtctcctgcacaactactgagaaagacaaaatcataagaccaccgcagataagaagagattttagtttcgagaaagtagctcttataagatattttacctcctctagatggtccaatgactctttctcagttctcacgcattctgtttttacactttgatcacaaagttacaatttctagcaggcttcagaagagatattcccagtcaatagcgtccctcgaaacccttcttcgatatcttgagcccccggtttcttttcacataactcatctgttaagacataagatgaatagttttacatggacatctcgctaaccagacagcagaataatggtaaatttggttaccagcaatatcgcggtgttcatgcatctctgtatctctcacccaaagcctgtcgccggggaatatgttcatgtctgcaagggttgcagattcctgatcaatcacttttgagcctttgtggagttcctggttttccttcatcacctgcatattttattgaaaccccgttttgttgtgtttcttcaagttatctacagaaacgaaaaaaacactatgtctaaaagaatcttaccccaagtaattcccatatcatcatctttaattggtatacagtcgttgtcgcagacactttcaggcttgtcaggtttccataatttgttctccgagatcgctttgaagtacgccgatccacctcaaagctagagtcagatgcctctaacattgcttttggagcttcctttccacgcacaaaacagacaaatacatctccctcagagtaactaagtttctgcatcaactcacagctttctctctctcctatgcattcctcgcaaatctagcgaaaataaaagatcctgttaaatgcaactctagtcatgaagtcatacaataataaatgtgaatgcaaatgatcacacttgcttttaagaaaaagaaaaacagtataccgtaacgcatctgaacttcatatatggaccaatgtgaaatactaagccaacattgccattcaatattacatcacactctcaaaatgttgaccaaaaaaaaaggctcaagataataatgcaaatacctctggggatgccctgagaataagctgttgagcatcaacgtccatattatcatccggagaagaatccttctcaaggtcaatgacgtctggggatgaactttggtctgtattgccaacctcaataaaagcagatattccattctccatgagccctccccactcgtcacagaaatatttccaatcaagctcagggatgattgttagcttgtctgtctagaaaaaggtgcaagagtactagagattagatcaaaatcagaattccccaagtctgcgtttgacgctataaacagccaacacgagagaggatgtaaactgaatccgacaatcacgataccaatttgttaaattcagaacatgattccctttatttctcactgaaagaaaatcacaccacagaaccacggaaccatactatcagacaccttacttccaagctctaaaaccagtctcaaaacacacagacacctccccacacttgattaatctcttatttataatatccttacttctacagaaataagttatttatgttcatatgaaaaatatttgttgaagcctctctatgttgtgatgaacacttatcaattttccattcagatattggctttactgtatcaaacagtttaaaaatagattaggaatcatctcacggtatatatgatgcacttacagatggatttttctgaaaatacgagccacgtctgcagacaagttcagggagcctttcaaggagtcgtgtatgctgaaacaaacaaccataggaacaaaccattagttttatgctcatagtggggggatgaaatgaggcctgctgaaataagacaggtcataccacccgcgtttactaacatatattgaaatatttctatgagaggaaatagagaaagtggtcagggacactgatttagaattaatcacttctgtccacatagagctttacccccacaatatctaactgccagtaaattggaaaccgactcactgccgagcaacagatcttacctttttgcatttgagagtattaatgactccatcaagacgttcaggctctggtgctgaagaactattttttccagtcatgttaatatagattctccattgcactagccacggagaaggcaacaagaaatatcggctttgtggcgttaatggtataccctttcccgtggctaacttctcgtgattttggcgctgcttgaccttcaatgttctgttgcataaaatagaaggtaagaaaatctttaagagtataacgaccaacaaaaaaaataactaatcatggctaaccttagtgaatcctcgaagcatgcaacctcagaaagtacctctgtgcaatgacaacattggctggagtccacaggaaaacaagtacaatccaaagtatcttctgacatcacttttagagcatcttcaaaaaggaatgaccagaaattctctggaactacaactcttttggcccctggtgcttgctctggcatcagctcaccatgattgcacgtaatagcatttgtgggccccgcatctgcttcagtaggagcatcaagatttttcctttttatccattgctgtaacctggaaacatgctattacgttttagaagcagctaattgtggaaacaccccacaaaataatagtaattaagtgctccataaaataaagcgccatctgcatatgcatcaaacttacaaaagacttgaacacataccatgctctagagatataatacattccgtcctcgcactttcccgaaagaacatcatttgctatgcttttcatgaatgttcttcgatccctataactgtcagaagacacaaccatgcgagcaccatccataaggcagtccctgcagtagtcccctttccctaactttggtccgccattgaactaaacatacgagaaaattattccatcagaaataataacatagcataagaaaaatgttgatagtcgaacagaagtctgtctactggaatctagaaactataattttttctgacaaatagttaatgatggcagctgatgcaaacttgaaatcaataaagtttccgccccgaaaaaggaaagaaactaacacatgagctacacaaagtacattgcatacctttgattctaacttgatccatgcaagttcagatatccgcttcatgcaattcacttttgaggcatgaactttcccatgggaacacagtaaaggggtgttgtccaaagcgctacaccatacaagaacaaatataatcaagaacacttgaaagatgtaatctgatttgctaaacagaaaatcatatttaccactaccagttagagctggaaactgaaataaaatataaattttcaaagggaaacaatatttagaagtttggtgtggggtacaaagtcgccatcatattctgataaattatagacgatgcatttgaatgatatgatattctgttgcagattttaatgcatcctatgttgaaagcagtgcagtatgtagagaataacaacaaatgcatgtatgaggagctttacttacggaggtaaagtggtatcagcccatagacgaagccaatctgtggagatccaaaaatattgttcttcaagtgactgaacagcagcttctgaaaggattgtccgtacttcttgcctcctttcagtcaaagcattcaattctttttcctttcttaaattatattgcttgcaactctcaaggaatactgcattcatgttattgatccattcagaaagatgttttggaagataaccacctttaagctgtttaacttctcctttagtaatgtcaataggattttctttttgtccttcctgattttcctgtttatcgcatctaagactatacatcagcatataagcatcactggatgagaaaacctctgacttaatagcagacctacagtctgaagagcctgattgaatgccatctgtgatattcccactactagccgtaccattactctcagattgtggagttgaagaagaagcttcattacatggacgtttacccagttctgacacatgttcatcatcaaattcccaccacaagccagtcttttcatcttttatgtgagcaacataatgtccgctgttaacagcgcttcctttgtggattaacacagcagagagatcgtatgtcaatttgttttgagaagactctgccaatctcgatcccatatccagcacttgaggaaaggaaaatgatgaggtgattttcttcttcgccgttgtctattgacatgatcaagccaaagaaaaggaaaaatttatgcaactttaacaaggtcttatctaagattaaattggacagtagaaatgattagatttcagcatcaaaacatgcaagtttgtatcaggagaaggagggaaaagatatgagaatgaccatgagtaaaaagtatagtctatgagaatgaccatgagtaaaaagttgataactcaatcagccaaagatagcatacaagaaaatcgcctcagcacgtgtaacacacaaagatagacaaaaggtatagatgcttcctgttgaaaaaaaagtatgcaggagatgattggatttttatgcaaatcacaagaaactgactagtaaaacaatggagatcattattctcttgtttcatgaaccgcagcatcagcatattaagatcgaggaaactaccttaggaaggaaaatgcatcgtttgagctgaaaagtgataaccggaggtagtgtgcgcagcttaatgcagcgtgtggcatctactctagcattgcagcttccacaaaaatattgattatcgccattaagctgctccaagctaaggtaatcattcaaactagcatccaacgatttgaggcccttaacattcaactcaagggcataaaaatcctccatctttgacgaagcttcggaatccctcccacattttgagcacctacaagacaataaacaaaatcaacagatgaccatgacaccaaaagaacagatatgatttgtcatttcatgattcatcacatttgcacattagtaactcagatgtgccttaaagccatttaaatcttcttgaataaaaaataatctcaatcttacgtggtgacatgcgagacactaccactgaagagatcttgaactattgttttggctttgactccagaatggagtaagcaacgctcaagcaaggaaagaagcaatgtcaagaactcatgggtatcctgttgaaccccattatccaactccaacgtcttgacaaaagcatcagaatcaacaaaggacttttggctagcatgcaactgtgcaaaaagccgagcaatctgatccaagactggattctgcttcaagacatgaacctcaacagaaaaaactccttctcggaaagcagtattcatgtacaaacactgaagtatactgttggcataacaagtagcacccaaattagtcagaccagcgggtgtagattcagaatcacgacggtccaaggtcggatctggaccaagagactgaataatctccgacgttttctgccacaaaccagatttccggcttccattaagcggtggaaccaagccacaaaagcagttaggattgtcacgagtgtttacacgacaaccttgacaaactggcttccaaatcatgaaaagttggttaatgtcatcatcagttacatcattagcctcgtgaattttcctgcaaaaagaacacattttttaaacaaaaagatgctagctttgtgaaaagctaatattcaagaaggtgggtttttgtttatcgtaccggagaatctgagaagaagaatcaacagcgtctggtctttgtctcttgtttttgtttcgggtgttaggtctactcattgtgtcaccaccaccagaaatttccccagtaacaatcgaaaaccctagaaataacgaaaacacagcaacattgttaacacaattttgattccgattaacgaaaatatttggaacaagaacaagaaattatcaagaaaaaaaaaacctaatcgaaaatgccaactcaaggagatgaaatcgaatctagggttaaacaattcagcatcgaaacccagatcgagaaaggaacagtgataaaattaccgaagaaattacaacaaaacggagaataaaaaagagagaaagagcgaagaagagagaaagtacctgagagaatctacaaagaaaagtttagcaagtagagagagcttcacaagctcaaacttctccgtcttcttcttttactccttcgtcttcttcttctccacagcgaaatcttttttttttttccttgttaattctatttcacctttttttttgccctttgttctctcgtcccgcgctctcttatttcagattatataaaacatcttaagaaaaaaattgaaaatcatcaactaactaagattttattacagttttcgtagatttatatccattttcatgagatttcataccaataaaacccataaagctaattttagatttatgcattaaaatgtcccaataaactcgaattgataaaattcaccagaatgagccaggtgttgtgagatttggctacaatctatgagacaacatttgaccttaattaagtctaaaacatcgtttgcaagtagtaaaaaaaacaaggattatgtttgtgacaaacacgacaaaacatttaagaaactttaaacagacaaagatgaaacaggaatcatcaaccatgcgaggatctcttgccacttgatcggctatcatcataacgacttcgacccctgcttgagtattcacgctctctgcttactctatcatcatcatcatcttccttacccgttgctcgtcttccatcacctctgtacctgtctctcccatgcttatactcttcctcatcatccttcacactttctcgtctcggtctgtatctacccctatcatcatctccttcttcctcaatggctcgacctctatacctatcgtcgtcttccttaattgttccatatcttttaacagcatcatcacctctatatctgtccctcccatggttatcgttgtcctcatcctcctctcttttgtgtttacgtcctcgttggtaactttcattctttagcttcttcctattttcatactcagcctcactgtcatcagagtctctagcaacttccttgccacgagaatcacttctatacttgtccttgccatgtttggtcacatcttcttcctcttttcttttctggctcattcctgcactgtaaacttctaccttactgcgcagttgtttcttgttctgatactcaatctcactgtcatcagagtctcttgcagctttcttgtcatctctagtatatctgtctttcaaatgatcagcctccacgtcttcatcatctcttttctgcttctgtcctccacggtaagcttcttctttctttcgcagtggttgtttattatcctccgattcaggctcgctaacatcagaatcatgcctctttcgtccagctcggctttgttcatcatgtttgtcccttaattctttggaaccagatcggttggaggggaggctctttttgtgtgacttcctaagtttcttgctatcatcactctcaacttcttcagattcagaagagacacttcttttccttctgctgcgtttctttgtagtctttgtaggcttcttccttcctctcttctttccatcatcactgtcagagtcagattcagaatccgagctgctagagtcactttcactttcttgtttacgccccttagccttcttcttagagcgccttctacggtcacgaccatgctcatcagattcagatgaatcatcatgtcttctcttcttgctctcttttttcttatgacgcttcactacatccacatcatcatcatcaccacctcgctgcttcttgctttcctttaccttagcatctttctcatccacatcctcatctaccttcttcctcccactatctctgtccaaaaaagaatgttcccgcctctctttcaatctaccttcaaaaccctccctcatcggctcatcatcaataataccctcctcagccacctgttgctgatcaggcaaacccaacgcagctcgaaacgcttccatctgcttctctttcctagcagcaacctgatgagtctgagtattagaaaccttcgaatcactctcttcttcattagcagcagcagcagcttcaagactcactctagcttcctcaagcttctgagcaatctcaatatcagaataaccctgatcagcaagcttatcctcaagaatagcaagcttaagatgaatctgacgtttacggtcatgctcaaggatagctttattgggtttcttagataaaccagcagtaccttcatcatcctcaaaacctttcccacctttaacaggcttaccaccatttctaggtctcacaaaaaacttattcgtctgaacataaccattagttcctgatcctcttgctgtctgtaaccctattccgttgtacatctttcaactctaatttaccaaccctgaatcgaaaaaaaagcgaagagattgggtttcagattcaaatcgaaagatctgtcgatacaaagaaaccctaaacgaaaccaaatcacagtatgaaaccaaacagaaactaaaagcaacagatcttagattgaagtggaaaacaaggaaaaccaaaattaccagtgtcgtcgtgtttgagagaagatgagagaatcgtcgatgcgtacggactctcagaggagacgacgatgcggaagatagaaccaacggaagaggagtaacaattttttccccacaacaatgtctgtctataagtattatatgggcttaggcccaatatggttttatgttggtcaaaggcccaatatggttaagcggctatttaattttattcttgagaacttgttggcaacaaaaagggtttggtactattaaaactctgatgttctcttggtttttgaacagaacaatgttcttcttctctgcacaaagaacaatctcgagtgttagttatctcatcaagatgttctatactgaggcaaattaggtgaagtagggaatctcagtaaattttgcagcacttgatagttatctccatatctgtttcatcacagtggtgtgtgtaacaaatgaaaatgtttcaagtcccatactgaatctaaacacgtgttaacatcaaagtctagaactaaagattatattacatgccaaacaaacaaaaacatgtcttggcaacaaattttgtcctgattttgattttataagcacattttgaggaattcaccaaaaacacttgcacaattggatcaattccatcacaccagattaaactttgtactagattaaagaagaaatcatatgtagtaactaaagtagagtaaacaagagagaaagagcaagttaactaccaataataaagtgtaagatcacatgcaatcgtaggaaaaccttaagtttacttgcaagaaattactactactaaaaccaaaagaaaagaagaagttactatactactatagtctatagaccaaaaacctctactctgccaatggaaaacttgataaaatcaagtttaaatgttccaagtagaaatgaaacatatcagattcagagttaaaaggaaagagctactctttctcaagggcaaaacagaggactccaccacacctgaaagtccaaagactaatattgtcgttggctttgagcttgttacccgagacgacaccattccacccccgattcaaagtgtagtacaaggttccatttccagattttttcttcttcatcacccatatcagaaaacgtaaactccattctttagagaattgattcacgataatcgttttcacaccaattttcttggtgtcttcttcttcttcttctttatctatggctatggctcgagactcctcaggagtcaagaagtcgtttctgagtaacttattgaaaggtattaagagacgactctcgcttggcttgacgtcagttgcggtcaaagtcttctcgtagatcagtttgatcggtccttcggctcccttcatctttctcatcacatctaaaagccactctggcgtctctctcgccgcagtcagtgagaaaggatcaaactttggtttcttggatttaccactactttgatacctcttgcgttttgtgttctccattagacacgaagacggtgaagattgggaattacggattgtagggcttttagtctccgtcctctcaaactcatccgtgttgaagagcgatgaagaagtagaaacgttattatggtttcgtcgcgtgtatactctagtaaaaaaacactcaagggaagaccttggtttttgtgggagatgatccaagtgatgatccaagtggctcttttcactaccctcaaaaagagtgttggtttttgtaggagatgatccaagagtacgacgttcctcttgatcacataacctacccacgagatccaccaaaatactgaatctcgtcttcttttcttcttcttcttctgagacactcttgcggtctttggatattccttctctttcatatagcatatcagctttatccgccaaatcacttaaacgtgaccacatatccttccccgcagcatcgagatgatcatgatgatttctattcattgtgatcgaacagaaaactcaagagggagaggaaaaagtaattaaacgaaagagctcataaatgtagttaggagctccatttacattatggttttttgtttttcttataactaacttaatttgtgtaaagttaataacttttgaagataatcatagatatataatctcataatatctatccaaataaacttatttatacaccgttacttcaacagaaaccctaaacgaaactgatcccaacataaatgataaaaccaaacaaaaaaaaacgaaacaagaacatatctcagatttaaaaccaagtgtgagaatcgtcaatgagcttaggcccaatacagttaaagatcttttaaattatttcagggccatcaaatttgattttaaccttagacagtacgaccagtatcgagttaatatcagaagaacaaagtcaattatatccaagctaacaagtaacaattgtggttctgataaacgcacgagacaattatgaatggtggattaatagttgggtaattttatccactaaatgttctgtaatggacttctcaaattaggttccaaattatgtattgggcttcgaacaaattttgggccatatgggtttcagtattgactttactctctttttctttttctttgtgttaagtgtgttggatcactcgacctcgtagaacaagcactggaccataccaataccatacttgcaagatgcaacaacaagcaccaatgttgactttcatctactgaaataatgtatactggttgccaaaatatatatggagaagaaacttgaatattgaatttagttcaatcaaataataatcagtatatattaataaaaataagagatgaactttgacccttttccaagtgtatacaagaaaattctctcatgttgttttactttgactacttcaatcaaaatatcttcttattttgaagccattgaaaaattcaagtggaactctgctaactaattagcctgaactcgaatcaagaagaattttccttattctatcttcaattgcttttagccttttaattgattttttaagtatcaaaaaggtaatgcaaatcaaacttaatgagacaaatcatctttatttttatccaattttaacaaaaactttttttttgttaacgtgacaaaaactattctttttaaacccgtaaagccctcaaacatgcatccacaacaacatcaaacttgaaacaaaatcaaactggtatgattcgcgagcatgcactatatagtccttaacttccccgtgaattacaattagaatttccttagcaagacgatttattatttactaaaaaaaaatctgatatatatctgacaagcagggccggctcaaggggtgtgtaagtggagtatttgctcagggtccaaaattttttagactgaaattaagggccaatttgaaaaaattgattagatttaaggtcccaaaaaataaatttgattaaattagagggccaaaaaaaattttgcttaatttgtgggccaaaaaaatattttagtacgtggactcaaatatcaagatcagggccggctgatggggtgtgcaagtggagcatttgctcagggtccaatttttttttaactgaaattaagggctaaaatgaaaaagttattagatttaaggcctaacaaataaatttgattaaattagagggccaaaaaataattttgattaatttgtgggtcaaaaaaatattttagtacaagactcaaatatcattgagccggccctgctgacaagtgaattggatccgagaccttagggtgggccgggctatgtagtggcaaactaacgccggcggccgtcttgttggaatttgtcttagctaccagcgtgtcattcttactgttgttggagctaggtgccgtctacttttgttgcttttgatgtttgttgactaattaactaacgaacttatttagtgaattgagtttatgcgttttcttttttccgcaatgatctgataagaataaacaatgccacaaacataactagataatgctcaaactcttatcaagggatttggatcactcactttttaatttatttatcattatcctccaaactaacttacacgtgatgataaacatttgtataatctttggtaattactttttatctaaaatgcgaataaacttttaaaaatgtattcaacaaaccaatcacaaagcattaaagctactaagaaattactaattttattttaaaaagttataaaaccgaataataacgatcactacagtttatttgagtgacaaaaatatatgtctgataacagatcactctatgatttcccacgtgggctgctccgtttggcctttagaaatcctaagggacaatttttaatgtgtatttatacaaatgagataaccatttatggtaatatatcatcgcaaagtagtctttacgtacgtaagagcaaagcgtttctatcatttccttaatattgaaatggtgacagacttcaaatccctactaccagttatcggtacgtaagaaaccgtatattcattattttcagcaaaaatcttcactaactaaactagttaatgtgataatgttgttgcagacatcagtcctttactggccaaatgtgatgatttcgacatggctgaggatgcgggggttgtggaagtagtcggaaaactggacagggcatgtcgggacgtcggattcttctacgtggtaacaaattttcgaaatttgagtttcttttttaggggttttataataaagatgtctgattatggttggtgagtgtggatcagattggtcatggaatatcggatgatcttataaataaggtgaaagagatgacgcatcagttcttcgagcttccttacgaggagaaacttaagatcaagattactccaactgctggatacaggtttgtttccatatatatcaaaatatgaaccaaagtgggtaacctgctatatcaacgatcgttgcaattttgttcaatgtccacctttttccaaacacaataatcaatttggataaatgaacggagaaaaagacttctaacactaatatgtgttaattaaactggtttttattatcttaaaatatcttgaaaaacaaacatttgttgattagtttttacattcctgaatttctaatttccagagaacacaaaccgaataaatacgaattgaacacgccttagaaaacaaaaagtatatcttataatcgaatcactcatgggcgttgtgttacatatatgtacagaggataccaaagaattggagtaaattttacgagtgggaaacaagatatgcacgaagccattgatgtaagtttgtctaactagccattggtgtgagtgatgcatgcattcgatcgaagtagtaattctaatttctaactagctgatatggttgtaatctctctcttatggaccgcgacgaatacagtgttacagagagttcaagcaagggaaacatggggacatcggaaaggtcttggaagggccaaaccagtggtaagagtttgattgattgttttcttttgcatctaagtttgtgttaaaaaaatattataacgaaagggcgacaagataaataaagtgtgtagatgcacatatatgaataagaatagtgaaacgatcgatagtagaatgatatatattaactgaatagaggctaaccaaagtaatcataaaacatttaaaactaattttaatagattaatgacgttttaatttttgtaaatatatatatatatatatatatatatatatatctttgaataacccataataaatgacgaaatcatttatctctttgactatttatctctttgtgtattttttgctacctcttttttgaaggccaggaaatcctcaagagtacaaagatttaatggagaagtatattaagctgtgcacaggtgtgtttttaccccttttttgtttatcagtaaaatttataagtttctaatttcatttcattgtctttctttcttttagatctttctagaaatatcttaaggggaatctcattagcccttggtggatcaccttatgagtttgagggaaagatgcttagagaccctttttgggtaatgcgtatcattggttatccaggtgtaaaccaagaaaatgttattggatggtaatcttttactaccaccacttttcatttcaactttattatcaagattcatttgtagtgacttactctgcgtcttctctttttcacttgcagtggagctcacactgactatggtacgtaagcctgaactcgaatcaagttcactctcttcatagttgttgtttttttttggtctcaaacgggttatttcacaggcttgttgacgcttataaatcaagatgatgataaaactgctcttcaggtatctatcattgggcttatttgctatagccaaattttgttattcttttcaaaattggtaaaaaaggctaaatcgtaaataagatgtgatatgacatgaaatatgatgttgtgaaaaataacactatgtttggtaacatcatgatgtgtaatatatatatccaccttgtaataaaaaaataaaagcgatcgataaattaatcagtttatttcgattttgtcatcatgttgtaattgcaaataaaagatataatttgcctgtttagttcacatcctctacactcttattataaaccatatatcattttgtgtttgaaaaatggttataaagttttctttttgtttgcaacttctaaaaggtgaaaaacgtggacggtgattggataccagctattccgatccctggatcatttatctgcaacatcggtgacatgttaacggtttgtttcttcttctatctccctctccctctttgatctctctttcttttgttttgacaattcttgaaaacattggggaaacatatatgcagatactatcaaacggagtttaccaatccacactacataaagtaatcaataactctcctaaataccgtgtatgtgttgcatttttctacgaggtactaaaaacttgtaatactctttgtattctcctcttttggatttggattcatgtttatctttaatatatatcttgaatgaacagactaacttcgaggcggaggtagagccacttgatatctttaaagagaagcatccacgaaaagaaacatctcaagttgccaaaagagtcgtctatggacagcatctgattaacaaagtcctgacaacctttgcaaatttagtggaaaacagttaatatggttgatgggctttggatggtaattgttttacctaagcatggatttcgagttttagtaaaataaaagaagttctaggcgacaataaaaataaatgaagaagaaattgtaatttggtttctaatattaataaaactacaggtttgtttaccaatcggctagttttagtaatttgagtaaaaaacgatgagattcctctaggtagcttcctctctcacctagctagtgtttcgtcgctggttttggagttaaataatcattgacattgatgttctttaattaagagtaccattttgaagttcgaggtttaagaaaccacattctatctcaagaaataaatcagtgaaaacatataagttaccatgcatatcatatttaagatgtaatctagtaaccataaattagaattttaaactttgaaaaaataacacatattctagttatttgttaaatgccgttttgtatgatgatgagttgaattttaaccgtattcttctcacgtaatgaagaaaacaaccaacggatatatttttaccttacatgcactcatcaatctcaaacaaatgcttgagtgatgtttggatacaaaacaattcctaccgtacccaatggattggattaccaattaagttgcacgtgataaaagatgatacaagatgattcgtccaatatatcttaagtaattgtttttatctaaaaatgtattgacttaaaacattattcatcaaactaattataaagcaactaaaaagtttcaagaaaatatctacataacacaatgacacgctatttctacattatccctgctaaaatcatctactattatttacattttttgccactatattttctttctaattttgagtttggatttgactagctacctaattagtcctagaaaagaaataaaaatcacacatgcgatcacacatgggccggtccgtttggcatttatgggtattgaaaactagttgcacacttgcactataggaaattatataaccattttatgataaaatatttcattccaaagagtttttgactttatatatttgttagagcaaatcgtttcccgtcattgtccaagtatctgaaatggcgacaaacttcaaatccctattaccagttatcggtacggatgaaaccctaaattcattattttcagcaaatgtcgcactcatcatcaaagttttcatattaaatctcaaggaaactaaaatgcatgagacaatggtttttgtagacatcagtcctttagtggtcaaatgtgatgatgccaacatggcggaggatgccggcgtggcggaggttgtgggaaagctggacagggcctgtcgggacgcaggattcttctacgtagtaagttaaaaacactttcgataatggagttctatttgtttggattttgttaaagggtttgattttggtcggtgattgttgagcagattggtcatggaatatcggaggattttataaggaaggtgagagtgatgtcgcatcaattcttcgagcttccttatgaagagaaacttaagatcaagattactccagctgctggatacaggtttattccactgatctcaaaatgtgcaccaaatttggtatcacgattagttagattagatggctactatattatatataattttgttcttaacgaaagaaataaatataaaatcgtcaacttacatatattatttagaagtcaatggttaaatatctacttcaacgtattcctcatcggaattcgattccaacaccttgtaaaaagggtcaatggcacgtaaaaatagttcttaattaatatctatattactaattttttagtattattttaattgaaattttcgtggaactcaaatcaaaccaaaccaaatatataaaaatataaaaaagtgatgttccattcgggtaaaaaacgaagattattcatggatgttgagttatacagaggatatcagagaatcggactaaacttaacgaatgggaaacaagatatgcacgaagccattgatgtaagtgtcctatttgcttgagtgatgtttccaagtagtgattataactaactgatatggttttattctcttatagtgttacaaagagtttaagcaagggaagcatggggacattggaaaggttatggaaggggcaaaccagtggtaagagtttgagtaaaaatatcaaaaagaaagggacaaatgagatttcaccttcatactatttctctcttaaatttttggttttgttttgttttttgtggtgaatttccattgaaggccagagaatcctcaagaatacaaagagttgatggaggagtatattaagctctgcataggtgatttaccctttttacatttcttttatatgttttgttgaaccaagagggtaaatattaagttcttaatcttatttcatgcatgatcttaattttacagatctttctagaaatatcttaaggggaatctcattagcccttggtggatcaccttatgagtttgagggaaagatgcttacagatccgttttggataatgcgtattcttggttatccaggtgtaaaccaagaaaatgttatcggatggtaagtttttttctcattcacattttactacgacgaacttttatttcactttagcagtgaagtaactcgtctcatctttttcacttacagtggagctcacactgactatggtaagtaagcttgaactcaaatcaagttgataatattcataagtttttattttactcaagaccaaccataactttgcaggcttgttgtcacttataaatcaagatgatgacaaaactgctcttcaggtattattggtcttatttggtagctaatatttttgtcaaaactactaaacaacacatcgtggaaaacccgtaattaagctaagctatatgaagagcctaatgggtattgtcgtgaaaaacagggtaattgttaaaacttgcgagacatacaagttatagataaaatgaactaacataactacgattttgccatccctcatttttgcaaatataagaggatattatttgcctatctagtgcatattctctctattattactatgatcatttttataatttttatgcttatatttgaaaaggtgagagacttggccggcgattggataccagttattccgatccctggatcatttgtctgcaacatcggtgacatgctaaaggtttgtttcgtctcacactttctgatctttcttacatttcaactagtccttaaaatgttttttgagtcatatacgcagattctttctaacggagtttacgaatccacacttcatagagtgatcaataactctccccgataccgtgtttgcgtcggattcttttacgaggtactaaatttgtaacattctttgtctgttttcctcattcggctttggaatcatgttttcaattatcttgttcagacgaacttcgacgcagcggtggagccgttggatatcttcaaagagaagtacccaggaaaaggaacatcccaagttttcaaaagagttgtctatggggagcatctggttcacaaactccagaccacttttcaaaatttagtggaacacagttaatgttaatggtttggatggtcattgaaatgaaaaaaatgaaatatcaaattgtaatttgatttctatactacaataaagaattctacagtttgtttaccaatcggctagttttagtaatttactcatttgagtaaaaacaatgggatgcctctatatataaaaatcaatagagattacaaaatgatataaatgaaaatgcaaagtgttggcattttctttcagtatcataaaacatggtttaagttatgtgtcagtggaccaatgttcttcactgtccaaaagtaatcttctaaatcgtaaagccgcctgaaatattcacacccaacaacacaacaatattaaacttgaaagttgaaagttgaaaccaaaccaaattggttgagactcgagggtcgagccactatagttcttaagatcccagtggatttacagttttagttaagttatatcagattcgttctctagtaaaacccatttggagtttgtgttattagtataaagcaaggtaaagtaagaagttaacttacgctaaatcttctaaagtgtctgctttgttgatagacttcccttccggtagttcaagacaagaatgatgcgctatcatctcctttatcgtgtatttcgtgctcttaacatcgttattccacaagatgctctgttacacaataccccaaacctgaaaattaaatcttatccagggaaattatcttttactcttgaaagggttttcgtttttacctttctaaggtatttctttttcacatcttcccagtgtgattttccttttggagagaaaattgaagcattccacatagctcctcttgcaaccataactgatgcagcgcctttatgggaaccaaaaaaaacagcaaacagtaaagggttatataaatcagaggtgaatcaagtataaacattagcacatggcagataaaaaatgttgtagggctatatttgcaagtctcatgaatctgaattcaataagtgtatcatgtgtacctgttgcggttttaatgcgagaaaaatcatcatattctaaaacatcgccatttgcaatgacgggaatggataatgctgccaccacatctgcaatctcatcccatttagcaggatctcttggcctgtctgcaattttcctgtattttaaggaaggaggaatcaattaccaactttgattaaaacagcttaaaggaatgagaacaaactaacaacagtggtgtatattacctcccatgtacagcaagagctggtacaccaagtttctcgattctcctagccaattcaacagtatctgctggtgattttaatagacgaatcttgcaagtaaccggtacgtctaagttcctcttaagtgttgccaaaatctgggatggagaagataccatatgaggtgaacaattaaaatagatcagtaagaaacaaacatataactaagaattcacagagtcatacatcatgaattagctcgggtttacttaacaaagcagcacccattccaccttggatagagaatgccttggggcaacccatattaatatcaatagttgcaacgtcattacacctaatgatgacagaaagaaattcagtttcaaattttgtaaaacacaagtaacgttgactcttttcaacctcagttaaaaaaaagatgactaaacttacacaatctcagaagcctttagagccctaacagcatcagaagttcccatctgaaaaacaaccctacttttttcttcatcacatgtgctaaagactacattatctgttcctttctccacaaactcagatgtcccagaagcaactgtagagggagaactacaataagaatttgagaatcaggaagaaccacagaaagaagcctatatgattcataaagataagcaggggaacaccaaagaaaatatcttgtttaagtctctccgtagcaaaatctattaatgtctaccaaagagatgcactaatggagccaggttccactatagagctaaagtcattacaaacagtccatattgactgtagacagaacaatcatatcgagcgagctatacacagaatttaccatttcaaaggagacttcaattagttacaagtgagaccccaatatggcaccatatcaaaacctagatagttctttgcatatatcttaaacaatgttggttcaatgcttagttctaaacgattaaacacagtagtttggatcaatctcatctttcacttcaaacaataagagaaactaagttagctagcagaatctgagaaccaaatgaataattcaaaaaatcacattaacaccataaggaagattacaaaaaagtgtttaccattgagtcggcgttcgcatttaacaagcttatgatcaataatctcttcaccgtatgtgatatcggcgccgtattccgccgccaacatcctgaaagagagcgttccctaaacaacagaacacctcccggaataagcaaagccgaaagcgagaacaaagaaactaggaactagtttcacgatttcgacttaccacacgaaccatgggagcaagaacaagcttgttctgataatccatcttcgtcttcttcttcttcgtggcaccgtcaaacgtagccacgaaaaattcgaagacgccgctgctagatctgcgcacaaatttgttttgtttttgcttcaggaaaaaaaaaaactttcagatgggcttcttagtaaatgggccgaattaggcccattatagtggcttctgtcatgatttatgcttatgtactaagtaagaactcgtaatctcattgtaattatgatatttttttttagcttaacactcgtttccttatgagataaaaactaatggaaatacactttttatcaaacaaaattggatgaaaatagtatttttagtatatccatttccatgctctgttcacaatctcatcttctacaaacgggcgcaatgaccacatcagactgtaagtctctagctcaccagatgatgacttcaaactaagcgatctcacaatcttatcctgcaaagacagtatccatttctcttcagtaagttttgagttttaaagaatcaaacatgaagagaagggctttcaaattccacacctgcataacatagttctgcttcatcatactgtaaataactgcaataagtgcagcgtactctgtaacttcaggtccttgaggtaattgtacagtctcgttctcctaaaacaaacacatccatactacattactcttctctgaaaccgtttttcaagttagtttacccgagaacaaaattctgttgacatcttacctcatcacatgttacttgttgcaatccatcacttgagtctttatctagctgtgtggcagactcaattgcaagggcggcctcatcagtgagacgttccagctcaatcaacaagtttttggctgcaacattcacatcttacaaggttcaaaaggtacaattgcttatagaagaaaccgaaaatatgataatgtgggatgagtgatgaaatgaaacagtagctaatacattacctttgattaggtggtcagaaagtcctgatagagatgtatgcacttcttattccggtattttttgttttcagataagaaacggaagaccaagtcgggaagacgaagaagaagagcaagaaaaaaaaggagcaacatgttaagcagaagagaagaagaatgttcctaaaacatgaaacttttcacataacttttaagccaagagctgatcagtaacttacaagctcttgtgctttgtgcagcatcatggatattaatacatcctgcctcgatatatgatttaagccgccttgtttcattcttcttgataatgttctcaatcaacttggacgaagtaactattggagggcgttgaagaaaacctgaaagtagtaatttcataagaaacaatgtcaacctgcaatcgaaagtagtgaaggtttatgcaaagtgaacgtacttagtccttgctgaaaccgtagaagaaagttgtttgcagcattccctagttcttcaagctgcgtgattctataatcattacaaaaattcaagattcagagggactcaatgtgaacatacttgaaagtagttataacagaatcaaaagcaaaacaataaatttacactgtcataaagtctttgaaaatctcggaaattttcttcttcagttctattctcgtttccatgtcctcgtctttcagtctaaaagaacacaagtaacattgtttcaagtaaacaagtatttgcatgcccaagtatcgatttttcagtgggaaatcaaaacaggagcttcgatgatccaataaggcaacgatctacttatactaataagtaatcggaactaatcacaaccaatcatcagacttttgagaaccagtcgaccatgataagagaagggagagagagagagagaaatcaaaaaccagggttcgatttttcaaggagatcacgagagacgtacgtagtggtgaaaaattacgtcggctaagcacggagaaagctgagtgggcgccggagaaggtcgatcacggcggtgcagacggcggagagaacagaaggtcgagagatatcgtcttagggctttttttttttttttttttgggcaaagatcgtcttagggctttagcttcaaactcaatttggagatttttaagtttttgacgttttgcgaaactctacttcttcttttttgttttttcagaaactactctttttatttcccctctggcctctgctgtgacgttattgaaacaaaaatggttcggtgaaaacaaagctgaagatttgttgagctttttttttggttcaccacggaacaattgtcttcttactttttaccaacctctttcccatatatatacacacatcaatcgtatcagaaagaaatcaatacagtggaaatagctgtacaaacacaaacaaaaaatcgagtcatgtgagagtgagactgagtgtgaggcgtttaaaaaactgtgcctcaactgactcgaaaattcgaacccatgttttggtctcatgtcattggtgttggcgttgagtattgtttcctttactgtgacctttagtgcctcctcctctgtacaactttgtgtgactgttctgtccatatgaagagttcttgacgcctttggttcctgagagtgggctcgttccaaacactcgttgttggtttctcgcacctttagttgaaactgcagcgggggcgagtggagtgttgtatgaaccgtttctcacagtcacggcacgaggacttccatagaaaggttgcacggacggggtggtggccccgttgatgagtcccactcgcggactactataaggactcgttgtgttgagcaacatttcctggttaatcagattttgcaatcagaacaaaaaaatgttgttttactagccaaacaagtgaggttgagagtaactgaaacaacatcttaggtacgtttaacttgaaagaagcaatggagctgttttgatacgtaccctttgaggagtctggtaaaaagtaggacctgaggccatccgaggagaagaattgttcacagtttgtggatatgagactcggcgatgattgcctcctgtgtcaatccgtgaagctggtctgctgccaccaacccaaccatcgtggcttttcctaagattgacaaatgctggtggctcctgtctcatgaagtagtaagagctgtggtgttcttctctgcataaagtaggagttggagcccattgttgtcctttcgaagaagggtcttgatagctctggaaagtgcaggaggatttagaatatgagtggcccacgaaagggatgtttgctggtatgaaactcggtgtctgtttccggtaaggaagtcctggaaacaacgctatactactccagtcttcgattgtgattccttgttttgcagcgagatcgaacacttgtttctcttcaactcctaaacccatgagcaaattccataggtttctctgggcttccctttggttgtaaataatttggtccctcattgccatttcaaactgtagttccgtattacccatcccctagatttgttgaaaacaacaataaatgtgaatcgtaatgtaagaacttcatggtcaagaaaataaggcactgttctgtttattctacttaccaggagcttatactgattaagaatatgcagatacgttttgtttccattgttatttattgcttcattgagcatatcctgtagttcgcaacgatgtttttcattttcttcaatatcctgtaaaacaaaaataataaggataataagcaatgaccatgatgaagtgcaaagttgaaatatatgataaagaaaaaggtttaccctctggtagttaacaccggcttcatcattgtcgcggatattatcaagtattacttgtcgtctgctacttagagcttcgacaacatctttctctgtcgcctataaaacaaagaagaggttacagtaatgcaacatattgacctctgaattaggagaagctttagcagctaacctgtttcgcaattgcatcatcaagatgctgaagttcagtgcgatttctgaggttagtttcctcaagctcaaataacgccttctgtaagtttatacggtcttgaacattttcactgatctggtggcttaaaccatccaaccaagaaagttcacgttcaacacctctttcaaaaggtttgatgcttagctgcgactctttttcagctagttgtgtcttcagctgagaaacctcactctatgaaagcaaagctctgagttatatactgttactatattcattttgtaacagaagtagataaaagtaattaacttacttgaagattgtcgatcattcgttggtagtctgacatatgagtatcgatggtaccaatatttttctaaattgcatgaaaagtgaatagtaagtacttctggaccaattaaaagtctcatgaaatagaattattcaacgaaaattattgtcacctggatgtgtgtcttaatctcttttgctcggtcagcatatttcaatgtgtttacagtatgatgatactgactatcagcaggtgatatagttgcaaccatcactgtctgggagttcccactcagaccatctttgagaatccgcgtaagtttgctgaaattatacatgtgtgtaagccaaaaataatgaccatcttaagataagaaagatcacatatcgacacgtacctgtttcggtatggtacataagcaagaccctttttgtgttgcttccccaaagcatttatgcaatttgctagtgcaaggagtgagcgattgatatttgctccatccctcaatttttgacctccattgtttgtctcagcagctctttcactcccagcaagatctacaagggcgagtttccctctcatgacttgattttgattcttttgccttcttttgactgcaatctctagaactgcatgagacctggtaattggcaaacaaattcatataggccatgagccactgctggtttggactcaagaaaatctaagattgttttactccagaataaatcccattgctgtgaaactgagatctagcgatttggatagacatactccaacattaacagcttgtttcggaggtagtaatgctcaccttgatgatgttccattcatctctgtgctctcagtttttcgtctactgttccccaagttcagcagctcaagaatcctatcagcagaatggacctacaaacgaaacactttaacttagtctcctagctgcaaacgccaaaaagatggtgaaaattttgaagaacacaaacgatatggttttcctatcagcacaaaatctcaaatagaaatactaacatatacaaaattgggaggcaggggaagaacttcaatgtaaaccatacaacattaattcttctaaagggttcccatatgcaaacaaaattgctaataaatgtgacacacaaaatgatatgatctaaatgatgtcataatggaaaccttaaggtgatctctacaactcaggtttagcagtacattaaatgatcttgttgcatctagaagagaagaaaagtatggacctttattgatcgcaggcctgcaactactattccctgctctggatcctctctaagctctaaatgaccagaggatttttcaagcagatcgtagataacctgagttacattatgagaaaaaaggattaatactcgtaatggtaagaaaacaatataaaccaaaataatcaattttatcaaactaagccttacttcattgtaaacttcaagatatgagcaagtcacttcaaactcatctgagctcttgtcactcttgatcatatcaaaaatagtattcaagctgagaaccatcaatccaggatcacttcgagttccaaccattgtatatgttttgccactgaacaaaattgcataattgagtcagataacaaaaaaaaattcctagtaatgttcatgtcgcttttgcaactcgaatatgctaatgctaaataatactattgaagatgatttacataactgcataccttccagtggaaccataggcaaaaactgtagcattgagtccatgaacaacactagagatcacagaagacatactcctatacacattctgaaaaccaatacatgtttagattcatagatttacatccaaaaacacacaaaccttaaaccacaagttccactcacttactgagaaagtcacatacacacaacaaatctaaacattgagaaccaaagatctctagagatcacaaatttgcagagagaggaacgaaccttgttggtgctctcaggtccaaaagcatgatcaaaacaatatttcttctctttagtccgattctgaattcggtcaagataatccttggataagtctgggtctaacacaaccacttcctaaaatcgaaaacaaaaaattagggcgaaaatttaaaatcgaaaaaagcttgaaatcagaaaaatcaaacaaattctgaagagaccttagagttattcactcgaacaatgtctctaccacgttctttctccattaacggtctacatttcacagcaacctaccggaaaacacagagaattaaaccggtcaagaaattttcagacgaattaaaccggaaattttctacgaggattgctaaccgtgagtgtagtggtcttcttcgcagctggagctctaatgcttggcatttcgtcagtatagagccaaaattttcccaatgtgaggttaaattttccctatgcagactttctcggaaacgaaacagagtctcttaacgatcagagaaactcacagctagcgaagaattaaacaaaaaaaatctgagctgagaagaagaaaatttcagctgagctaagaggatagaattcaaaatgtttgatagtttcaagattctctctctctctgtgaaatttcaccgtttcaaaatttaagctgggaaataaaaatttaataaatgcttgagacttgagagatttctctaaacataaaacgagaaagaaaaaaaaaacagtaagagggaaaaataaagatcgtgcgagagggatattgaggacagatcacattgtgtgacggtgcattttgtttaagatgtggtaatgccatcagagccgttgattatgtatttgaccggctacgatcaacctttaccatatagaagtagagtgttttttgtggatgagttattaactttaaagtggcgatttaatttagtccaacagcttttttaattttgggtttatgtggcaaattgaattttaaacaaatttaatttgacgaagttgtgaactctgttacacgacgtgccatctaataccataggatatacaatatatgctgacgtgacgaataaataaatttcatatttgctaataatttcattaaaatatgttcgtgttgttgacaattttcttttacctataaaaagtgatactaccgcgagaccatctccaactctaatcgatatttcttctctgttatggagtaataatctttttaatttactctatatattactctaaaatagagtaaatggtaagcttactttatatctaaagtaactttattttttacactcaaactatttttatacagaatcaaaaatagaaaaatacaatagagatggtcttaggcctaagcataaatttagctctgtccagtttcttccgaatattggatcattcggattgtgtaatctattaggcctagaaaaagtttagccagaatagtttggatgtagttcggttgaagatagaaatcgggaaatcatttatgataagcttctttccaataattcatttacacacgaatgagaagatgcttaaaaatcgctagattacaaatttttttgtcatggttagttggttcatccggtattccaacattcaataaaagtaaatactataaataagcattctacatttataaaaagaaagattcaatcgagtctgatttcatctaaaagagggaaatattttaccaaccttactgactcataactacgaaagacatcacatcgatatcctccataattttggtagttcaagtttatttattctcaacaatatgtcaatatcaaaagcaatatatacccattaacaaacaaaaagaaacggtatctaactgcaacatatagtgaagaaggccaaagttctacacaaacaattctccttcgtcactgtttataaacgtataaactcgtataagttcttataagcaataatccggaataacgacagtagaaaataaatgctagttgtacattttagtagttgaatctctgacaaaaaaataaaaataaaggaagaactaaatttaacagaatcataatttatgactggtaaactataattaatcatactttataattaaaatttaacaaaattaattaaataatgattttcctaggtgaagatatgatattatgatttatgatctccaataatttatgattggtaaacctacaatatagtaaatttctttatttattttttgttatttcgcccatcttgcacattaccaacgaagtcataattttatatgaaatccttagttatttatgcattacgactacccacatagaagtatgggtactcacacctagtttatttacaatttaatatgcattgcatgttctaaaatttcaacttgaagtttatgataaaatataaatacggaacagtatgtttatcgaaaaaaaaaaaacttgaagtttatatctcaccgaagaatcttccggctcatcaatggtacataaattataataaggtgctcgttcatatctagctttatcatttataacatacgaaaatgtaacagttgaattgctagcagaaaattagcagtggtggtggtggtagtggtcttgttagttgttagtgatttgtttagtctataataaatactaaagagatgttattggttcctaaagaaattttcatgaccttaataatattataaaaagtaaataaatgaaagattaatttaaactattgctagaaagttgtttaattcttattgattattttctcacaattttgtaaaattttccaaataatatcattattttgatgatactttcatgactttattttaagaagaaaaatatagaaagttatatactaataacacaataatttaatttattaaacaatcattgattcttttgttttaattgaataacacaaaacttttaatgactttataaaagtatgaatccaataactccaaatttatgaagattttaaatttttttttacaaattttaaactaatagtaccaaactttaacaaacttttaaaaatattaatttgataacaacaaattttacataatattttaagttaataaaactcaaattaaatcacaaaccaataacactcccaaaatatcaatttaacgtcacaagtacaagattgaaactcattaaatatgtatgatgtatcctactatattatttgggaagtacattttaaatgtaaccttaatttttgtaattaattacatgacaatgccattagaaaaatttaatcaaaaacaaaatcttttaataacacattaagattaccaaaatcatttaacgacaatattcatctcttaattataggcttattggatttaaagacgggtcatcaaagattttctaactaaagcaaaatatactgaatattcaaatatctatctattaccaaattataaacaattaagttcgtaaaacaatttaatattttatatacgaaataaagtaaatcttaatcacataaaaattagcacaaaaaaaaatatggtacattcaggtctatagtatttttgcaagacttttttggtggatttgggtaaaagtgcattcgggtcatatggtacattcacctattaaataaatatggtatactcctatgttattagctaaaatgtttagattataattcagagtcatatcataaataaaattactattaataaaataaatggctttttggcaagacggatttggagggacgggtttttgaatcaacattaataaaaaaagtaaaatataattaatccaccatttcaatacgggttaaatctttaatttattattttttaagaccactaatattaaacatatcaaatcatcctaatttagaaaaaattatataaaaccaaaaatgttatgtggtatgtataatgttactatatataaacttaaactataaaatataaatgtattagagaatgatacaatttgcaaaacttttatatagaataaataattcttaaattttaaaaattactactttaaaaaaaaatcacggaacgggtaaagaaattacataacgggttttattttggaattgggttatatggtggatgtatttgaattaatatttataaaattttaaaatattattaatatgttgttttaataggggttaaaacttcagttttttaacaattgtctcatggattcgtggtatagtgttacttaataacaattataaactgtaaaatataaatattttataaaaataaaatttgcaaattttaatatatattacttttaaaaaataaatcatcccctggtataccgagggttaaaatctagtccatgattgttacggcataccaaacttacatgataactaaagagtcttaggttaaaactgtggtagtcaatatatgaagagtgttgttgatttaatttgcgaagcaagaaagaactaaaattttaagacattccaaaagactctgtatcattctgaaggtttgagcttggaaagcgagcacgtgagtcgctcgtgaaactatataatttacgaaaactctaaatacaccccaatagtattatttcattcaaaacacaccccacaatttatttaaaagagtcggggtttttccaagaacactggatcgtcgtctctctcctttagttagacaaagcctcctttcccaaaaccctaaaatcagccaaattcaaattccgctaaccaatttccatggcagaggaaattccagcaacagcatcattcactccatacgtccattcacaaactctaacatctcacaatcgcgccgtctcctccgtgaaattctcctccgatggacgtctcctcgcatccgcctccgccgacaaaacaatccgcacttacacaatcaacaccattaacgatccaatcgccgagcccgtacaagaattcaccggccatgaaaacggtatctccgatgttgcattctcttcagacgcgaggtttatagtctcagcttccgatgacaaaaccttaaagctatgggacgttgaaactggttcattgatcaagacgcttattggacacactaattacgccttctgtgtcaatttcaatcctcaatcaaatatgattgtatctggttcgtttgatgaaactgttcggatctgggatgtcactactggaaagtgtttgaaagttcttcccgcgcattctgatcctgttactgctgttgattttaatagagatgggtctctcattgtttcgagtagctatgatgggttgtgtcgtatatgggattctgggactggtcattgtgtgaaaactctgattgatgatgagaatcctcctgtttcgtttgttagattctctcctaatggcaagtttatcctcgttggtacacttgataacacgctggtgagttcacttgttgaattcctttcaaagatttgatgtttttagtgtgattactagttttgctctatagtgatctcgaaaaaaagcatgaagattttgggtagagtgtgttagtagaagtttgatgtaggagaagccaattcaaaactaagtttacagagaagttgttagctttaagtatagttctgttgttggttgatattcaagagtttcgaagggtcgtatctagagggttgtagcttcgaagatacatcgtcgtttggagtttgattaatttgcattaggaaattaaattcttatgattcgttattaatgcactcatctctccatgaacttagattctaggttgtgtgttaatagaagtttgatgtaggagaagccaatccaaagctatttttgcaaaaattgttatctagttaaggaaaagttgatagctttggaacagttctgttattgatcgagattcaacacttttgaagggtcgtatttagagggttgtaagatacatcttcttttggtgtttgcgtctatagggtattgttgaataaaggaattctcatgattcgttataaatttgcagaggttgtggaacatttcgtctgctaagttcctcaaaacatacactggccacgtgaacgcacagtattgcatttcctctgcgttctccgtcacaaatggaaagcgaatagtcagtggatccgaggacaactgtgtacacatgtgggagctaaactccaagaaactgctacagaaacttgagggtcatactgagaccgtcatgaacgtagcatgccacccgacagagaacttgatcgcatcaggctcgctcgacaagacagtaaggatttggacacagaagaaagaataaatcatcactctctctcttcagaaatcaaacatgtaggtacatgccaccttcttcatgcagtaatcatctgttgcttactaagcttgttagattgattctagcctcattatgtaaaagtctaatttttgtttggtgtaagggaagtgcaacagactgttctaaacttgtaatagttctctgtgtgactcagaactatttaggtaggtcttaaggcaaagactcctgcaagtgcaaaggcatttgagagaatgaacacaaatcttcataggtttaccctttactcattgtatctattaagctgatgcaatgcttcaccaatactattggttataaagtagtttcaggattgaaaattgttcatctgaaccatattgatgggtggctcatgggtcaaagtacagatatatgactataagtagataatgtatggtagttggttactttggttggccatgatgatgaagcttatggtcccctggtcctgtcccattttttacttttcattttcacttttatcgtaaagtcttcttttttttaaaccctacaagattttgaaatggaccacttgaaaatttgaacccactctctctttttttgttttcaatttcgaaaccaaaattttttaacaaaaagatgactttgtgacctttgttctgtcttttagctacacaccagtgggctgtttgcttttacagcgtgtctttctgtttacatgattcaagagaaagcaacagttcctaaagactcagtcatgtttgtgtctctcccaattgatacaaagaccaaaattcagctttggttcttttgtgtaaaagttctcgagatatgctaataagattaaacataaaaactctcaaaaagagtataaattgaattctttatgattgtagtagcaaacaataattgttaggtttagtgctatcataataatctattagtcaggttaaatatattcgatttggtaccaaatacgaaatcaagcttcaacaaacgaatctgcaatacacacacacccatccaaaagtatatcttcgacattttccccaaaaaagtatacatttcctaacacgtgcttaccaattcttatcattcgaagtaaaccattaaacaagaaatgttttcattattataaatttttcactaatataagtttattatttagtgcaagaaagtgcgttgcagatgaaaacttattctattgatccgggtccataaagaagaaaacaaaaattcacctaatacgagtacgacttattctagtggctacatatttccctaatcatgtgactaaaaatctgctttcaaaattttgacattcagtatttctttagatctatatcattaaaaattcatttttttcttttgcattttgattccatatttaatacaagattaaaaaaaaaaaaactaatatgtttgttcactgagcaaaccattattgttgatcagtgaactgtggtaactggcaaaagaagcaaatgattcgaaatcctactttcttacaaaatcaaattggataattttgtgagataataaaaaatcagtataaataaaataaaatacatgtcgggaaaccattattgttgatcagtgaactgtggtaactggcaaaagatgaaaatgatgcacataggactgtgtttaactgacttacttccactaatcaaaagtacgatcgtatccctacccatctctcgaggatcttaactgttgccgtgcgtcatctcaaggttgttctcgtcattatcagtcgatcagagtacagagaccggctctctgggttttgtcgatcatgccattgccttggggcttgttgttgtggtccgtcctaaggatagaaatgttattacaaagctttttaaggggttctttggttaattaagtgtttcgttttgcttaagagaggttaaagaagcgggtgtctcaataagttttggtaagtttgtgaatccccagtggtggactccatcttttcccgtcgaattataacatcaggaccgttcatttcaacatcatcaattaattcattatggggtttatctttaaaacatctttttgaatttatggttcgctttggtattgcattattacacttgtatacctgtgtaataaagtgttggattttgtcaagattaggtaacatcacgtttcaaaacaacaaggctccaaattaattaacattttcttcatgtaattatcgtttttgaatcccttcctttctaattccatgtttcattaaatccaccacatgcatatgtttctatatatgttaaataaacgacttttcaagtttttaatttgtgttttctattttcagaaaatttatgtgaaatcaaagtttcttaaaaatctccctccaagtaaattccaaaataaaataaaaataatacttttacaatatacaaataaaactcataaaaaacacacacacaatcttcatcttcctcacttactctcaccctttttaaaaccaaaccctaacttacacagaaagagaagaaaaaaaacaaaaaaaaaatgaagcttcttcttctcctcctcctcctccttctcctccacatttctcattccttcaccgtcgctaaaccaatcaccgagctccacgctcttctctcactcaaatcctccttcaccatcgacgaacactcacctctcctgacctcatggaacctttcaacaactttctgttcatggaccggtgtcacgtgcgacgtctctctccgtcacgtgacctctctcgacctctcaggtcttaacctctccggaactctctcctccgacgtagctcatttacctctgctacagaatctatcactcgctgctaatcagatctcaggtcctattccgccgcaaatctccaatctctatgagcttcgtcacctcaatctctccaataatgtcttcaacggttcatttcccgatgaactctcctctggattggtgaatctccgtgttcttgacttatacaacaacaatttaaccggagatttaccggtttcactcactaatctcactcagctccgtcatcttcacctcggtgggaattacttctccggcaaaatcccggcgacgtacggaacctggcctgttctcgaatacttagcggtttccggtaacgagctaaccggtaaaatccctccggagatcggaaacctaacgactcttcgtgaactttacatcggatattacaacgcttttgaaaatggtcttccaccggagattggaaatttatcagagcttgttcggttcgacgctgctaattgtggtttaaccggagagattccaccggagattgggaagcttcagaagctagatacgttgtttcttcaagtaaacgcatttacagggacaataactcaagagctgggattgatttcaagcttgaaatcgatggatctgtctaacaatatgtttaccggcgagattccgacgagtttttcacagctgaagaacttaacgcttttgaatctcttcaggaataagctctacggtgctatacctgagttcatcggtgaaatgccggagcttgaagtgttgcagctttgggagaacaatttcactggtagtattcctcagaaattgggggaaaatggtagattagtgattcttgatctctcttcgaacaaactcaccggaactctgccgccgaatatgtgttctggtaaccggttaatgacgttaatcactcttggcaacttcttgtttggttcaataccggattcgcttggtaaatgtgagtctctgacccggatccggatgggtgagaatttccttaacgggtcgattccaaaggagctcttcgggttacctaaattatctcaagtggagctccaagacaattaccttaccggagagttgccaataagcggaggaggagtctctggtgaccttggtcagattagtctttctaataaccagctctctggttcattacctgcagctattggaaacttgtccggtgttcaaaaactacttcttgatggtaacaagttctctggttcgattcctcccgagattgggaggcttcagcagctatctaagttggattttagccacaatctgttctccggtcggatcgcaccggagatcagtcgttgtaagctgctaacgtttgttgatcttagccgtaatgagctctcaggtgatattcctaatgaactcacaggtatgaagatcttgaattacttgaatctttcaagaaaccatctcgttggttccatacctgtgacgatagcatcaatgcagagtttgacatcggttgatttctcttacaacaatctctccggtttagttcccagcactggacagtttagttacttcaattacacatcgtttgtgggtaactctcatctttgtggtccgtatttgggtccttgcggcaaaggaactcaccagtctcatgtcaaacctttatctgctactacgaaactgttactcgtccttggattgctcttttgttcgatggtgtttgctatagtggccataatcaaagctcggtccttgcgaaatgcgagtgaagccaaggcatggagattgactgctttccagaggctagacttcacttgtgacgatgtcttggactctctcaaggaagacaacatcatcggtaaaggcggtgctgggattgtctacaaaggcactatgcctaaaggcgacctagtcgcggtcaaacgattggctacaatgtcccatggatcttcccacgatcacgggttcaacgccgagattcagacgctaggtagaatcagacacagacacatcgtgagactgctcggtttttgctccaaccacgaaacgaatctccttgtgtacgagtacatgcctaatggtagccttggagaggttcttcatggaaagaaaggaggtcatttacattggaacacacgttataagatagctcttgaagcagccaagggtctttgctatctccaccatgattgttccccgttgatcgtccatagagatgttaaatccaacaacatcctcctcgattccaacttcgaagctcatgtcgccgactttggtctcgccaagttcctccaagattccggtacttctgaatgtatgtccgcaattgccggctcctacggctacatagctccaggtaacaaatttgcagaaaatggcatttaatcaaacacttggtggtgaaatgtaaaatctctgaacttgtttgttccttgttgagcagagtacgcgtatacattgaaggtagatgagaagagcgatgtgtatagtttcggtgttgttcttctagaactcatcaccgggaaaaaacccgtcggagaatttggcgacggcgttgatattgttcaatgggtgagaagcatgacggattcaaataaagattgtgtgctcaaagtaatcgatcttagactctcttcagttccagttcacgaggtaacacacgtcttctacgttgcgttgctctgcgttgaagaacaagcggtggagaggccgacgatgcgtgaagtcgttcagattctcactgagatcccaaaaattcctctttcgaagcagcaagcggcggaatcagacgtgactgagaaagctccggcgattaatgaatcgtcgccggattcaggaagtccaccggatcttttaagtaattagactttccggcgattgggtttggtcattgaggggcaaatttgtctttctaattttcttgtcaccgacgtctcggtagtggagttaattacttaattagcccgttgttgtctggttccggttaaggcaacaattagtggtttaactcttaaggttgttgcatttcttttttcactgctgccacaattattcgtgtaggaattttgaatatgtacattgcggttgaattttgcatgataagtggttaatttcaggaaatcgaatttcgagaacattatggcttatgcatatcagcatatatatacatgcagttatgtatatgatcaatctgcccccggttcaagtatgtcaattgtgttagaccaaaaaacacttttgccccttatattcttaagaacttcatttagtttcatactcaagcaaaaactaattttttagagttttcgttgtcttaaaatgaaactagtgtctccattatgctggaatcttgcttatgagttgttacattacatattttattctcacctttgcttttacccttttggattgtatctggttgtggtagctgttgtgtcacaacaagacattccatgtgaaaaaaacacagagagggtgaaaccaaggtatgaatgtgtttgtgtgggactgaagatgagtaacgctgagaagagagaaagtgaaagctcactcacaatttgtccaattattgcaaatgtatgggtagtgtgacactagtgtcttaatgaattcagatggtcctaagatcttttttccactctattcccttgtcttgaagcaaaaatctaattttagacgaagcatttatgacatctccctctcattaattacaagccatatattcaactttgattttgactcatcaatatcaaaaaatctttagactttaggtgttgttgctatccttggtatctagtactttcttcgataaccatgactattatattgagataagaaagatataaagaacaataagaatattagttatgatattttagatgtattatgttcaaaatttcttacgttcgaatgtacattgatgatcttgtaaacctaattaaggagtgcctaactctagaattaataagtcaggagttagttatcaagaaactagaaagacttgaagatggattaaagtggtaattaatgtttttcagaggccaagattctaattaagagatgggaaatggcatgttccattctctagcttcatatatacacttatcgggtgaaactaccagattacgaatagccattagatgactaacaattgaattcaatttaaatcatccaaagatatattttatatattgagattctttcttcatctcaaacttctaagttctaacatagtcatgtagttgaactttcgggccgaggcccataacaactccatctacttaaacgaaggttagataaagggacgaacaaaaagaatcagtctggtgtcagaaactagagtatgtacttttgtgtttgaattgtaacgtttgtttctttcttcagctcttcattggtttatcgacacagtacttatgtcactccaattgtgagaaaatcattctgcacagtcgtttcgaaatcaaggaaatcaaacaagagcaacaacaatccaaagagtaccaaaatatatttggctatagagagctatcattgtcttgtacacttgtccatgttgggctatagatccatatttgtgttgggctaggctcagtttttcttaataacacaaacttacttatcaaacacgtgttgtctttttggttatttaagtagttgacaaacaaaagtacaaataagctgttagggcaaaggagcaaaaacgaaaccacagagagaaagcctccgtctcccttatcaaagaagaagaagacgtgtataacaaaacactagacacattgtgaagatagaaaaaaatggagagagcagcaattctcccgagtgttaatcaaaattacctactttgtccttcacgcgccttctccacgcgcctccactcctctactcgtaacttatcgccgccgtcatttgcctccatcaaggtcaactcttttctcatctccctctcttatcatcttctgatttatctgacccatttctccgattatctttcacagcttcagcattcttcttcctctgtttcttctaatggtggaatctctcttactcgatgcaacgctgtttcgtccaattcttccaggttcgttctttgtttttggtgggtatttgtccaagttctcaggttcttacttatatatatgtattgtttatgttgaattagtacgttggtaactgaattagccgacatagattgggataccgttggatttgggcttaagccagctgattatatgtatgtgatgaaatgtaacattgatggagagttctcaaaaggtgagttgcaacgttttgggaatattgaaattagcccatctgctggtgtactcaactatggacaggtttgttttcttagttttcttcaaagtcatgtcctttactgtattgagtatgatcaaaagtctagaccaagcttagattatggttaaaagaagctttttgtggggttaaggtttaggatttgaatgtcagattcttgacactgaaacgcaatctattatctgattttgtatcctagtttctcaaagtcatgtccttaacaagttcgataaaaggaaaagccttttgggggtttaggtaaggatctgaaagtgtggagaagttggttagattcttggcaccgaaaaacgtaatctgccgtcgattttgttttctagcttctcaaagtcctgtcctttactgtaatgaattctatgaaagaaacttaatttatgctaatcaagaatctttaagggagttaggagggtttgaaagtgtggagaaatttgtcaaattctggacaatgtatcacagcctgagtttgtcaataagtctagtctcctagttgttatgttagttgcatctagtgaggatttatttactgaatgtatattcatatattgcacggagaaatcttcttatattgtaagtgatgatgagaaatgccaagcaatgtgttgtggtaaagagtgcaatttaggatcacatgagtcttattagtgtatgttcttctagggattgtttgaagggctaaaagcttacagaaagaaagatggtaataacatcctcctctttcgtcctgaggagaatgcaaagcgtatgagaaatggtgctgagaggatgtgtatgcctgctccaaccgttgagcagtttgtagaagctgtgacagaaactgtactagcaaacaaacgttgggtaatgaatcacgcagttttttttgtctcccgatatgcagaggaaattatctagatatttgtttgctgttatgaatttaacttgtgtttggtgtcttgtttttaggttccaccaccaggtaaaggttccttatatgttagaccattgctaatgggaacaggagctgttcttggtcttgcgcctgcaccagaatatactttcattatctatgtttcgcctgttgggaactacttcaaggtctttcagagttacttcgatctattccaactatctaagatttgttgtatgtttctctgaatgatgatacggatttatatgatgatgtcaggaaggtgtggcacctatcaatttgattgtggagaatgaatttcaccgtgcaactcctggtggtaccggaggtgttaaaaccataggcaattatgctgcagtaagtaaaagcttatttcacttattgattttattggaccagctttcgtaactcacacatacaagttatttatttaggtactgaaggcacagtcaattgcgaaagctaaaggatattccgatgttttgtaccttgattgcatttacaaaagatatcttgaggaggtctcgtcttgcaatattttcatcgtgaaggtaaataaaaatcaatctctcggaatctgatgatgccttgtagagtctataagatgtctctcttcataagacgtaggagatgatgagattgagactctggcaccatgtttttttgggggcattcttacaaacatatcaagatactgattctcttacataatgattttttaaccaacacttttctttgccaggacaatgtgatatctactcctgaaataaaaggaaccattttacccggtattactcgaaaaagtatgatagacgtggctcgaacacaagggtttcaggtgacctcttccccttctttaaattcccaacatctttaaagtggatcataagtactattattggcttctgatcacagtgcatgtttatacggtattgttcaggtggaggaacggaatgtgacagtggatgaattgttagaagcagacgaggttttctgcacaggaaccgccgtggttgtctctcctgttggaagcgtcacttacaaaggcaaaaggtaaaacgttttttctttgtatcccaatttaagtgaaaaccaaacctaccaagtggtaaagctttcccctttttccgaatacacacacagagtgtcttacggagaaggtaccttcggaactgtgtcgaagcaactctacaccgttctgacaagcttgcagatgggtctgattgaagacaacatgaaatggactgtgaatcttagttaagccaggcgaatgcattgcatcaattcggctgcttggttttgctttcttttctttggtctgtggttctgattcgtgaaactatgagttggattgtttagaatctggttgatctagaacttagctggttcaagatcattagatgttgttgcatcataccaataatattatctttagatctctgtttctgattagatggttacatccaattatttctctaaagtctgagacatcattgatatctaacaatcaaaaactaaaaagtgaagtattaacattttaatcagattcaaaccagaacttatcagtcatcaaaaatgttggcaaataacaaatcaaacttaagtttttggatggagaaagcaagctagattcgaatctctaagaagcgtggacttggacttgtttacgacctgaaaagatgtcatgattatctcatgattacgagataataacatgtcttatctactaaactaatctaaaaagtagtgaggatgacttgaaacttaagtcttatatgaattatctttaaatatagaaaaagaaaggagatagagaggtgtgtttttcatgtgaacaacttttttttacctttagagtacttccagaagacttattgggtccttaataaaagtagaccaaattattgaagagctaaaaaaaaatgcctactcaaaatatccaaacctcttcttttagccttttgtttttttcaatattcatactaatgtaaactacaatcattgtatcattctataatcatatgaattttttgtcaacaccatgcattatgctagtttaaatttaggtgatgatataaagatattttaagtacaaatcaataggggcgatgttcttatgtctttatctaactttatgaatttgtgttttatatattatgaaaaattggaaaagaagagatggcctacgctcaagaccaattcctaccaatgggcaatggtgttgaaatctgaacaaaaaaatttcctttctttaacgttagctttaaagttcaaaaaactttatttactttttcagtgataattctgtataaaataacatataacaatgaggaaaaaactcaataatttgaatcgcttatgactttatttctccaagtgcttgacttttaaaaccctaatgtccaatctcaactaaagtcaacctttttcgttcgtctagaagagtcagtcattaagtttcaattgaagtatacagtaaattattagtactttttattttattttaaccacagttcattggctgtatgagatttctgttcaagaaaacatataaatcgaaaccaaagcaaaagacattatttgcttcggtttcttctactcaagctcatttttagtaaaactaaattgtattttcattttcttaaaaagttaattgttttttttgtaaaatcagttttaccaaattggacacaataatgaatatatgtctatgtctagttttttttagctcagaatatatcttatgtgaatagaatcgtctatcagatatttttgtgatgcagatagaacttaccgttatagaatcatttgtagattgttcatcgtgattgttaagattagattcccatttgtaatataacagaaactcgaaaagtacttatattaagtattaacgatgtatcatgtgaccaaaatagaaaatactacgtaatgatatgattattaagcgagtgtgtaggtaattcaaatatttcaattaatcaatctttgatatcactctttagagtaatgtattatctttcttattgttttaccctgggattaataagtttaccggatccggagtagaatttcttcggtttggcaattttgttcacctaccataacgaacttttacccttatacttagtttcaatctacttttggtgcatcctttcattttcaactgcaaagaagtagttaaaagatccaatacataatatatttaatttatcataagtaacttagtgtaaagaaagactaaagtactttttaaaatatgtatttgtatttcccgatgtgaaagaaaagaaaattgaatttgcacatatcaataatattagctaggaaaaaacttgtgagaaatttctttgacgacttgcgtgtgcaatagtcttccttatcttctctaccatttcttaattccactattgtatagtatttacttatgttgaattaataaattaaaacatttaaatttccctaaagttactttttgatttttgattttctatttttattacaactttcctactttttgacatcttttcttacaaagactttttgacatctccccctccagctattatatagtctccttttttcttttctgcattcacataatatttcccctatatagtttacacaacatcatacccaccaacatatataatcttgatcatagagagataaacagaggccgctatcaagaacaagactaagaacaagacttcactaggagtacaagtatgggaagagcaccgtgttgtgacaaagcaaacgtgaagaaagggccttggtctcctgaggaagatgcaaaactcaaatcttacattgaaaatagtggcaccggaggcaattggatcgctttgcctcaaaagattggtattaataaatttatagtcactctttttcatataaatttgataattctctcttgatctatctctttttttgtgaagaagtattgataactaaagatgctttttgtttatatgattatttcttggttgttttaaggtttaaagagatgtggaaagagttgcaggctgaggtggcttaactatcttagaccaaacatcaaacatggtggcttctctgaggaagaagaaaacatcatttgtagcctttaccttacaattggtagcaggtactattcatatacgttattcatgtatatatcgttaaaatatcatgtggaaactctgaaatatagttatgtgatgatgtctataattaaaggtggtctataatcgctgctcaattgccgggacgaacagacaacgatataaaaaactattggaacacgaggctcaagaagaaactcattaacaaacaacgcaaggagcttcaagaagctt

SEQ ID NO: 1070 - DNA, 97711 bp, Arabidopsis thaliana
aagcttactttatatctaaagtaactttattttttacactcaaactatttttatacagaatcaaaaatagaaaaatacaatagagatggtcttaggcctaagcataaatttagctctgtccagtttcttccgaatattggatcattcggattgtgtaatctattaggcctagaaaaagtttagccagaatagtttggatgtagttcggttgaagatagaaatcgggaaatcatttatgataagcttctttccaataattcatttacacacgaatgagaagatgcttaaaaatcgctagattacaaatttttttgtcatggttagttggttcatccggtattccaacattcaataaaagtaaatactataaataagcattctacatttataaaaagaaagattcaatcgagtctgatttcatctaaaagagggaaatattttaccaaccttactgactcataactacgaaagacatcacatcgatatcctccataattttggtagttcaagtttatttattctcaacaatatgtcaatatcaaaagcaatatatacccattaacaaacaaaaagaaacggtatctaactgcaacatatagtgaagaaggccaaagttctacacaaacaattctccttcgtcactgtttataaacgtataaactcgtataagttcttataagcaataatccggaataacgacagtagaaaataaatgctagttgtacattttagtagttgaatctctgacaaaaaaataaaaataaaggaagaactaaatttaacagaatcataatttatgactggtaaactataattaatcatactttataattaaaatttaacaaaattaattaaataatgattttcctaggtgaagatatgatattatgatttatgatctccaataatttatgattggtaaacctacaatatagtaaatttctttatttattttttgttatttcgcccatcttgcacattaccaacgaagtcataattttatatgaaatccttagttatttatgcattacgactacccacatagaagtatgggtactcacacctagtttatttacaatttaatatgcattgcatgttctaaaatttcaacttgaagtttatgataaaatataaatacggaacagtatgtttatcgaaaaaaaaaaaacttgaagtttatatctcaccgaagaatcttccggctcatcaatggtacataaattataataaggtgctcgttcatatctagctttatcatttataacatacgaaaatgtaacagttgaattgctagcagaaaattagcagtggtggtggtggtagtggtcttgttagttgttagtgatttgtttagtctataataaatactaaagagatgttattggttcctaaagaaattttcatgaccttaataatattataaaaagtaaataaatgaaagattaatttaaactattgctagaaagttgtttaattcttattgattattttctcacaattttgtaaaattttccaaataatatcattattttgatgatactttcatgactttattttaagaagaaaaatatagaaagttatatactaataacacaataatttaatttattaaacaatcattgattcttttgttttaattgaataacacaaaacttttaatgactttataaaagtatgaatccaataactccaaatttatgaagattttaaatttttttttacaaattttaaactaatagtaccaaactttaacaaacttttaaaaatattaatttgataacaacaaattttacataatattttaagttaataaaactcaaattaaatcacaaaccaataacactcccaaaatatcaatttaacgtcacaagtacaagattgaaactcattaaatatgtatgatgtatcctactatattatttgggaagtacattttaaatgtaaccttaatttttgtaattaattacatgacaatgccattagaaaaatttaatcaaaaacaaaatcttttaataacacattaagattaccaaaatcatttaacgacaatattcatctcttaattataggcttattggatttaaagacgggtcatcaaagattttctaactaaagcaaaatatactgaatattcaaatatctatctattaccaaattataaacaattaagttcgtaaaacaatttaatattttatatacgaaataaagtaaatcttaatcacataaaaattagcacaaaaaaaaatatggtacattcaggtctatagtatttttgcaagacttttttggtggatttgggtaaaagtgcattcgggtcatatggtacattcacctattaaataaatatggtatactcctatgttattagctaaaatgtttagattataattcagagtcatatcataaataaaattactattaataaaataaatggctttttggcaagacggatttggagggacgggtttttgaatcaacattaataaaaaaagtaaaatataattaatccaccatttcaatacgggttaaatctttaatttattattttttaagaccactaatattaaacatatcaaatcatcctaatttagaaaaaattatataaaaccaaaaatgttatgtggtatgtataatgttactatatataaacttaaactataaaatataaatgtattagagaatgatacaatttgcaaaacttttatatagaataaataattcttaaattttaaaaattactactttaaaaaaaaatcacggaacgggtaaagaaattacataacgggttttattttggaattgggttatatggtggatgtatttgaattaatatttataaaattttaaaatattattaatatgttgttttaataggggttaaaacttcagttttttaacaattgtctcatggattcgtggtatagtgttacttaataacaattataaactgtaaaatataaatattttataaaaataaaatttgcaaattttaatatatattacttttaaaaaataaatcatcccctggtataccgagggttaaaatctagtccatgattgttacggcataccaaacttacatgataactaaagagtcttaggttaaaactgtggtagtcaatatatgaagagtgttgttgatttaatttgcgaagcaagaaagaactaaaattttaagacattccaaaagactctgtatcattctgaaggtttgagcttggaaagcgagcacgtgagtcgctcgtgaaactatataatttacgaaaactctaaatacaccccaatagtattatttcattcaaaacacaccccacaatttatttaaaagagtcggggtttttccaagaacactggatcgtcgtctctctcctttagttagacaaagcctcctttcccaaaaccctaaaatcagccaaattcaaattccgctaaccaatttccatggcagaggaaattccagcaacagcatcattcactccatacgtccattcacaaactctaacatctcacaatcgcgccgtctcctccgtgaaattctcctccgatggacgtctcctcgcatccgcctccgccgacaaaacaatccgcacttacacaatcaacaccattaacgatccaatcgccgagcccgtacaagaattcaccggccatgaaaacggtatctccgatgttgcattctcttcagacgcgaggtttatagtctcagcttccgatgacaaaaccttaaagctatgggacgttgaaactggttcattgatcaagacgcttattggacacactaattacgccttctgtgtcaatttcaatcctcaatcaaatatgattgtatctggttcgtttgatgaaactgttcggatctgggatgtcactactggaaagtgtttgaaagttcttcccgcgcattctgatcctgttactgctgttgattttaatagagatgggtctctcattgtttcgagtagctatgatgggttgtgtcgtatatgggattctgggactggtcattgtgtgaaaactctgattgatgatgagaatcctcctgtttcgtttgttagattctctcctaatggcaagtttatcctcgttggtacacttgataacacgctggtgagttcacttgttgaattcctttcaaagatttgatgtttttagtgtgattactagttttgctctatagtgatctcgaaaaaaagcatgaagattttgggtagagtgtgttagtagaagtttgatgtaggagaagccaattcaaaactaagtttacagagaagttgttagctttaagtatagttctgttgttggttgatattcaagagtttcgaagggtcgtatctagagggttgtagcttcgaagatacatcgtcgtttggagtttgattaatttgcattaggaaattaaattcttatgattcgttattaatgcactcatctctccatgaacttagattctaggttgtgtgttaatagaagtttgatgtaggagaagccaatccaaagctatttttgcaaaaattgttatctagttaaggaaaagttgatagctttggaacagttctgttattgatcgagattcaacacttttgaagggtcgtatttagagggttgtaagatacatcttcttttggtgtttgcgtctatagggtattgttgaataaaggaattctcatgattcgttataaatttgcagaggttgtggaacatttcgtctgctaagttcctcaaaacatacactggccacgtgaacgcacagtattgcatttcctctgcgttctccgtcacaaatggaaagcgaatagtcagtggatccgaggacaactgtgtacacatgtgggagctaaactccaagaaactgctacagaaacttgagggtcatactgagaccgtcatgaacgtagcatgccacccgacagagaacttgatcgcatcaggctcgctcgacaagacagtaaggatttggacacagaagaaagaataaatcatcactctctctcttcagaaatcaaacatgtaggtacatgccaccttcttcatgcagtaatcatctgttgcttactaagcttgttagattgattctagcctcattatgtaaaagtctaatttttgtttggtgtaagggaagtgcaacagactgttctaaacttgtaatagttctctgtgtgactcagaactatttaggtaggtcttaaggcaaagactcctgcaagtgcaaaggcatttgagagaatgaacacaaatcttcataggtttaccctttactcattgtatctattaagctgatgcaatgcttcaccaatactattggttataaagtagtttcaggattgaaaattgttcatctgaaccatattgatgggtggctcatgggtcaaagtacagatatatgactataagtagataatgtatggtagttggttactttggttggccatgatgatgaagcttatggtcccctggtcctgtcccattttttacttttcattttcacttttatcgtaaagtcttcttttttttaaaccctacaagattttgaaatggaccacttgaaaatttgaacccactctctctttttttgttttcaatttcgaaaccaaaattttttaacaaaaagatgactttgtgacctttgttctgtcttttagctacacaccagtgggctgtttgcttttacagcgtgtctttctgtttacatgattcaagagaaagcaacagttcctaaagactcagtcatgtttgtgtctctcccaattgatacaaagaccaaaattcagctttggttcttttgtgtaaaagttctcgagatatgctaataagattaaacataaaaactctcaaaaagagtataaattgaattctttatgattgtagtagcaaacaataattgttaggtttagtgctatcataataatctattagtcaggttaaatatattcgatttggtaccaaatacgaaatcaagcttcaacaaacgaatctgcaatacacacacacccatccaaaagtatatcttcgacattttccccaaaaaagtatacatttcctaacacgtgcttaccaattcttatcattcgaagtaaaccattaaacaagaaatgttttcattattataaatttttcactaatataagtttattatttagtgcaagaaagtgcgttgcagatgaaaacttattctattgatccgggtccataaagaagaaaacaaaaattcacctaatacgagtacgacttattctagtggctacatatttccctaatcatgtgactaaaaatctgctttcaaaattttgacattcagtatttctttagatctatatcattaaaaattcatttttttcttttgcattttgattccatatttaatacaagattaaaaaaaaaaaaactaatatgtttgttcactgagcaaaccattattgttgatcagtgaactgtggtaactggcaaaagaagcaaatgattcgaaatcctactttcttacaaaatcaaattggataattttgtgagataataaaaaatcagtataaataaaataaaatacatgtcgggaaaccattattgttgatcagtgaactgtggtaactggcaaaagatgaaaatgatgcacataggactgtgtttaactgacttacttccactaatcaaaagtacgatcgtatccctacccatctctcgaggatcttaactgttgccgtgcgtcatctcaaggttgttctcgtcattatcagtcgatcagagtacagagaccggctctctgggttttgtcgatcatgccattgccttggggcttgttgttgtggtccgtcctaaggatagaaatgttattacaaagctttttaaggggttctttggttaattaagtgtttcgttttgcttaagagaggttaaagaagcgggtgtctcaataagttttggtaagtttgtgaatccccagtggtggactccatcttttcccgtcgaattataacatcaggaccgttcatttcaacatcatcaattaattcattatggggtttatctttaaaacatctttttgaatttatggttcgctttggtattgcattattacacttgtatacctgtgtaataaagtgttggattttgtcaagattaggtaacatcacgtttcaaaacaacaaggctccaaattaattaacattttcttcatgtaattatcgtttttgaatcccttcctttctaattccatgtttcattaaatccaccacatgcatatgtttctatatatgttaaataaacgacttttcaagtttttaatttgtgttttctattttcagaaaatttatgtgaaatcaaagtttcttaaaaatctccctccaagtaaattccaaaataaaataaaaataatacttttacaatatacaaataaaactcataaaaaacacacacacaatcttcatcttcctcacttactctcaccctttttaaaaccaaaccctaacttacacagaaagagaagaaaaaaaacaaaaaaaaaatgaagcttcttcttctcctcctcctcctccttctcctccacatttctcattccttcaccgtcgctaaaccaatcaccgagctccacgctcttctctcactcaaatcctccttcaccatcgacgaacactcacctctcctgacctcatggaacctttcaacaactttctgttcatggaccggtgtcacgtgcgacgtctctctccgtcacgtgacctctctcgacctctcaggtcttaacctctccggaactctctcctccgacgtagctcatttacctctgctacagaatctatcactcgctgctaatcagatctcaggtcctattccgccgcaaatctccaatctctatgagcttcgtcacctcaatctctccaataatgtcttcaacggttcatttcccgatgaactctcctctggattggtgaatctccgtgttcttgacttatacaacaacaatttaaccggagatttaccggtttcactcactaatctcactcagctccgtcatcttcacctcggtgggaattacttctccggcaaaatcccggcgacgtacggaacctggcctgttctcgaatacttagcggtttccggtaacgagctaaccggtaaaatccctccggagatcggaaacctaacgactcttcgtgaactttacatcggatattacaacgcttttgaaaatggtcttccaccggagattggaaatttatcagagcttgttcggttcgacgctgctaattgtggtttaaccggagagattccaccggagattgggaagcttcagaagctagatacgttgtttcttcaagtaaacgcatttacagggacaataactcaagagctgggattgatttcaagcttgaaatcgatggatctgtctaacaatatgtttaccggcgagattccgacgagtttttcacagctgaagaacttaacgcttttgaatctcttcaggaataagctctacggtgctatacctgagttcatcggtgaaatgccggagcttgaagtgttgcagctttgggagaacaatttcactggtagtattcctcagaaattgggggaaaatggtagattagtgattcttgatctctcttcgaacaaactcaccggaactctgccgccgaatatgtgttctggtaaccggttaatgacgttaatcactcttggcaacttcttgtttggttcaataccggattcgcttggtaaatgtgagtctctgacccggatccggatgggtgagaatttccttaacgggtcgattccaaaggagctcttcgggttacctaaattatctcaagtggagctccaagacaattaccttaccggagagttgccaataagcggaggaggagtctctggtgaccttggtcagattagtctttctaataaccagctctctggttcattacctgcagctattggaaacttgtccggtgttcaaaaactacttcttgatggtaacaagttctctggttcgattcctcccgagattgggaggcttcagcagctatctaagttggattttagccacaatctgttctccggtcggatcgcaccggagatcagtcgttgtaagctgctaacgtttgttgatcttagccgtaatgagctctcaggtgatattcctaatgaactcacaggtatgaagatcttgaattacttgaatctttcaagaaaccatctcgttggttccatacctgtgacgatagcatcaatgcagagtttgacatcggttgatttctcttacaacaatctctccggtttagttcccagcactggacagtttagttacttcaattacacatcgtttgtgggtaactctcatctttgtggtccgtatttgggtccttgcggcaaaggaactcaccagtctcatgtcaaacctttatctgctactacgaaactgttactcgtccttggattgctcttttgttcgatggtgtttgctatagtggccataatcaaagctcggtccttgcgaaatgcgagtgaagccaaggcatggagattgactgctttccagaggctagacttcacttgtgacgatgtcttggactctctcaaggaagacaacatcatcggtaaaggcggtgctgggattgtctacaaaggcactatgcctaaaggcgacctagtcgcggtcaaacgattggctacaatgtcccatggatcttcccacgatcacgggttcaacgccgagattcagacgctaggtagaatcagacacagacacatcgtgagactgctcggtttttgctccaaccacgaaacgaatctccttgtgtacgagtacatgcctaatggtagccttggagaggttcttcatggaaagaaaggaggtcatttacattggaacacacgttataagatagctcttgaagcagccaagggtctttgctatctccaccatgattgttccccgttgatcgtccatagagatgttaaatccaacaacatcctcctcgattccaacttcgaagctcatgtcgccgactttggtctcgccaagttcctccaagattccggtacttctgaatgtatgtccgcaattgccggctcctacggctacatagctccaggtaacaaatttgcagaaaatggcatttaatcaaacacttggtggtgaaatgtaaaatctctgaacttgtttgttccttgttgagcagagtacgcgtatacattgaaggtagatgagaagagcgatgtgtatagtttcggtgttgttcttctagaactcatcaccgggaaaaaacccgtcggagaatttggcgacggcgttgatattgttcaatgggtgagaagcatgacggattcaaataaagattgtgtgctcaaagtaatcgatcttagactctcttcagttccagttcacgaggtaacacacgtcttctacgttgcgttgctctgcgttgaagaacaagcggtggagaggccgacgatgcgtgaagtcgttcagattctcactgagatcccaaaaattcctctttcgaagcagcaagcggcggaatcagacgtgactgagaaagctccggcgattaatgaatcgtcgccggattcaggaagtccaccggatcttttaagtaattagactttccggcgattgggtttggtcattgaggggcaaatttgtctttctaattttcttgtcaccgacgtctcggtagtggagttaattacttaattagcccgttgttgtctggttccggttaaggcaacaattagtggtttaactcttaaggttgttgcatttcttttttcactgctgccacaattattcgtgtaggaattttgaatatgtacattgcggttgaattttgcatgataagtggttaatttcaggaaatcgaatttcgagaacattatggcttatgcatatcagcatatatatacatgcagttatgtatatgatcaatctgcccccggttcaagtatgtcaattgtgttagaccaaaaaacacttttgccccttatattcttaagaacttcatttagtttcatactcaagcaaaaactaattttttagagttttcgttgtcttaaaatgaaactagtgtctccattatgctggaatcttgcttatgagttgttacattacatattttattctcacctttgcttttacccttttggattgtatctggttgtggtagctgttgtgtcacaacaagacattccatgtgaaaaaaacacagagagggtgaaaccaaggtatgaatgtgtttgtgtgggactgaagatgagtaacgctgagaagagagaaagtgaaagctcactcacaatttgtccaattattgcaaatgtatgggtagtgtgacactagtgtcttaatgaattcagatggtcctaagatcttttttccactctattcccttgtcttgaagcaaaaatctaattttagacgaagcatttatgacatctccctctcattaattacaagccatatattcaactttgattttgactcatcaatatcaaaaaatctttagactttaggtgttgttgctatccttggtatctagtactttcttcgataaccatgactattatattgagataagaaagatataaagaacaataagaatattagttatgatattttagatgtattatgttcaaaatttcttacgttcgaatgtacattgatgatcttgtaaacctaattaaggagtgcctaactctagaattaataagtcaggagttagttatcaagaaactagaaagacttgaagatggattaaagtggtaattaatgtttttcagaggccaagattctaattaagagatgggaaatggcatgttccattctctagcttcatatatacacttatcgggtgaaactaccagattacgaatagccattagatgactaacaattgaattcaatttaaatcatccaaagatatattttatatattgagattctttcttcatctcaaacttctaagttctaacatagtcatgtagttgaactttcgggccgaggcccataacaactccatctacttaaacgaaggttagataaagggacgaacaaaaagaatcagtctggtgtcagaaactagagtatgtacttttgtgtttgaattgtaacgtttgtttctttcttcagctcttcattggtttatcgacacagtacttatgtcactccaattgtgagaaaatcattctgcacagtcgtttcgaaatcaaggaaatcaaacaagagcaacaacaatccaaagagtaccaaaatatatttggctatagagagctatcattgtcttgtacacttgtccatgttgggctatagatccatatttgtgttgggctaggctcagtttttcttaataacacaaacttacttatcaaacacgtgttgtctttttggttatttaagtagttgacaaacaaaagtacaaataagctgttagggcaaaggagcaaaaacgaaaccacagagagaaagcctccgtctcccttatcaaagaagaagaagacgtgtataacaaaacactagacacattgtgaagatagaaaaaaatggagagagcagcaattctcccgagtgttaatcaaaattacctactttgtccttcacgcgccttctccacgcgcctccactcctctactcgtaacttatcgccgccgtcatttgcctccatcaaggtcaactcttttctcatctccctctcttatcatcttctgatttatctgacccatttctccgattatctttcacagcttcagcattcttcttcctctgtttcttctaatggtggaatctctcttactcgatgcaacgctgtttcgtccaattcttccaggttcgttctttgtttttggtgggtatttgtccaagttctcaggttcttacttatatatatgtattgtttatgttgaattagtacgttggtaactgaattagccgacatagattgggataccgttggatttgggcttaagccagctgattatatgtatgtgatgaaatgtaacattgatggagagttctcaaaaggtgagttgcaacgttttgggaatattgaaattagcccatctgctggtgtactcaactatggacaggtttgttttcttagttttcttcaaagtcatgtcctttactgtattgagtatgatcaaaagtctagaccaagcttagattatggttaaaagaagctttttgtggggttaaggtttaggatttgaatgtcagattcttgacactgaaacgcaatctattatctgattttgtatcctagtttctcaaagtcatgtccttaacaagttcgataaaaggaaaagccttttgggggtttaggtaaggatctgaaagtgtggagaagttggttagattcttggcaccgaaaaacgtaatctgccgtcgattttgttttctagcttctcaaagtcctgtcctttactgtaatgaattctatgaaagaaacttaatttatgctaatcaagaatctttaagggagttaggagggtttgaaagtgtggagaaatttgtcaaattctggacaatgtatcacagcctgagtttgtcaataagtctagtctcctagttgttatgttagttgcatctagtgaggatttatttactgaatgtatattcatatattgcacggagaaatcttcttatattgtaagtgatgatgagaaatgccaagcaatgtgttgtggtaaagagtgcaatttaggatcacatgagtcttattagtgtatgttcttctagggattgtttgaagggctaaaagcttacagaaagaaagatggtaataacatcctcctctttcgtcctgaggagaatgcaaagcgtatgagaaatggtgctgagaggatgtgtatgcctgctccaaccgttgagcagtttgtagaagctgtgacagaaactgtactagcaaacaaacgttgggtaatgaatcacgcagttttttttgtctcccgatatgcagaggaaattatctagatatttgtttgctgttatgaatttaacttgtgtttggtgtcttgtttttaggttccaccaccaggtaaaggttccttatatgttagaccattgctaatgggaacaggagctgttcttggtcttgcgcctgcaccagaatatactttcattatctatgtttcgcctgttgggaactacttcaaggtctttcagagttacttcgatctattccaactatctaagatttgttgtatgtttctctgaatgatgatacggatttatatgatgatgtcaggaaggtgtggcacctatcaatttgattgtggagaatgaatttcaccgtgcaactcctggtggtaccggaggtgttaaaaccataggcaattatgctgcagtaagtaaaagcttatttcacttattgattttattggaccagctttcgtaactcacacatacaagttatttatttaggtactgaaggcacagtcaattgcgaaagctaaaggatattccgatgttttgtaccttgattgcatttacaaaagatatcttgaggaggtctcgtcttgcaatattttcatcgtgaaggtaaataaaaatcaatctctcggaatctgatgatgccttgtagagtctataagatgtctctcttcataagacgtaggagatgatgagattgagactctggcaccatgtttttttgggggcattcttacaaacatatcaagatactgattctcttacataatgattttttaaccaacacttttctttgccaggacaatgtgatatctactcctgaaataaaaggaaccattttacccggtattactcgaaaaagtatgatagacgtggctcgaacacaagggtttcaggtgacctcttccccttctttaaattcccaacatctttaaagtggatcataagtactattattggcttctgatcacagtgcatgtttatacggtattgttcaggtggaggaacggaatgtgacagtggatgaattgttagaagcagacgaggttttctgcacaggaaccgccgtggttgtctctcctgttggaagcgtcacttacaaaggcaaaaggtaaaacgttttttctttgtatcccaatttaagtgaaaaccaaacctaccaagtggtaaagctttcccctttttccgaatacacacacagagtgtcttacggagaaggtaccttcggaactgtgtcgaagcaactctacaccgttctgacaagcttgcagatgggtctgattgaagacaacatgaaatggactgtgaatcttagttaagccaggcgaatgcattgcatcaattcggctgcttggttttgctttcttttctttggtctgtggttctgattcgtgaaactatgagttggattgtttagaatctggttgatctagaacttagctggttcaagatcattagatgttgttgcatcataccaataatattatctttagatctctgtttctgattagatggttacatccaattatttctctaaagtctgagacatcattgatatctaacaatcaaaaactaaaaagtgaagtattaacattttaatcagattcaaaccagaacttatcagtcatcaaaaatgttggcaaataacaaatcaaacttaagtttttggatggagaaagcaagctagattcgaatctctaagaagcgtggacttggacttgtttacgacctgaaaagatgtcatgattatctcatgattacgagataataacatgtcttatctactaaactaatctaaaaagtagtgaggatgacttgaaacttaagtcttatatgaattatctttaaatatagaaaaagaaaggagatagagaggtgtgtttttcatgtgaacaacttttttttacctttagagtacttccagaagacttattgggtccttaataaaagtagaccaaattattgaagagctaaaaaaaaatgcctactcaaaatatccaaacctcttcttttagccttttgtttttttcaatattcatactaatgtaaactacaatcattgtatcattctataatcatatgaattttttgtcaacaccatgcattatgctagtttaaatttaggtgatgatataaagatattttaagtacaaatcaataggggcgatgttcttatgtctttatctaactttatgaatttgtgttttatatattatgaaaaattggaaaagaagagatggcctacgctcaagaccaattcctaccaatgggcaatggtgttgaaatctgaacaaaaaaatttcctttctttaacgttagctttaaagttcaaaaaactttatttactttttcagtgataattctgtataaaataacatataacaatgaggaaaaaactcaataatttgaatcgcttatgactttatttctccaagtgcttgacttttaaaaccctaatgtccaatctcaactaaagtcaacctttttcgttcgtctagaagagtcagtcattaagtttcaattgaagtatacagtaaattattagtactttttattttattttaaccacagttcattggctgtatgagatttctgttcaagaaaacatataaatcgaaaccaaagcaaaagacattatttgcttcggtttcttctactcaagctcatttttagtaaaactaaattgtattttcattttcttaaaaagttaattgttttttttgtaaaatcagttttaccaaattggacacaataatgaatatatgtctatgtctagttttttttagctcagaatatatcttatgtgaatagaatcgtctatcagatatttttgtgatgcagatagaacttaccgttatagaatcatttgtagattgttcatcgtgattgttaagattagattcccatttgtaatataacagaaactcgaaaagtacttatattaagtattaacgatgtatcatgtgaccaaaatagaaaatactacgtaatgatatgattattaagcgagtgtgtaggtaattcaaatatttcaattaatcaatctttgatatcactctttagagtaatgtattatctttcttattgttttaccctgggattaataagtttaccggatccggagtagaatttcttcggtttggcaattttgttcacctaccataacgaacttttacccttatacttagtttcaatctacttttggtgcatcctttcattttcaactgcaaagaagtagttaaaagatccaatacataatatatttaatttatcataagtaacttagtgtaaagaaagactaaagtactttttaaaatatgtatttgtatttcccgatgtgaaagaaaagaaaattgaatttgcacatatcaataatattagctaggaaaaaacttgtgagaaatttctttgacgacttgcgtgtgcaatagtcttccttatcttctctaccatttcttaattccactattgtatagtatttacttatgttgaattaataaattaaaacatttaaatttccctaaagttactttttgatttttgattttctatttttattacaactttcctactttttgacatcttttcttacaaagactttttgacatctccccctccagctattatatagtctccttttttcttttctgcattcacataatatttcccctatatagtttacacaacatcatacccaccaacatatataatcttgatcatagagagataaacagaggccgctatcaagaacaagactaagaacaagacttcactaggagtacaagtatgggaagagcaccgtgttgtgacaaagcaaacgtgaagaaagggccttggtctcctgaggaagatgcaaaactcaaatcttacattgaaaatagtggcaccggaggcaattggatcgctttgcctcaaaagattggtattaataaatttatagtcactctttttcatataaatttgataattctctcttgatctatctctttttttgtgaagaagtattgataactaaagatgctttttgtttatatgattatttcttggttgttttaaggtttaaagagatgtggaaagagttgcaggctgaggtggcttaactatcttagaccaaacatcaaacatggtggcttctctgaggaagaagaaaacatcatttgtagcctttaccttacaattggtagcaggtactattcatatacgttattcatgtatatatcgttaaaatatcatgtggaaactctgaaatatagttatgtgatgatgtctataattaaaggtggtctataatcgctgctcaattgccgggacgaacagacaacgatataaaaaactattggaacacgaggctcaagaagaaactcattaacaaacaacgcaaggagcttcaagaagcttgtatggagcagcaagagatgatggtgatgatgaagagacaacaccaacaacaacaaatccaaacttcttttatgatgagacaagaccaaacaatgttcacatggccactacatcatcataatgttcaagttccagctcttttcatgaatcaaaccaactcgttttgcgaccaagaagatgttaagccagtgctcatcaagaacatggtcaagatcgaagatcaagaactggagaaaacaaaccctcatcatcatcaagattcaatgacaaacgcttttgatcatctctctttctctcaactcttgttagatcctaatcataaccacttaggatcaggcgagggtttctccatgaactctatcttgagcgccaacacaaactctccattgcttaatacaagtaatgataatcagtggttcgggaatttccaggccgaaaccgtaaacttgttctcaggagcctccacaagtacttcggcagatcaaagcactataagttgggaagacataagctctcttgtttattctgattcaaagcaatttttttaattataataatatattattcttaagatgaaacgtacatcattattattaattgggggtacgtaacgtatatatggaataacgatctagtttgtttaaatttattgatatctcatatatctggatttgaaattaactctaatatgcagaagtatgaactcatatgcgaaagatcctagcgaagtaatcacatttagataaacaaaatttgttattgttacttttttttttttttttaaagtaagaacgtgtaatatgcatgtatgtatatatgtatggatgcctatgtgaaaagagttaacacttaagagtatattgtgcatgatgtgttacgtttccattatgtatacaatatgataatacataaatttacacgcataatatacctattgggcgcaaagttatacacattttaaaatgggaaaatattaatggtgcttttggggccttggcatatgagctgattatatatggtcggatccatatgtacgtggttggatgtattgattgtatatatgcttctttaattgattgtatgttcatcctactttttcgaataatttatgtttacctcaatgtcggattgtgcgaagcatttagctggaaaccattgatgttaataataagtaagaattaacatagatggatttataaggatataagaattaatacctaaccatttgaccaatgaaaagtttggatcaccaaataaatgaattgtgtgcaactctgaacttctcaaagacatgacctctctattcctagcaagtcactagtctgtttcttatttcctcacagaatcaaatgatgatgtcatacgaaaattctctttcccttacgagtttggcacattcgttgcctattcaaaaatcaaatcaaatttagaaagtcctaaaatgacactgtcgcttgaaatatacgtataaaaactctcgcttcaaaaaatcttttgttgatcaaacaatccattcagtactagctagaaggctagttagaagtagactagacttcacggttcaattagatattatctttgatcttcatatattcatgactcatgagatgatataggacaaatgagatgatatatagaattatagataacgatttcaaagagtattacaaaaacaaatgcatcatttttttcttcttaagagtattacaaaagtactctctgaaagacaagaatgttccaaaacattctcttcaaacagcaaaatgacaaacataattattcaattttttttgccgttaatttaatattcctaaatcactcaccaaaatttcactaattaaatagtaaatatcatatccttttatcacaatcaagaaccttattaaatgctttttacttgtatatatgaatgtagctgaaagtttcaaagtacacttcgttatcaaaatttcaaaatatgtcttccaatgaagtcataatcttaagacgcgtggaaaagttcttttcctaatgtacgtatctaagtatttttttatgtaatagtaatatattattaatcgtgatataggaagaaagggacctagtgatgaaaatcatgcacgtaagccactcgcattagtgattcagtggattgtagaacgtgtcattggcatgcgacataatcacctttgaaccatttttcatttacctaccaaaaaaactatattctttttcaaagtgtaaaaacgaaatgtcatagaaatataaagaaagtttattgtcatataaatttccacatttgccaaagctagctacgtaaaatgcatgaaagtagatatcatgtgcatgtcaaatgaatctaaaatgcaagtaatcttttataagtatactactaactaaaacatatattaaagaagagagatctttattatcttcttcactttggttacagtcttttcaagctggttggtcttctttgttggatatttgaagttggaaaaaacaaaaaagaagagagaattttttatttttaataatttgtaatcctacattatataagagtaaaaaaaaacagatgtatagtagaaaaaccaaacaaatcactaaagttttctaccctcccgctttagacgattaagagtgatcaaagaaatttgtttttactgttaaaaacttctgaataagtaagaaaatatcgaaaacattgatgagtttgtgtcttttagttcattaattattatattagttatttaaaagacaaaaaatgacaaccaaaagaaaacaaatttttataactttaaaatactctaaacgatacaatggtttattcatatacacaccaaaagaacattaacaaaaaatttaaaaattctaacatggctgatttttttttttaataatatatcgttaactttgtattgggtcaagctaaaaagcaataaagaaggaaaagagaataataacggagaagaagaaatcaagaaacaaaaaatcaagaatataggaacgaaaactacactactataaaactaagaggattagataaaataatcttaagtaatagataactaattgtacattctgtcaaaacccctcgacgttatgtaaacaaagccatataaaacaatgattggcttggcgacatatagctttacgacaactaacaatgacttttatttatttgcttacatacaagtaaaagactttgtcaaataaaaataattaaaaggacttctacaacataattaattttgattcaataatccagccgatgtcgacacgcactagaagaacgttaaaaaaaattccaaagtttttctttaaaaaaatgtcattgtcttaaaagaaggaaatctcgacgtcaaaaagaactaaaagaaatctgtttgtaacagaagatattgacacttttttatttgtgggaacgaaattttattttagttaaaaggagtgtggaaatggaataatccaattgttctagtgtttgacgatttcttgtcatctgcttatggcaaacagaactgaattttattaaatctggttcacatgataatcatattttgtcgaaataaaaattgaccgttaagtggttcatatatatatatatatatatatatatatatatatatatatatatatatattatatgttaagaaaaaaactagatttttatagctaaccaaaaatatggcatacgactgtatgagaaacaatagaatccacatccactcatcagctagacgtttctacattcttagagtttgaatcaaactatcaagaaaaaacttctatgtcatgacattatagaccaaatcttgcatgcatgtatcgtactacagtctacatacttcatacttggttggttccatataaacttcgcaattgatacactctgtgtatattatgtattcttgatttgccatgtttttctttacattaacatagataatagatctctaagatctgctttagtttgttttcttcgttttcttttttgttaggcctccatattctttttctctttatcccccaccagttttagtcgcaatatatgtgtccgtttttaaaagtgattatgaaaatacaaggcttttgtggcccaatcactttttatggcccgacgagtattggatttttcgcttgaatttgtagcaatttttcgagtcgtgtttattttggaagttacttgcattaatatgaatgcatagactatatgcaggacaggactgactatatgtataattattttctattgttcgttcatgtcatggcatggcatgtgcaagttatggcctaagctcatgaacccacgtgactgtattcctctttgtacatattttacatgttaatcatgagttttttatattagtttattcaaaattaagttcacatcaaccatattgacgagaatttatattatcttggacaaatatgtcaaacaatgacgagacataattccctaataaaaatatgtgaatctacatttcgatctatcgttatagaaacaaccgaccactttgctttttgttatagatatgtgtgatctaaatcatatcgagacaacctcacaaatctcaaaatttagtaatatacggtcgataatacagtggacaaattctggttgggtcgtatgcaactaataaacagcattgaactcaaatcatatgaacatcaaccaaaattctcaaaatcaattttacgtgtttttattatttctttaattggaaaattccttatatgttatacaacccaacgaccactataatgctcctcacatgtaaagattatatgtcgtcacggccgatttctccgcgtttcatacaaaaaggggaacaatatcgtcatatttggaaattttgttaaatctgcgtagtataattcgaataattcgttcgtagaagtaccaacaaaggttacaaaagcacatgaaaattatggaataatatattttgaagagattcactatatatcatgtctacataaagcatcataatctttgaccgatatatcatatatgataaaatgatattgatcgtctataactggaataataattacgattcacaatatgttttagattcatgaattactattaatgagaagttgacaaaaagaatatgtagctaactagctattaatgagaaattagtttttcattctaaaatccaaatgatgaccactattaggcctaatagtcatttcttcaacctgaaataaaaaagtattgattgacatgaaatgcttgtaggtttctaatttatgtagcatatattttttctatttgtttttctgatcaaatatcgtagcatatatcatatttctctggatgtaatataacatgtaattttttccatcgtataatggatagttgtcgtaaactaaactttaatttatgttgttcgttacgttatggactaaaccttctgattcaatatctaagcaaatcgaaagtagttttcatgttatcgtttgtttttatgtgtgtgtaaatatatatatggctaatatttgtatactgcgaaatgtagaaatgtacatatgttatatattttcatggatataaactttccttgacattacaggagatagatatatagatagccattacaaattcaaatttggattgagtgcacttaatgctagtaacacttatatccaaaaaaacaaaaaaaattggctacaaattctcagggaaacatttataaataaaagataaaaaaataatatagttgatattaaaacccaaaaaaagaaagaaagaaagaatatttagtaatatcattatttaagaaaatgtaacaaccattttccaaaacaataaaaaacgattatatatatatatatatatatatatatatatatatatatatattattgtaaatgaaaaaaattggtaggaagatttgctttgtcttaacttggggcgatgaatatactttcatcgttcatcaggtacacggtcggtccatgaaacccggaaaacccagttggagacagttctcttcctcaaactcttgatcctatcatgactgctttttgaaatcactcttctactatctgttgactctacgtactctttgagcctcttcatcgccaaatcaagcgtatcttcactcatgttggcgaaacaaaccctaaaccaacccggttcagtacaatggcacgatgaaccaggtgaaatattcagcttgacgtcatatacaatcttcttccatagctcaagttctgcttcgaatgtgtttgtgtccaaaagatgtctcatgtcaacccaacagaacaaaccagcgttgcttttaagacaagtaatccctgcagcttctagaccggacacgagtttcttctgacgaatcttgagtcttttctggttttcgtcgaggtatgtacttgtgaacttcttgtctgaaagcaatgcagagagaaggtactgtgtttgagaagacacgagaccgaaacttgacatttttgttgcagcggaaacaaccatttcgtcgttggagtaaattgctcctacgcgaaaacctggtaaaccgagatctttggaaagactataaacaatatgaactcgtttggagacttcgctgttctcgaggttcttgtcttttaagacatccatgacacttacaaactgttcaaacccaaaaacggtacctgaatagatctcgtcgcttatgagatgaatgtttttggaagtaatgaagtcaacgagaaggttaagttctcttctggtcaacattgtgccaagagggttagacgggttggtaacaagaactcctttgaccttaagatcaagcttttgagcttgttgataagcttgttgaagagctgactctgttatttggaacccattagagcttgagcaatgaataggtacgatctctgctcccgttctccatttcaagtctctatcgaatctgtatgcataagcgaatcaaatactatcagctcaggtttcttgtgaggcaagtaattaaataaaaaaacctaaaaaattaccctggatagtaaggagttggtaaaaggaaagcgtccccgggttcggcgagacaaaacatgagagtttcgttggcagatgttgaaccagcagctaggacaatcttgcttggatcaaatgttactctatttcctctgatttcctccataaactctgccaaagcctatagataaataaaccctattaagttagttactcgcttcttgatcgagttacttatgaaggtgaaaaaaaattaattacttactttcttgaattcgggtaggccatgatagtcttgaaagagagcaagctctttgaaaatggattggccgtccttttttagtccggctgcgtccggattcttagctaaccatgtctctatgagatcaaaacatagctgcatgcatattaaaaacatcgtattaaacacccaaaaatatacaataattaaagattggtcgattggtcgaaaactcgtagttatagttacctgattttcggcaagacccatttgaataatcccattagggttcttgatttcgtcgtaagggttcttctcgtattcttcccatcccaagaagtaggaagagtcttgtccatgagcattgcttgtcacttttctcgacagttgtttcattttttgatataaaaatcaaaaagaatgtttggtttattgaaagatgactaatgaagaatgggagaacggtaaatgagagagatatgttgaattaggttttagttagttggtgaagactgaagagtgagatgtggaatgtggttgcttgtgggagctatatatatatatacttccgttttttacttgacgtcacgtagctagtaatttattagtaatcatttatcgtcagttagtatatattttgctaatcttatactacaaatctaaagaaaatctctcttcctatctctatataaagttaaattgaaaaagactcaacaattatttcaaattttgaagtatgtgtgaaattgggttaattaaaaacagaagtagactaaaacgttataaaattttagaggaagtagaataatattgtttaaccctcactatatatattattacacaaacacatgagagatataaagaaaacgataataatgataattggataggtgaagtagaatagagaaaagagaaagcttgacacatagttaaacaaaacaaaattagttttgtccataaaacgcgttttcggtcaccgcccatacatacatgacaatgaattagcgaccaaaacaatacaaaatctatttttagatcgaatgtcatgatattgtgttggggatttcaccaattgtgtttcgggagttatctgagatgtttatgattattactgcggttatgcttataatacaaaactagtggacattagagatattaaatctgaagaaaaagtggccgccaaattgaaaataaatagtaaattttgattgggagttttgggaatttgaatatctccgaagccagtaagactaagcttagaaaaaattttaagatccatttcggatttggacatttagatccgaactcgataatttcatgatcatgccactagggttaatcagacacaaggtccaaattaaaaaaaaaagtgtattattcacaatttctggttatgaatcttttgatttaaagatgttattgtttctaatttacaatttttttttgacgattttaataaaagcatacaaaataaagaatagaaagattctaaattattgttagatctagagagttttctataatcttgttgattagttttccacaatcttataaagttttccaaataatctttctattttaatgatatttttgatgactttattttgtaaaggaaaatatcaaaagttataaactaataacataataatttaattcattaataatcataaattcttttattttaattgaataacacaaaaattttattgactttctaaaagtatgaatcaaataactgcatgaaaattttagatcgcattttacaaattttaaactaatacactagattttaataaacttttaaaaaattttaactgaataacaacagattctatataacatttaaatcacaaaaactctatttaattcgcacacaaataacatcccactgtatatatcatcacgtgcttgcccaaaaaaattaaaaaataaacgagcccataataaatgggccttgaacagattctaagcccaagtcaattaacgaaaaataagagacgaaacgaaaacttatgactttgtttaccagtcttcttctgaaaacagaacttgcaaatgcgagaaacatacaatctctgaggttcacttgtcactattagatgaatcagacgccatggaagttcaaaacttttcgagaccttctactgaaatctgtagcggagagagatctcttcactgggaaatcacttcacgcgctctacgtgaaatccattgtagcttcgtccacttatctctcaaatcacttcgtgaatctctactccaaatgtggtcgcctttcctacgcacgagccgcgttctactccacggaagaacccaatgtcttctcttacaatgtaattgtcaaagcttacgcgaaagattcgaaaatccatattgcacgccagttgttcgacgaaattccccaaccagacactgtctcttacaatactcttatctcggggtacgctgatgctagagaaacttttgccgcaatggttctgtttaagagaatgagaaaattgggatttgaggttgatgggtttacgttatcagggttgatagcagcttgttgtgaccgtgttgatttgataaagcagcttcactgtttctctgtctcgggagggtttgattcgtactcgtctgtgaataacgcgtttgttacgtattatagtaaaggcgggcttttgagagaggcggtatcggtgttttatgggatggatgaattaagagatgaagtttcgtggaattcgatgattgtggcttatgggcagcacaaggaaggagcaaaggcattagctttgtataaagaaatgatctttaaaggattcaagattgatatgtttacattggcaagtgttttaaatgctctcactagcttggatcatttgatcggtggccgtcagttccacggtaagctgatcaaggctggatttcaccagaactcacatgtgggaagtggtttgattgatttttactcaaaatgcgggggttgtgatggtatgtatgatagtgagaaggtatttcaagagattctatcgccggatttggttgtttggaatacgatgatttctggatattcaatgaacgaggaactctctgaagaagctgtgaagagttttagacagatgcaacgtattggacatagacctgatgattgcagttttgtctgtgtcacaagcgcttgctcgaatctctcctctccttctcagtgcaagcagattcatggcttggcgatcaaatctcacatcccttcgaatagaatctctgtgaacaacgcgttgatttcgttgtattacaaaagcggaaacctgcaagacgcaaggtgggtatttgatagaatgccggaacttaatgcggtatctttcaattgtatgatcaaaggttatgcgcagcacgggcatggaacagaagctttgcttttataccaacggatgctggactcgggtattgcgcctaacaagataacctttgtagccgttctttctgcttgtgcgcactgtggtaaggtcgacgagggtcaggagtacttcaacaccatgaaggagacgttcaagatcgaaccagaggctgagcactattcttgtatgattgatcttttaggccgagcagggaagctagaagaggcagagagattcatagatgcaatgccttataagccaggctctgttgcttgggctgctttgctcggggcttgtaggaaacacaaaaacatggctcttgcagagagagcagctaatgagcttatggtgatgcaaccattagctgccacgccatatgtgatgctagcaaacatgtatgcagatgccaggaaatgggaagagatggcctcggtgaggaaatcaatgagggggaaaaggataaggaagaaaccgggatgtagttggatcgaagtgaagaagaaaaagcatgtattcgtcgcagaagattggtctcatccgatgatacgagaagtgaatgaatatctagaggagatgatgaagaagatgaagaaagttgggtatgtgatggataagaaatgggcaatggtaaaagaggatgaagcaggcgaaggggacgaagaaatgcggttaggacatcacagcgagaagctagcggtggcttttgggttgatgtcgactagagatggagaagaattagttgtagttaagaatttgaggatatgtggggattgtcacaatgctatcaagtttatgtctgcggttgcaggtagagagatcattgtaagagataaccttcggtttcattgcttcaaagatggcaagtgttcatgtggggattattggtgataataattatgatttaattgaataggaaaaattgtgttggcggatacaacattgaaggataaaaactgacctgttacaaaatacaaggagaaatatcgattacgctatttttttttttcgcgtgcggctctacgtgtaaatatgctttggtgtggaaccagtaggctttggtggtggctggttaatgtaatggcttgaggtggaagacttggcaggctggtttgtataatcctttggaaacagcctgttcgaacttcttgcttggtgcatcgttttcttctaagtttgtctggacgaaaaagcggttccaccacgatgcgctacgcattttagcctgccaacaaaaataagagtgcaagtattaagtcttgtacttgtagtctctatcttgaaaaactttgtgaaagattggtaactgtcatttaagcatgtgtttaactctacagtctacacagtgttttaatcataaagagatgctaatgactaactacataaactaagctaatgccattaaacactaacgatgaaaggtggattcatatttaatcatcaggattcaggagaacagggtatatagtaaacttacgggtcggccgaatttagagagttcagcaactttagctctctgctgaccagggagacctagagcagttgaagttcaagaattagaaaccaaaacttgaaagacatttattagcaaccctttttctcaagttttatgatagtttacctgcaaaaagaaccacaccgtctgaagccacccttgcgagttcaggaacggtcttgttcaggtacttgggtgagagataatccagagcatctgacacaatcacaagagagaaggattttgcccggtagggcagaggaaacttgatatcagcaacacgtacaagacctttgctcacaaaactcttgcagtgagaatctgcatcctcaatatcatatggttcaacaccccatgcttcagtctcttcttctttcaatagactggaaaccactgagcatgtgtcagggcccacatgcaagactttgcgcatgccatctccataagccttcttaagtacaggaatggctctttggacttctgctgtgcaagaatagtcacctgagaattcataacaaattggacaaaaaaaatatcaaacccgagtgtcaagcatttgaatggattaaactgctgataaattgatcgatgcggataaaggtattaacttaagcacatgtactgaacaatgagaaacaaggattacctgtaactttgctaacttctttgatacttttaaatatacctgtgttcgagaaaaaatgaaagcgatgagaaaaatctctagtagagctatacataatgcaaaaagagctatcatatacattacctggaccactgtaagcataaccaatgagaagacaagccccctagaaattataaacatacaaaacaacaatagatttcaattagaaccataccattcatctcccaggaatcgaatcagtcaaggaagacaatgaaatacacaaaccataccacaagaacaaggcaaatagatagtagtggagaagatcgagactttgagtgtaaagctcctgcaaaagggaagcttccaccatcgccaacacgtcttgttgaacctacttgccgtctcgccataactaaaatcccagcaagctcaagctattagatctacacatcaaacactaaattggattaatttgtatccttttttagaattaacattcatagaacaacactaagcaaaatgaacaaatcaacgtggaataaaacaccattctcaagcaaaccaaacacagaaatcgacaaaactaagctaattaattctccaattcacagatccaacataaccatcgacgaaacaaacacataaccttaaaatctattagatcccacaacaaattagctgcgtttcgttctacattaacaatgaatttcaccagaaacaaatccaattacagattgatccatgaaacagctcgcagaacggtagacgaaggaaacccaaatcgagaagaggaagaagaagaaggaagaaatcgaaatctaccttggatcaatgaaataatgagggtttggatctaagatctgagatccgagaaaatgagcactttatcaataaacacacctcacacttgaatttactaaaggaagaagaagcttcgaagtgttaatatcactgcttcaatatcgctatctacttatttatacctgcctctacaaagcgcgtatggctacgagtctatgacgcgctgttacgaaaacgacagcgttttaagtccatttattaatcagaataccaacaaacttcttgccgttttttacacacgtacaagtttcaaaacgacacgcacttctctgattccgtggtacaaaaaaaggaacatagaagcagaagacaaaaccattgtttcgtttcttcttatattctcaacgttgatctaacgggattaatctctcctcttcatcatcgttacgaggtggcctccatttacgcttatgaagctcactcctttcgactatagtcggagacttgagcttcttctctttcattttgtcatcaataagatacagcaactccttcaaaccaactccggttaatgcagaaactctaacatctggtcctttcttatttgcagcatctactttagcaacttccggaactttccagaactcagggtcgtcagcattttcatcttcagacaatagccacccatcagcgtcgtcaccgtctccgttttggatttggtcttcatctactgttgcttcagatgcatcaacagtttcttcagcttttaaatcagcttcgtcttcgtcttcttctcctactccttcgccatcatctagatatttctcttcctccacttcgtcttcttcataatcaatctacaacaaaattcccagtgtgaaaaaaggtggttgcttcttctacttgtatagatggtttatatatcaatcctaccttattccagacttcaatcatattttgaagcttctcttcaggtactccaatttgatttaggacatgaagcactgttgaacgatgctcctcgatatttggagctgttgaatcaactacatgctgcaggggtttaatcatatcaacgccaagtctttctgcagttttctcttctaaatgtaactatggaatattattttatttatttatttagctcttaccagaagtagatcagcttcaacaacttcttccagagtcgattgaaaagctttcaccagctgcaaaaaggcatgagccaagaaaagaaaagtaagtgaaatatcacttgataaaggataagtggaattaaagtaggtatacattacctgtataggcagatctgatatgaatccgacagtgtcactaagaagcacaaagtttctgaaaagaaattgactcttgcgattcagtacaagttcatgtgtaccagaaagttataaacatgattctcaacgtacaaattaacttacccagaaggaagatgggcactcttgagtgtaggatctaatgtggcaaacaatctgcagaggccagaccaaccattcaaaagttatgacttcagtttcaaatttaacagttttaagatagttatgaaaccattgaattataccgctcattgcagtagagagcagtctttgttagtgcacttatcagagtcgattttccctaacaaaagcagataattgatactcagaaagtagactaaaacacttggtttctagctgaaacttcttcggagcaaaattcaaacacttacagcatttgtgtaaccaacaacagcaatggttcctgaactctcaccctctaaccccactcttttcttacgtccagcacgctgcaatagccgtgttcgctgggcttctttaatttgggataacaagcgaatcctccggtctgatattctggtacatcaagattttgtttaacgcatagatttaatattagaaaagagagccatgcactaagtctttcggttaaccaacaattagacaagaccttcggcgttgaagctgaagctcagtttctcctgcaccacctacaaaaccgccaccggttcccttgcttcctgctctcctgcacaacaatttaacaacagtttcatcattgtctcaaaaatcaaaagagtaaagagaatacacaaagtagtatagattaatcactcaccctcgggcactgacaacttcagcttctccaaactgcccaaaagtatggcgtccatcagtaccacgcactcgaaccagtctgctcttattgtacatcaaagcagctaactcagcctgtgaatggatgaaccaatcagctattaataaacctttcctagtatgtaaaaggacaaatctgtattgtcacagtacctgtagttttgcttcctttgtatgcgcatgagcattaaatatttcgattataagacccacacggtctaagacaggttttgcccatattcgctgaagagtcatatcacatgcgaagatacaacattagcttgaacagaagagaaacaaaaactgcacaaacttttggttttcgtggcgttacctctaaattccgttgttggatagcggtcaaaatggcgtttacgaaaacagcatcaacttcttcctgagcatcaagagattgttaacagcatgatccaacttttcattacaagcagcacaaaaaaaaaaaacaaaaaaaaagagattgataatggtgaaatttttagctgcttgccttggaatcttcagcattgagatggcatttgatgttgtctacagtcccagatccaaaataggtatctaagaaaatcgaaacacaatttaaaccagtctctcaggaatatcgtcgaacatatggaaggcatgattcataaaaaaacatctaacacgaacctacgcgaggtttagacgatctacggacagggttttgaacaacaacatgagaaggcaattccttgtcaaagaaatcagattcaaagtacccatatcgttgctcttcaagcgaattcgcgagacaaagcgcttcgttcagcttcgcttgtagatactttggcggtgctaaacgaggctgtacaaggaagagcttaggtgcgcttgaaggatctttagggtttaacaaaactgaatcttttggagtcgactcttcttctatttcgcttgtcttaggcgtatgccgcttcgaagaaaatggagacgatgatggcgtttttgacctaagacggtctcgagcaagaaaagatgatggcgtttccgacctaagacggttccgagcaagagacactgtcctcaacattgagatacgattgaaacgacgattacaaaaatgggggttgttatacaagaaacttgcttgattatcaaggtttatgtgattcagccaaattccaaaacttgttgttacgctcatccacaaatatcaaatatgatcgtcaccggaacaaagcttctcgttcgtcaccggagcagtgactttgtttgtgtgaagactcgattccatttatatttagccttggatcggtttatttgtcggttttgagactataatcgaattaaaccggatatgtttcggtttactcattcggttacacaaaattggcagtgattcagtaataatctcggtttaattcggttgagtataaattcctaacaacggtgccgaactaatgtgatgaaacaaagcaaaaacatgaaacactgtttaattcagctacaaatctaaacatgcttcttttggaaatgttacaatgctttagccctacttctttcacctcttcccttatacctttgatgatctgtccctttcttctttccttctttattccctttaggtttagctttctcaatcaaatcctcctcacctttcttcttatacatcttaaaactcatctctctctcacttgccatcttcaccaccttctctgtaatctctgcagcgatcgtcctattatacagtttattcaatcctttcataagtttcgcataagtattaggttgcggcatcaaatccatctccatcatatcaagacaatacgaacacgcttccttcacgtgaccttttgcgtacaaagcatggatccatattgtccaagctgatacattcagctcacaggaagaggttttgttggatatgcaactccatacatctttcgccatttcgagcttatcatctctaacaaggttattaagcaatgacttcagcgttccatattgaggcgcagagaatattcctcggcttaccatttctttgaagtgattacaggcttcgattaggaaaccttggcttgtaaatccgttgatcataataacaaacgtatcaactccagggcttagcccattagcttccatttcgttccataaccgaacagcttctttcacttcccctaacttacaagccaatcttatcactacattgtaaatgagaagatcaggatgacaacctcttcgcttcatcttctcaatcaactccaaacactcttcaaattgttctttcttctcatgagccaccattatctgcatatatgttacttgcgacggcatgactcctttctttctcatatcatctaaaacactataacctttatcaatcattccccatttacaaaacccacttatcaacgcggtataagtcacaatatcagcctcacatccatacctctccatctcaacaaaaacccgcatcgcctcatccattctcttctccgtcctacacaacgcctggatcaaaaccgtgtaacaattcacattcggctcaaaccctctctttctcatatcattcataagatcatacgcatccgccattttcccagcatgagcatatccactaagtaagttagtgaaaaccacaatgtcaggctcaagcccagcttccttcatctgaaccaaaacttctttagcttccatcaacttcccttccctacaccaaccatacaacaacgaagtaaaataccgcaaattcggaggaaacttctctctcatatcctcaaaaacctttgaagcctccttaacactaccgttcttacacaaagcatctaacaaacaaccaaaaacatactcgtcaggctctaacccatacttaggcatttcgtcgagcacctcaactgctttcttcaccatgttagcagaagcaaacctccgcatcaatacaacgaacaactccggctcaatcaactccggattcgtcttcctcatctcttcaattaaaccccaaacagctccaaattgtcgcattttactaagaatcatcaccattgatttacacacttcatagctatgaaaataaccaggttgcttcgttgcccacagaaagaatctataacctagattcccagcatcgccacaacgactcaacactcgtatgatcaacccgggtcgcagatcaatacctgattcgttaagagcaagctccaattttggaactctagaatggtgattccgcaaaattctgtaaatcttctcgacttcaccggcgaattcatcttcatgcttctctggacaaactaaaccaaccccattctttctctctgttgattctacgaaatcgttattgagaactcttgaaatatggaaccttttacaaatgagatcaattctagaatttgcttgagaagatggttttttgctgatgagaagatcaacaatggtagagaatctacgcatctctcacttcacactctaaaacgacggcgttttcgtcttataaagtcttctccttttctctgttttgcaaatatagcagaaaactaaagccctaaacctaaaagagacaactttcttcactcacagagctatagatgactgatgagaaaagctctatgtttaacagagagtttatcagccatagcagaaaactctaccacgttgctcaatttaaaccggagactaacgggtctcactcgttccggcgagaacagaaacgctctcaagctcttcgccgatgttcaccgttgcacaactctgagaccagaccagtacagtgtctcgttagctattactacagctaggcacctccgtgatactatctttggtggtcaggttcattgctatgcgattcgctctggtttattgtgtcactctcacgtttccaatacgcttctttcgctatatgagagattagggaacttagcttcgttgaagaagaagttcgacgagattgatgaacctgatgtttattcatggacgacgcttctgagtgcaagttttaagcttggtgatatagagtatgcctttgaggtgtttgataaaatgcctgagagagatgatgttgcgatttggaatgctatgattactggttgcaaagagagtgggtatcacgaaacgagtgttgagttgtttcgagaaatgcataagcttggtgttcgacatgataagtttgggtttgctactattttgagtatgtgtgactatggttctttggattttggtaagcaggtgcattcgctggttataaaagctggattttttattgcttcatctgttgtgaatgcactaattacaatgtatttcaattgccaagtggttgttgatgcttgtctggtgtttgaagaaactgatgttgctgttcgtgatcaggttacttttaatgtggttattgatggtttggctggtttcaaaagagacgagtctttgttggtgtttagaaaaatgctagaagctagtcttagaccaaccgatttgacctttgttagtgttatgggttcatgttcatgtgcggctatgggacaccaagtacatggactagccatcaagacaggttatgagaagtatactttggttagcaatgccactatgacaatgtattcttcttttgaagattttggtgcggctcataaggtttttgagtcattggaagagaaagacttggttacttggaacacaatgatctcaagttataaccaagcgaaattgggcaagtctgcgatgtcggtatacaagagaatgcacataataggagttaaaccggatgagtttacttttggaagtcttttagcaacctctctggatttagatgtcctggagatggttcaagcgtgtataatcaagtttgggcttagttcaaagattgaaatttccaatgcgttgatatctgcctactcgaagaatggacagatagaaaaagctgacctattatttgaaagatctctgaggaagaatcttatctcatggaatgcgataatctcagggttttaccataacgggtttccttttgaaggtttggaaaggttctcgtgcttgctagagtcagaggtccgaatcctacctgatgcttatactctcagtacccttttgagcatttgcgtaagcacttcatctttgatgctcggaagccaaactcacgcttacgtccttagacacggccaattcaaggagacattgataggtaatgccctcataaacatgtactctcaatgcgggactatacaaaactctcttgaagtgttcaatcagatgtctgaaaaagatgttgtgtcatggaattctctgatctctgcatactcgagacacggtgaaggagagaacgcggttaatacctacaagacaatgcaagatgaaggaaaggtcattcccgatgcagccacattctcagcggttctctctgcttgcagccacgccggtttagtggaagagggactcgagattttcaactcaatggtggaatttcacggtgtgatacgaaatgtagatcatttttcatgcttagttgaccttcttggtcgagcgggccacctcgatgaagcggaaagcttggtgaaaatcagcgaaaagaccatcgggtctcgggtagatgtgtggtgggctttgtttagtgcttgtgctgctcatggagatttgaagctagggaagatggttgcgaagttactaatggagaaagagaaggatgatccatcagtttatgttcaactgtccaatatctacgcaggagctggtatgtggaaagaagcagaagagacgagaagagccataaacatgattggagctatgaaacaacgaggttgcagctggatgagattgtaattgacttcggtttaaccggttttattgaatcgaaaaccggttatcgttttatttgtttatttaatttttttatagaaatagaaaatttgttacaaaagtgacataaaatttgtagggagataaagaaaatttgacgttcaacttttgaaaagcataatcattagcctctgcttattatacaatggggatgatgatgatcatggtatcctaaagtagagttattggtattattatgtccaaacaaaggctgtaaaaacacaaaacgcagcgtttaatctatctgacaaatccactggcataaacgtacccaaatcagtattagggtccacttgtctctcaaaaaaaatcccgcgatatccgttagtaccaacaatattataatttccataattattatttctcatctctaataatttcttccaaatatttctcagtataactaaatttcttccatatttactaatttacagaatattctcataccttaaaacagaactgaaacataaatataaaagaatagaaccacatacagtatcaagaatcttcttcaaagccgtaattaacaatcaaaatccttaattaagaaaaaattaatcttacgtttagtaatcaggcatagattgactaatcttaccttcttcttcaacaatcttcttctcagtaatcctcaaccataaacaaacaccagtaaaactaatcatcaagctcgcgattccactcccaagtccaatcccaacaatggccatcacagacaaacctttactcttcatcatcatctcctgcaacggataaccatacaatcctttattccctataaacgaactcgcgttaaacctcgggaaattcccagtcctattcgacaaatacgtcggaatctgaccggaaagtttgttattcgacacatcaaacgccgagagcctcgctaatagacctaattgctgcggaatctgaccggataattcgttatcgtggagatcgattacgtttaagtaagcgcaaagagcgagctgcggagtgatttcgccggagagatgattcgatgagaggtttagtacggcgaggttaacgagatactgaatctccggtgggattacgccggagatctggtttgatgatagatctagggattggagatttgtacagtttgatagaaacggtgagattgagccgcggagagagaggtttgtgagtgagagtttgtagattcttccgttgttacaggtagctccggggaggtatgaggtgaagccggagcatggatttgagaagacggagtttgtccagttacggagattactcgccggatcttctaagttttgccggaggtttttcaaacacgcttcgtcgtttggatcggcggtggttaaacgttgtgccgtttggaagattagtagaaggagaaggagtaaccggtgactccttgtcatttttaaattttagagaggtttcaaaaaggttgaagaagaagaaagtggaactttcatgtgagtgtcaaagaaaaaaaaaacggttacagaagaaatttgtagttgatagaggcgcgttttagcagaagtgaggtctgcgtaggatagaggtgagaatattaattaggggattaaattgaattgattgctgtttttcaactttaattattgtataaatgtgtattaccaacaaaacaatactcatgattagatcctaatcatgccatccattttatcaactgacaataagtcatcaagtttagaattgttctcggtcttcttattaagtcgccaacactattttttaataaaatgagaatggaacttaatagttttagaattgatgtatagaataatagtgcagtggactgtttatgtacttttcgtgtgtttcgtatattaatttttaatttttttagagttttataattaaaaaaggagaaaaggaaaatcatgacatccattcacttaaatttttttaaatacttatatttttgtccagtaattgggaaccatgtgtagagtgatgatattgcgagttagaaacgagcgtagaccgaacaggaaatggccaatagagcattttcaccaaattcgtgaggtggtccttagtgcgacacactcttttcactttccattaccacaattaactattcttgtagaaaaaagtcatacattatcgattagttgacaatttgcatgttagtttacaggtgtataaaactactcaaactgttttagttatgagcccatctttagcccgtttataacttttgtaaagcccaatgcaaagctaactcggtcacatatatgacaagcttgggggtagtagctcttgatggattcacacgtctagaatgtaagaaagttagtgtttggaatctatcatgtgttctctttgaaagcgacgatcttgaatcttctaattagttacttatactacaaattatgtatcattaaattcatacgtatgatatgtaatgaatgtgaatgagaaagaccaatgcatgcactagcatttatttcaattaactatcacaagcatgtctcctccttattttttcataatgttcatgcctttattatgtctcaattccactcaaaacgtaacaaaaccgtttgatagacacgtatatatagtttgcatgcatttcgcaagtctagtctatcaaactcttcattttcactaatcgattttgatcactaatcgcataacaaaaccatgtcctcacacaaaaataaattgcttttgtcatcatcaatatctaatagagatgaattagagttagctatgccaacaaatgttgatgataaaatggtggtaccatcattgctacctttgccaccaccatatccgttatcatcaaaacagttggctagatcttcctcgttagttaaatcatcgtgtataatgaaatggaaaaagacgggaaagagacgagaagaaaaagatgatccttttcttattgcgttgagaaagtgttcaaacgatacaaaaaaattgacgatgatgaccctttttttactgcgatgagaaagcagggttctaatgatataaacattgccgatgataagattgtgtctaaaaggaagaatagtcttaaaagtctagtttcttgcaaagctccttctgtcaaagattgattttgattccaaattttttattcattatttaagatatcatctctcttctgtttttattttttttaccttaataaatattttaaaatatgaatatatatcaattagtaaagcatcttatcatgaacataaaaaggtcttcaaattattgaattttctctctttttattctccatctgtcgttaaattataagatcatgtaaaaggttccaaactataagtaaaatatctcaagttgtctaaatatcaaaatcagatttttagttactctttttatctctttcctttctccaaagtgaaagaaaaaatagagacagccaaaaatatcgcaaaaaagattttagtttttgttaccaaaaggatcatttcataccaaaatttgattaatcgatctctttgaatgagtgtaatctagcatattatttaaatagacttaacgtatgacaccattatatatctacttgttcacaataaatgaaagagtttgaggtacaaatctagcatggtgcatggagaaccctaaatctcaaccttccggccaccacaaatggattacaaaataaaaacttgaaataaaaagaaaaagacagattcatcaacactcagctttgtagttaagttgttgttgtgtatatatatgaaccacatttggttattttcctttaaattttcattgtctgttttgttcacgatttgttatgccccttttacatcgtattaattcaatgcattcgaaaccttaaatatcatatcacaacctttaaagtttacgccagaaaaagtattacaaatgttagggaaaagcattttaaaattttgttcatgacttaaagttggctactgtctactgtcgagccgattcatggtcaaatcgtggacgacagatatttgagaacaaaaagtagaaaaatcaacaataatgggtatgaatacgtgtcatgatttacaccgtaatctttatttatctaaatcaaataatggccgcatctttattcttataatcctcactaataatttcccccttcacatgcattaacacaaataataaattaagacaatataatagttttttcactttagacttataatatgtttaatttgataacaatggtattgttattatcatgtctccatatctcgtgaaaggttaagagggcctaaaacttccgctcctgaacatatatgtacacatatatacgtgcccttgtgtgtgtattaagagtttaatactatatatcttagctaattaggatttaattaagtgtagttagtacatgattaatgcacctatttggtcatcaaaccatcattatcatcaacctaactttgtccctgcctatatatagctaagttcgtgattcgtaccatgtatataaaacttaacatctagtggaaataaattcatgttatcttacaattactaagcctctttattttcctttaagtgcttaccttagaccaaaaaatacataaattatcatgttcaaaaactatatatacttcgaatcgaaatatatccattagcccattaattaggatacaaaagcttaattataattaaaagcattgaacctattaagaaagaccgaaacaaagataatgttttcagggtgattaagactgccgagaaattagtcgacctctttacgaataattgaatttgacctccttattcaaaatagtatttaatcaggccatattctcatattctatattttagaccacgaatttatatattaggataccaagacccatctattttgtcgttgcacgcgtcatttaatcatttttcaggggaataatttacatttgatcactagaaagttgtaggataggaatcttacaaaaattaaatcactgtttcgtgtgtgacgttttagaatttatgcttggaatatagctaattatgctgataacattcttctttttttcgtttaacttgtaatatattcctctcaacttatgctgataaaattctctatcgtaagttacgactatagaaatgatcaccctcgatcatctaaattctacgagctagagacctttattgttagaacttaattatgatatcgtagtcatctatttcgtttgtgcttatttcttgaatatataatgatataaaggtatattcaacaaagctaaacgaaaagaatagtgaaaagaaacaagtagataaaggttatcgacaaattctgccagtaacccatttcttcgttaacaattttaaacacgtcaatataattaattaattatttatttattaatatataaaaaacgaaatctaatttgataacgtatatccatgcatttttcaataattgtttttacaaattgttcccattttaccgtcgaaacaatttcagaaacctcaacttatgataacatgatcgacggatcttgctggaccgtaacaacagtactgttattacaaggccaagtggcacagtttgatgagcttcgttaggtttgacgaaacatcaaaacttgtctgatgttcaacaacttatcatgcagtatacggtgctccataagtagacgatcattttccatcttcgttcgttgacaatggtataaaacgtaccgaagctggttcttcaattcttggttctgaattttgagttggtttagctggatactcatctcctccaagtgcttttgtttcttctctcttgaccgcttagccgattcccggttcgataatttccgtttctttttccgctcgtcggtattgtcggtcggagacatgtctgaaccgatctggtttactgaaccatagtcatgggtcgaaaccggttttggatcgattaatgaatcgaagaccgagaagaggtgtgaaatgtcccatggagtgaaactggtttcaaaagctgggaggacagaggttaatagacccggttcggttgagaaaaccggggaaatagtagacatcatggtgcttaaccggaaaataaaagagaggacaatttaaaatgatctcaaaatgtagagatgcgagagagattagaaggggaaaagggaagaattgcattgttggaggtccatatttatggacgagagaatacacacatgaggctattttggtcagacattagtagaatattgatgggggtttttcctaataactttttagatttacttttctttttctttttatctttttttcaaattttctttttctaagaatgaaaagagaaagaccaaaagatgaggaaatgagtcgcatcaggagaggaaattgttggacacgtgtcggtgtaggattagatgtaactcagaagtttaagtttaatatttcaagtatggagagccaatcctcgtttcctcgtaagaacacttttcagtttttacgttttaacttaaagaacattggatagtacgaagactcaaatttaatattggtctttagatcttctatgaacgtatgattgttgaacgtgatcttcgatgtttaaaggaaatcatttttgttagtgtgtttttactgtttagctagactttcaaataggaagtagagacttagcttgtgtattcaacattttctttcttctttgctaaaagttgatagtttcgatcgtaataatccaattagataattttatgtaatattattgtatgttttgggattttgttttttgatcgtgttctttatttttgcaacatgtgcaagtctaaacctcgttacaaaagttgaagaaggaatcttagttttttttggttaagattcctttcttttatggtatatgtaactgcaaatatagttagtgaaatctacgttctgagacagaagataaagttatggaccaaaaagatgaaaaagcatcctatagcattaaaaagaagaagagatatacttagtttgctgttatatatagtgatatgcatgcataccactgtattttaattttaattttatttttattggtcggcatacttttgtatttgaaattaatctgatggattactatattctagctaggtataagatataaaattgttacaaaaccggcaaaagtaaaggaacttggatctatctaattaggaaagttacaccttgaatttatattgggatatgatttaatcgatgttattacgtcttgttttcaaatacagtctttcgaaaagttgtcgtatgtatttagaaaattgacagtcctaagattttctttatttccatagagatattgttgtcttatcatccgaattcaaattcggttgagtgtctatatattaataataaaagaaaaatcgtaagtgctactgaggaactaatttgattcataattactatttgctaattattagttataccaaaccaaaaagactagagggaggggagggaatattcgcatggcagttttcttaacagcaaagctgttttaaagaagccgttcctaaggaatacaacaaaacaagaaaaagcatggcttaataatcaaattctttcagctttataatgttttcaagtttgttggagatcatgttcatgtgcacgaccactttaactttgttcaacaaataaaaactaatttaaagttatttgtaaccaatagtaataacaactttccttaaaaaaactgaccaatagtcacaacatactcatacgaaaacgaaaaaaacaataataattttttctgaaataaaaaaatgtaggtattagtttcgtgtttttaacgaattagtcagtaaaaactatagttgtaacctgtagaaatgatgtcttctctattttactactacaataatacatctaaacaaaaaaacacaaatagaccaaaatttgtaaattttgttgtaatttatatcaaaaatcaaaaagaaaacaaatttactatatattttgctgaaagaaaaagataagttgtaaatttactatatgtttgtagtatatttactacagtaaatcctgtatagtagattttgtttgcaatttactcgatttttgttgcaaaatttgttttctttaagaatttttaaatcgaatccgtataaattaatgtttacaactaacttctcaatttttttttaaatatatatatattgttataaattttatggtatactataaaacaattcttaatataaagcatgtactaacgaagccggcactcccggtattggatatggtgttaaaataagggtaatattagtagataaccaaataaacatacaaattaagaaactagcagagaaaaagtttttttttacaaaataaccatggacccactttgtcggaagaaatgaaataacaaagttacccttcatttgttgtaagataaacagtaaacgaaacacatctgtgtaatttttcaaaatagcatgtaacattaaaatttcacatgttatatttagtttaaaaacatgctatttcaaaaaacgtcatgaatttttaagaaaaaacattattatgaattttttttacatgaacataatctttaaaagaaaaaattatatgtgattttaataaaaaccgtgtattacaaaaaaataagaatatatttttaaagaaatcacgtgtgatcttaataaaaaacgtgtattactacaaaatatcatgataaaaagagatattaaactgaatagaatgtttttccaaaaaataccatgtgctttttataaatactatataataagaaaaaataacaagataaaaaaaggatattatgttatcgcatgtatttcaaaaaaaatatattacaaaggatatttacgtaattacatgtgttctccaacatatttccgacaaggtactctgactcaaggttagtttgtacattcttttcaaatctataatcatttattataaattctcttaaaataatggatatgagatgggtcttaaatgatccatatatatcagtgctgaggggctaaaacgcatggcccattatacttctaaaaaagaagtatgttattgtaagtcagagacagcagaggtgtgagggccaatttagatgatcttaagcttttttctttttttaatcttattatatcactagagattattaatctaatcttattacgatgataatcaactacctacagaaaatgcgattatgttctctcgcaaatcttcgataaactttataccattaatttgtaagaaactgtgttttctgagactctaactccaaacttaaatgtaaaagtattcatgaatttttggttaataattggactaaaaagacttctaccgatgatattaagttaataaggatatataagtttatattttgtaaaaaagaaaaatttggttattaaaaaaaagtttagaattggacaaactagataacatttcaaccgtcgtgaaatctttgaatcttcgttgttatgtatatgttcagtttaacaatgtagtccatatgatttcatttagctgacttttttattagtatcaccaaagaatttgtttttcaggtttgtatgtaggatactagtcttgaggttgacatattgttgacatggaaaatctgcgtacagcttctctctgcggcgatgttgttgtttacgtatttttcagatctcatcacactgattttgttgataatgctgcggttttatattcagaagaagaacctttgccttccgctttaaatttgtaatccttcagactctaggaaacaaaacaaggatgagagttttctgggatatcttgtgttgatcatgaacgaataggatgtactcttccatgaaagaagtcttcttcttctaaaccgtcacgttcttcttcttcctcttccatggaggaagctacttagggttcgaggaggaatttagatgagcaggacttgtggctcgaatagagtttgatgtggatgattgaattgctcacttattatattatcttgccctaacttgtactcttctaaattggtgactattgggactaagatatatgtcaatcttctatttcctagatttacttagatacgatcttatcttgtataagaaactataaatacttctcccttctattgaatacaactagacattacaacctatatttcatggtatcagtgagcaatcgatgaaatcaccacctatgttctcgttcagcctatattgtttacttaagtggctctcctatctcttggaaaacaaagaaacaagacacagtttcaagctcatccacagaaaccaagtatcgagcaatggcttatacacttaaagaactcaaatggataaagccacttctaaagacattggggtttgatcatcaacacccaattgagttacattgtgacagtcatgccacactccatattgatgctaatccggtctttcatgagagaattaaacacatcggttcaagtcagattgtcataaagtatgcaacgctgtggaagacaaactgatataactacaacacatttctacaaaggaccaagtcacaaatcttttcaccaaagcctttccaagaccgacgttcaaacgactcttatatctcaatcttctatttcctagatttactgaaatacgatcttatctcatataggaaactacttgtgtataaatacttctttcttctatttaagacaacaagccattacaacctattttcagtgaccatgcaaggcaaatcatatatatatatatatatatatacaaaaaaatccaaaaccctttgcctaaattttttcaaataagaaatggcagaggataaaaattcttattattaaatgaatagatttgattgcttggttattctccctaattttcgatttagagcagtaattggagatttccgttgcagattaacagtgagcagatccatcttaattttcacaaacaatttttcaataatcaatcacgacacactaataaataaagatccaaatatttagcattacaatataattataacagcaataaataaaggtctagctgcattaacataggtagcattcgaacttaataacacgaacaagtaaattaggtttaaggatatttagcattcaacttaacttttcatatatgaacgttagattatatgcatcatcctcgtcgtcggcatcatcatcacctttgtcactcgtcctcatcgggttcagtagtctcgtaagaagcaggtcccaactggataccatgatgatttatagcacgcctcaacttctcgagttctttctccctatcaggcgaaagcggaaaaggcttcacaaaatcgcaaagagcattatagtaatcatctacctccttttttagtagatctagggtaaaactttgcagttcgtcaaatgttaattctccaagtgtagaaggttgtagggagaatcctttagaatcaccaacttccttccaccttttatcaatcttataaaagcactcataaatactttcaacatattctagaagatcagcacaggaacgaccaagtccttcctacaaaacaaaggtttaatatatcaatatgatctaatgataattacagaatctccaagagtttaatatatatatttaatcaccgtgtccttgacgtattctattgcattccaaatactttcttcaaacttttcaagagacatctctagagttaatgggtttagttgatgaccaggctccagatcggcgacaaactcaccatcggactcggactcctcctcctcttcttcttctacttccactggctccgatatggagtagaagtaataaggacgaggatcttcgcggtcttcgattttacacattagcggacttcaggtatcaagtacgaacacgacaggatcgagatagagaaagagagattgaagtacgagaaaagacaggataagatcagagacaatagacaaatggacagcttctttttagggcactagggatttccgtgacagtaaattacgaaaataccctcattgaagatttttttgttgagcccaggtttttttttgttgttgatcccaggttcttgagaaacaattaaacaaatatcgaacggtaacttaaccaatgagctcaccgagattttgataagcagatatttatcgtctacgaatagcgtgaagggtttcaaatgcagagaatcttcttcgtctttgtcttcactctccgaatctgacgacattactccaactgaaccggaattggtctcggagtcttaaatcttcgaggccttcacctatatcgtcatcatcgtcgttgtcagctccgtataatttttcgcgattcatcgccttacagagagaaacaaacgtctgtagacgagaaaattgtatcgaagaaaatagaagaagagcatgattgcatttgcatgcatgaacaaaaaagggttcgttaagttaacaatggtgggatcagaaacaaacgggtcgaattagcttggatcgggttggactattctttatactagtagtgggctttaagcccatatgttcgacatttgaaaataaagtttaccaataacagtaaccggattattaacctgttggtttgaccacaaaaatttcggtttttattcggttaatgctgacggttcacaaaaataaacacctcttatttttttatttttttttgaataaacacttttttttttttttttttgaagaaacttagtcatcattaaaatgtgaacgtcttactacttgtaccatattataattcgagtgttcacatgcaaaccggaattttcagaatggccatatggttccaaatttattatattcgcaagtgttataacatgaaaaaaaaaatttagatgtaatggcaatggtctagccaaaatagtaaaaacaaaattaaaaaacttctgtatttaaatactgttttaaaaataaaaaattagatgtaatggcaatggtctagaataaaaccgtattaaaaaactagtttggagtaaagaaaatacggttttattctctgacaaaacatatattctctttattgttattgaatccactctaatttttttggttagaatttaaattgaaaagtatggaccaaaactcatacttcttttttcacaacataaattctaaccaaaatattttttctatatgagtatggacctaaatttctttctttttgctgtatctttacattccaaggttcgctaatgtgttagcagatttttaggctaaaaatgtcttattgtttgtaatgctacctcctataatgaagttcaattctttcagtaagggaagtaataataaaagatgaactgaaaaaaaagcactcaagaaagtccaaattgttttggatttggtcataaatctcatggtgacatttatgaattatctataaaaattctatatcaataaaagttgacaaaagaaattatatatatgtatcaatcaattttcgatttgagataagcataattttattcatttttcatgtggttttaattgttctcacgtatatgtttgaccattgaaatcaatcagttattactgtttggcgcgaccttaactagttagtcatcgaaatcaatctagaagactaaaacggaaatgagataattattaacgtcaagaactttctattcttactaaattcaacgtaccatatctagaataatggattttatcttcactaatctacaattaaatatttgttttttgttaaatgacataaagataggccggagcttctacttctagcatattaaactagccacgacatggagttatataaaatttgaaaattaagtaagaaaatatcaagttgctcaaaaaaaaaaaaggggtaagaaaatatcaaaagagctattaagaatttggtaagaaaaaatcttaggtatctgaaaacatggcaagaaaaaaggaaaaggagaattattcatgtccgaagaagaatatatgtttatgttgttggataaaaagaaagatgatcacgaatattttggagttgggatcttgaccgaagaatgttgggttacttaataaatcagcaattaaaaatgcttcttctttaaactttcggtttctgaagatgagtacttcattatctatatgtattaagataacgataacgcttatcaacattcaagggtttatctatcattttccagacctaccaaaaaagacctttcataataatttcataaagccaatgaaaacaagattaatttttaaaaaaaaacaattgagtgatcgaatctcgtagacaaaaaattattttacttattttttgaaatttatttacatgacattaggttaaatggttaaagaggaaagttttgtttcagtttcaccatgacatgtcagaaatttataatttatgtttccacataatcagcaaatgatttaaattcactatccataactcttttttaaaagtaactcttatattaatcgtacgaacttcgaagcaggctggatacacgattaccgactcagttaactgtctcttatgcatatgatcatgtaatctcttatgcatatatgtaaaaagcttacgacacgtgtgacgtattttacaaatgtgaatggaattaaatattcatcatgtgtttgaaaagtgtaagaagactttactaacctcttttccctattcttttgaccagatttttgcataatatatatgccttattatcccatgcgtgttttatgagttttttttttctttttctgaaagattgtccagagtattttatttattccttttcatttattttgtgatcttattatgttagccatttttgttgattgtcacccaaaaaaagaagctaatatatggtcgtaactcgtaatgcatatgttcgtttattcatttatttttcgatagatcggtggtaccttactactctagattgtggaaataaacaaaataagcaattcaactatgacgtgggatgaggttttctatcttcgacgacattctagaataccttacaaaactacaccattcaactgtttttgataaaatatttggtttagtttcacaggtatactttccattcatatgcacgtgaagaggatcattaggtgaaccttttccgctcttgcatatatgcccaccaccaaaccaagtttatttaaccctcgacgaaatgtttttttctttaatcattacacacacatttatattattgagatatatgacttgactatgattttttcacattatattatatatctttggttggctataaatctactcatattacatgcaaaacatggcgcacaaataaaactttcttcgcactaaaacatacgataagcataaatgttcgaatagcccactcattgtttaatttgaaacattttcgaaattaaatcaaaatgtgtatcgtcttgttctcatccaacggtcaccttttttccgtggtcacatgatattttgcttttttgagcaatcattcacacacagcaacaacatcaaataatttagtagggccgtaaaattataatctaacacggcatgaataaagagcatcttcttatataattattactaactaacataaaactataattcaataattaaaatttgagcgatatatatgactcgttttatgacgccataaaggtagttaactttaccctttataagtttctatggttcacatttggcagcatctcgctatttgtcaactcgtgtatcactataaattcacctaactggcttcatctgctattcatcctcacatcttataattctctatctctcttctcaggctcccattatctttctctattttgcaaatcagtatgggtaagttcacaaccattttcatcatggctctccttctttgctctacgctaacctacgcagcaaggctgactccgacgacaaccaccgctttgtccagagaaaactccgtcaaggttcgttaacttctttgtctttttcagtatagtactagtcgaaacatatctgcaattgcaaaacaaagaattaatctatcgcagtatatgtcaaagtttctatatatagtacaaaacaaaaaaccaaaaagagtttgcatgcatgctccttaagatttgtttcgtgtaatagattatataatatcacacgatttgtttatttgttaccgcggtagtttagaaattaacaccgacgttcatatgttgttgtatatattatgtataggaaattgaaggagacaaggttgaagaagaaagctgcaacggaattggagaagaagaatgtttgataagacgaagccttgttcttcacaccgattacatttatactcagaatcacaagccctaagtttctgtattagagcaattaattaactaattacattatcaaacctatcactgtagtactttctgttttctgttcgtctttttgttttgttttgtttatgttatggctattttaaagtttcattgttattttgaaagttcttacaccatccttattgatagtctcttaaaacaactattatgttaagagatatatcttataactaacaaaaatatcttaaagtcttttaaataagagttttttgttaattataagacatgtatctcaacataagacttggcctaagagataatcatttataaagatggtcttattattctcactcgtttgtattattattatggattctaatatagctaaaagtattttatttgtaagctaaggtttatattaactattaagtcacaacaaatatttgattctgtccaactttcgagtttggttgtaaccaccagctgtatttttgtcttagaattagacgcgttgactgaggaaaaaaactagttgacttttcttgtgaagacttacttttctaacacctctatcaggcaggggcctttgactgggccacttgattgtatgatacgttaattatgggctaaggccctcaaacacacaaaaatatcaaactgtaattagagtttttattaggtgatttgaatggcgacttggttgatattaaaaaaatattgttgcatcagtctggaagattttaaaggaatttgtttgtgagctttgcatatctctttgttttctcaccccaaataaatcactcgtattttttgtataattgagagggtctcttatttttttcacccaagtgtgtttaactcatccagttaaagaggtgttgttagttatgactacaaaggttttggcaactacttagttatagatgctagtgaacaacaaagtagaagaggaagagaagaaatattgaagattagctcactttgggaatattagccaggatctccacgaccacttactcgacttcgattaccgcgacctccaacaatagtccactgcaacttcttagaacttttgagatggttttaccggccttttcagaggatcttttgtgtatgcgaatattatgagtccggaacatataccattttgctcaattgcgtaatcttgtttgtttcctaactctctaaattaatcatcaataagaggcaataataaggaaaggggtgttgttaaaatgctataggaagcacgttcgagttctatacgtgtctatttgagaagagatgatttatgtatatggatccgccacaaatatttgcaaatgctggtctcggagtctcggacttagaaaacctatgaaccaacaatcacgaacttcctaagtatagataaaataagtatatggaaccaaacccattatattatttggaagccttggtccatctgaaacaatcaaacaaagcacagcttgtagacttatgtactaatgatataatctctgttatggaaaaatcttgaatgacataattgtcattgtgttgagattaagcagaatttgagctatataatctgcctttaacattgctttttgctgaatgtcgtggtatagttacacactaaacgttgcaaatttatgaaaaaaatatatcaaagtataagctgaagttaggtgatcagaccaaatcaggatgagaaagttgttgttatcagcctgtgttttcaggataacaagaaacttctttgttacttattgactctttctcataaaagaaacatgtagaccttgtcccatccacgtcaccacatttactcagcaactatatccataccatatattatccacaaaagtgtaacaaataatgtcccacacttatcattatccaaatatccaaatccaaaaaaaacattcaaaccaacccatttctttctatccaaaaaagtcaaaaacaatcatctcctcaaataaaataaaaaaaaaaaacaattttacatcaaatttgattgatgaatccaagaattaaaccaaacacaaaagtgtttcttgtcttttagcctgaaaatccgaaaatcagtttcttggagtcagcatccatggagcttcaacaatctgtaaacagagagacaaacataaactatgaagaagtgatgttttaactctcacaaatctccttgtctcatttcctctctctctcactttctccacataactctccactttaccatttgctctctcaatcaacacttctaacaacgatctaaccgtctcaaacgttacccgcccggttaaatccaccacatatttccggttactcggtaccgataacgacgacgacacccgatcgatccacgtcgcttgtttcgttgatccaacggtcagcgtttgagacgaatcttgacatgacgatgaccggttcaattgaaccggtttccgcgacgctcttacaaacgtctcaaccgcgctgttacatagcgttacaagcgtttgcttaacctttccttcatgtttcggattggttaaaccggcgaataaatcgtcgaatacgttaacatcgctcgtcttatcgagataaaccgaaaccgcagtactcacgaaacgctgaacgcaatcgccgatcaatctcctcccatcatcagagaaaaccgcgtcgagcaatttcgaattcgatccatcgccggcggaggaataaagcgcaacgactaagttcctcgcaaagctaccaacaatcgccgaagcaaaacccgacccggatttcgtaaagagcttatccataacccgatcagtaaaacccgacccggatccatcatcaattccacggatcaatccaacggtcatagcttgagtgaatcggatcaaagaagaattaagctcatctgatttcgcgattttggaaatctgcttcaaactatttgggatttgatctgaatcggatctgagaaactctgttagatctttggagataacactaacggtttcagcggaatcagaagcagcttcgatgagattgagaagaagagtgaaaagcttagagattcgtttccgtttctgggaaattgaaggagaatgataaaccctaaaagcaccgtaaccacttactgctaataatatccattttttgttcttgagagcgaaatcaaaataaccccttttgctcaaccctaacttatccataaaactacagaatttcgaaagaagattaaaaatggaaactttttatttgagaggaattgtattacccggaatctcaaacatgataaacccttttagctctcattcactttcccgggaaaaaagttgagaaaggaaccaactttttttttttgaaaacagagcaaagactgtaacgactaaagaaggaagtgggagaatcaagaatctctaaggaatgaaaaagagaaagagaaaaagaggaaaaattctgttaggaaatgggaattggataagaattcaaatggtgacgtcaaagtttgttaacagaattgtaacaaaagagtaagagagagagatagtgaattattgggggctgcaagtatctgatgatcagatcaatcaagtaggtgtgatggagacaaatacatgcgtgtaagagaaatccatagggttttattggaaggttcgagcatgggggtttagttaggtgatgataaagtcagttatggagtttttaaagttcaacatcttcgtcaaaatctcaatccattattaaaatgttttttttttttttggtttttgggcaaaaataatacttgtttttatgtatgaactcattaaaaatccttatcaagaaagtgcatggtcatcgtggtagattcgtggaaattttagtaatatgataaacactatcgataatttttgttttttatatttactatctacataggcacatagttttttttttttgggttctgttttcttgtttacatatggacatagttgtgtgacttgtgtcagtaatacataccacaattgggttggtgatagaagctgaaattccttacctcaaatggaaaacccttacctcaaaaaagatcccgtatctttccattgtttcccaatcttttttgttaaactttcaagaaacaaaaaaaaaaaaaaaaaggaaaattctacattacatcaagataatcatagatgatagaactgtaccgaaattgtatatatctaaactatagcatgtaaacgtttgatgaatatagtattagaataagagaaatattgtaattacattttctgaaaagcaaaaagcattaaatatcattcatccttcaagcacgagcagcagcggcagagagcaaaaagaagcggtggattagagctcaagatttaccaaattcatatcatatatatattcaactccaaaataattatatactctaatcaaacggcttttgtctattttaccaataacggatcaaactggacaatgttcttttctcattatcatattttatcaaatttaaatctttgattatttttgattaaatgctctacgtggcaaaaatattccatattttacaaatacggatttcaatttaggatctatccatattatacgtccacaaaaaaaaacagaatttccatactaaaattagtttcataaaaaaattaaaatttgttgaaaattttcataaacttttgccatagttttatcttttttacttataacaaatacttgctgtgatttaaaatggtaaaaaaaaaaaaaggaatatactcaacttcgtttgggacctttggaaatgggccgaccttgcattcataaccttatattttaattttcttatgcagaattaattttcaattctttctaataaataacaagttgaagccaatggataatggcggtggctattttcttacgaatgaaaggaagacgaagcaaaaaattaggtttgaacatgaaatcggagccagacacgtggatggtgaggtgctaacgccttggaagaggcgagccgtcgcgtatcttgtaagtcagatttttcatttttcaccgccaatagagagttctattccacgtggtaacacgtggcagcttcttctttttttccgggctcctccaatctcttcatattaaaaggttttgtctcttcgaccatttcaaagttccaatatattcggagttctttgttttcttttcttttctttttattaaccggatctccgtacccaaatgcattgtaatactttgtgaagaccaaaaaaacaaatatttgccttggttaaaatgtgtacatttgtcaacataaaatcgtaagtcgtaacgaaactcaaattttgatatttcaaaatatactttccaataaataaaccaccaaaatttagttgaagatcgtttagttcaatttcattgtagcatgcaatgaatacattctttttttttgtaatgagcaaaattagcttcaaaatggtttatgatcaaaaataagttaataggagaatttctgagccaccatgtcataactcataaacatcatcatcacaatttggtgctgttttatttacaaaacaaaccatgcatcttttgaaaaggcaagcgtttacaaaaggtattcacaaacataaatttaattaacgtataggatcacaaatatagcatccatgttcgtcatcaacattcaagcccatcgtttgatttctatcttcgtctcgcttacctgaccagccgtgggacattattcttccagagccagccttttggagtaatggtgaggtcttttggaatcaggaattatttcttgtaacttacaggcacatcatcgtcgtcttcttcaagatcactgaacgacacatcttcatcaacatcctgcacaagatggttggtggtggcactaacagttcctgcattatcttcatccttcaaccaatcatcagcatcatcatccacttgaacatcaataactctaggtgaagaaccagtgactaggctctgcaccggcttgtcatggtacgctggtgctggtctttcttcgatgacaggcttatcaacaacttgtacctccttggtctcgactgtgtgcttctctgtctcaaactcagatctctcagccgaatgtattgtttcgacagtgatcgttttcacaggttctggttctgatttgggtgaaggattagtaggttgaaaaagaggttccacattttcactatcagctcctctatcactactctctggcaccactactgtatctttgtttctcttacgcaacagctcgtgagataatagtgctcttgattcaagtacctttatgaaaacgcaaaatcagtaactcacatcatagaagtttccctctttcccattcttatatcaaataattcacattaaaaacttgcaaacctaattcacatgctactagtaaagttcattattagcacaaagagaatcatctattcattgaaacataaagcataacatccaaatagctcgaaaactttgtaaacagaagaaaaagacagtaatgatcagcagtggtgttgagaatcaagctaacctgaggagttgagagagtcaaggcatcatgtttgctgaatataggatgcacaagtacaaagtaaatcctccagaagcaatactcgctcatgtacgcaggacaaagctcaatcctcaaagcagccagactcgatgcaagattctccacagccaacgcatgctcatattgggcatcagtcatttcaaagtctgatcataacagttgtaaaataccacttaacaacaacaccttcatataaaacaaaccctaaactctaaagtgatcagaaaaaactctcaaatacggaatatctaagtctagaccatagtagattccctcatcaacataatcgattacaaattagtgtcgaatctgctgcgaaatcgaaaacgtaccatcaaagttatcatcctcgtcaggaaaaggaaaatcaagccaagtctcaggatgcagagcaagatctctagcaaacaaaactacttcctccgtcacaccaattgcatttccaatcgcaacatcacggttcttcgaatccacaccttccgatcccaattgcaagaaattcgaagccatatttgtaaacttcgataccggtaagtttccagagagtttcgagatcccagtcttaaatctacctccgatctcaacgaaatcgttcctgattccagcaatcagatcctcatcaccttccgcgagatccgatgacttccgagtctcctcatccacatgatccgccgtatcggaagaagaaggaggtggcgcgaggaaagaagcaacgccccatagctgacttcttaaggtcttggtgagttcagagatgtcttccttcacgcctcgtggagactgtgtttgcaacaccgatggcgaagacggttgatctgagccggaattttcaatcgaattggtcttaatcgtttccttttgatcatattcttcctcatcgatcttcagagaattcgcaatggatctagcaagccatgccatttttttggggatctctcacaagtctctcgagtatctctctcttaatccgcgacctttaacgagacaccattgacgctaaatattcaaccttacgaaacgtcgtcgctggattagttaatgagctacgtaaaaatagcccataagattgaaagtccagcccatctaggggctagggtatgcgggacaccattcaatttaagaaacgtcgttgtttaattatgcaaatgggcttagtagctaaagcccataaggtacaatatctagcccatctataggtttggttactgttattctctgttacagagttttatatgtcaagacaaaaactctcacatcacactgtgttatacacaaacccactcaaaacagagatttgctcagactcatttccaaaaacaggacaagtaaaataagcctatgtttatttttgtgttaaaaaacagtagaaattgttgaatgattcacttgtcaaatctcacatttcttttcaattgttcattacaacagtagtagttcagaacaatgtatggagacttttggtctccaccacaacttatgtgctctacttattagacaagaatcaaaattcacatcatactgtactttgagatgtcactctatgcaataacagtgattgatttttcaagaatcacgtttttgatatttacttcgttgaagacaataaggaggctgagaacaaagatgaaatcatgacaattgtctaattcctaatctaagtaaagctaaaagaaaacattgaatgaagaaaaaaagattcaaaagcttaaaagaggcttctacaagttcagggtcaaagattttgcttttttttttttttttttttctctgttgtgaatggtcaaaaagcaaaacaacctctcacaagaacccaaagtagagaggtttaacttaatatggttcctttcttcaaattcttctttttctttgttcttctgaaattgatttgagccagaggcggtaactttacacagtttttttctaattcccaatgcttattgcaaaacgaaccaatatggtaacattacataccgatccctcaaccacccggtttcttcgtcttccccatgtttccatcagctgattgcctcttcctttgaattgttaccaccaaaaccaatagctcaatcttcaaactcatcatctatatatacatcagggcaaaggcagattcgtaatgcaatgcacatttaccgtttcatggataacccgctgaatcctgtgatcaatcagtgccaatgctattggattgtccttgtgagtttgcatttggaaataaacatggtgtctgaataatgtagactacaaagcttaagtagctctgctgaccgctgcttcaacgctgcatcacacccgctctggatcacgagtaacagctttgcagcaagaccaacctcaacagcaagtggtgaacattcttctggagctaatttgcagacagaccaaagaatcgacagcgcgtagttagtgcaattctcagacaccctcatcagcaccctaactgtataaggtattgtgtttgcagagtctttgacagcaactcttccttccacgtctgtacacaaagcatcaagaacaaacagagctaactccaaacattccgggtctaaagacggtaagatatcaactaattgaggcactgctccaatgctaaccatcaagcttcgaacttgtttatgaaccgaaatcggtttaagcaaccgaagtgcaggagatactccatttctatgtctcttatccttaaccaatctcattaacccaacaagcaaactatgacttgaaacaagctctgctctaaaccctttctcttccaccaatcctctaatcaatctagcacaattgatcttagtctcattagatccatcattcaacatatcaacaatcaaagaaaccttagctggttgcatcaagccggatttcgaatcagaatcaagatcaagactcacaagaatagcaacaacctcagatccaacagcatgagaagtaaaaggacccaaaagagaagagatcacagagacaccaccttcttcaacaacagtcttcctcgccataagatgagcaataacaatctgtttaagctcactcaaagcatgaaccctagcttgacctttagctttcttcaaagtccccaaaatctcaatagctcgtccttgaacatcctcagaacgtttcttcatcaacacatacttctgagagaaccaagtatagatcaaatgatgaagagttttattaggagttaccgtatcatcccaaagctcttgcattgtagtaggacaagtcaagtgacctaggttaaaccatttgtgaatgtttaacctttcataggtttgaccagtacacaaagtcacaggatcttgcatcggctctaaggagataggacaaatgaaaacagaaggtatatcttgtaaatctagctcctttatcatcttcttcagatccaatttctcatcaacaactccaacaccaccaccattaacaccaccgagaactccatctttcactgcagtatccagatctaagacttgcccatcaccaccaccttcaaatcctattaacccatctctctttaacggctgaaacatcggcatttcgatagaatctatagaaacaaaaaaatctcaataaaaaaacagacttttcttctcaaactcacaacatttgggaaaataatgtgagctgaaaaagaaacgcatgtctttatctcagaaagaagcgttaaaacaacaacaacaacacaatcttcttcttcttctttttcctctttgctttaatttagtttttctcttttcaacggtcaaaaagaagattcattcaactcttgttaataatataacatcataaacacatgattgaaacccaactgctcccaaaaaaaatgtgaattttataaccacaaatttcgagaaacagaaaaaaggaggaatcatgaagaataatgagaaggaaaccaaaaaaaaatcaacgaacccagtacaaaggtttgaactttcaataccagaaaatctcaaaagataaaaaaggaagagaatttgagaaaacccagatgacgaaatcaaaaataaattcacgaattcgtgagaatgacgaagaagaaacccgtactctctcttttgtttgtttgtttctctcttaccttcttctgaggtagtgtgagtgattgttttgtttttgtttctttgagaggaaaaaaaaatggggtgaataaaataaaaaggagaaaaaaggggagagattaaagatttgttgaaagattcgggtggaaaatctaaaaaaattaaagataaggtgaccggtgaattcactggttatagccggtcatttagtcctctcgactcgcgtaccacacgtgcaagctacaccacatgtgacatgccctcacctcccggttttattataatacaactctcttttttaattaccattgaaaaactcagcttaataattttgatttccaattttgtccctaccttttatagttttaaaacgtaattaattaggcaaccaagaaaattctcccaataataaagaattagtaattttaaacacattatttcagtcaaattatacaggagatgtaattgttccttccaataaagtgtggaataaacactttggtatgtgaatgaatagttttagttttttctgataatattttggatttaaaattgggaatatcctttaattagtcaaaaaaagacaacagtgaaattctaaattttcttttagctttttttttcttaatatccacgctaactaaggataaatacttttcccatttatgttaaaaagatgtttgttaaggttaaggattttgttaaaaaaacaaaaaaaatgttgaaggataaacaaaaatgagggtaaagtggtaaaaatgaaagagtaaagaaaatccggcaacgtagtcaaaaaagctgagaagtttgcactaaactccaaacacccacggggaagagtaacccgtacaggtcggggcacgtgtgacgataatttctatgtttaatttcttaattacttttttaatttcaatcttatcatcgttattaattccaaaggaacaactcttgattttttgtttgttataccaataccttccttcacctctttttagtatataaaaaaaattaaaactgaaaaaaaaaaccgaaaccgattacccgaaccgaaaccgacccaaataattggatctaaaaccgaatccgaatcgaaagatttattatattgaattctaaattcctaaactaaaaaaatcgaatccaaccacaatccaaaaatactcaaatatttttattcgaaaatataaattttaccttaaacccaaaattttatccgaaaattcaagtatttacccgaatatattcgaacccaattaaatctaaacctatattttagatttattatattaaattctaacccaaacggatatttccctataatattacttcaaaaaaaattataatagctattaaaaaagcttattgccaaacaactttttgaatcgatttaatctgctgacgaataagaatttttatataaaaacaacatttaaaaattggttaaattgtttcacataattgcagtttcaaaataaaaaagttttaaaaataaatatttttttgagaaatatactttataaatatcacacactattagaaaagaaaaaaaaaacagagaggagtgagatggggaccacaaacaaaagtgccagctagacataatatttgaccgtgacagtgtcttgctttgactataagcgtcgatcgtctccgggtctaatctctttgccccctttgactgttccttttacccaatcatatcccaccacgtgtccacatctgcctcttccccacccaaccttcatttgttaattaatttggttttcaaatttttcatatttttaacaaaacaaactctctaccaaatcaagataatttaataataaaacttggaaattgatgggagtggggatagagaaagagatagagatctgtaagagagaccatgtgttctttttgttgcagttgagtactgacccataactgcaaagtttgctgtccaaacatatatttttatttattatttcattgaaaaatatattgattacttattactggacccatttttgaaatgaaattgcagattcaaatgaaatgattttcagagttgttgataatgataaaaccaaaaattttgtgtctatgacgttttttttttctagtcaaactaagatgatatactaaagtggaccggcaagtgtttaaatgtgatatgacttgttttgtaatcaagtttttttagcctttgggatgatgggagattgatagtgatattataaaaatataataacaataactatatcaaaaaacaaaattgatttaacatatcatctaagtagtaatacggaccgagtgctaatgactggtgtgagtggtggtgactagaggtggacctacgaataaaagcgtaaccatttcatgaaaacgaagtgacgaaaattcaactactgtgtgtcgtattttcgttgttgggatcaacagtttttaatacgtgtgttgaatttgttcttgttttatgtttgttgagctagaaggtttcaaattatgaaagaatgaactgacactaaccaattaagtggtggtctagtggtagacgtcgacatttcaaaagaggtaggtatgatttctgattcaagtcttgtttgggacaagatgatttacgcatgtctgcattgtatacttacgtataatatcaatcgctgcaacatgtaatggagatcgagactactagctcttaatttatgagctaaatatataaagaaactgactctaatgacacttaatcatgtagattcttcgacttgatggggatgagtgggctctaaagacatgatgcactgagcagttcgtgattttggagaatgtgaggaaaggtaactataggaattgatcactaattcgatggtatatcggattggcaatgtaacactcataacttttgatggtagagagtttgtggatgtcaaatatcgttcaactatgagaaataacttgacttctatagttctatgagaatacagtgaaataatgccactttaggtaatgaggttttgttgtgtcaatttataatgatgatgactgcaactaatacaatagaaatactcttgtatcaacttaaaatcgttgcggaaaaggttcaatttgtgtctaaacatatatgagatcacattgttaattgtatagcagattcaaacatatgttttaaagaaaatgaatttactgatatagaagggactaataaaaggcaagaaaattcgtaggtcgattatggaagattaatgaaaaataacaaactaattcaacaataacatagttctaatcaaattgtttttttcttgctttgtcgttatgactttatgccattttattctaccatttttgtctacgctttcgtcattctcggtgttaccaatcgagcccatgacatcggtaaacatgaatacactataatgcattgcctacgcatatgtttatctttagtattttaggctttagctcatttattttaacgttaaagaagtgtgaaacaatcttttaataaatgcaaaagtagaagcacgaaggaataaaaaaggtatataccgcattcctacgcgtattctatatgtttgattttctagccattttagctttggactgtcacgtgagtcgtgacgctctaccccctaaatctatgtctatagtagtatgtacatatcagacacatgcatgaggcacctatatatttgtaaataaattatacactatatgacgtatggattcaatgataccaagagtttttgcttgtaacgcccaagattttcgaaacctacaatctaggatctaaatagtgtacctccagttataaattatatttgtcgctctagataagttagagtaatggccaaatctcgataacaatttatttgtgatctcctcacatgaatttctttggaaccaaattaatcccaaacgataggattcaataatcagttaaagttttgtagtattcgatagtgggttagagtaatgtagtgatgcaaacaagagtgctaatctattgggtctatacattggatcaaatttaatatatgggccgaactatcataccaagcgtcatgctttgaagaaagtagttgaaccaagccattatacccttttaactactaactaacccatctcaaatatccagatttaaattggtgtccatattatatgaaataagttaagactgatttgccaacaaggcaacaacaccttaataaatttaaacatctaactgaaagaaatgtatttaatcatccaactaggtacatttaagaatagatcacattcataattttgttattatcatttacaacagtcatcatggatttgtcttctctttgatcctgtcttagtgtcttgaaatctttgagcatttcttcttcttcgtctcttataatatatttaaaaggttatatatttacatatatacaactttgatttcgatactcttgagaatccaataatgaaagcgaaagtcatagagaaagagaactgcttcgtatggttggttaaggctccttttcgtctgttgatcatggcacgtgacgcctacatacgaagcattacgtcatgctccggcgccggaatttattccggtggtggatcatctggttttggtcaactctccggaaacttccaaatctgcgatccgcctagcaccgcccttcctcgaagctttaccttgacgtcggcggcacatgatcaaggctgtctgacacgtggcggacaacctacgattgcaatgagacaatcattgtccttggatcatcggaagaacaatagatgcgttgttgtgatgggaagaatagatgaggagatgtcttgtgatgatgatgatgagtttcaagaagaagactcttttcttgattatggtaattgcgagattcttacaaaagaaatagaaaaaccatctgttgaccaaaaacataagcctctaggacgattttgattttgatttttaggtttattattaggttgttgcattgtgcttattgagaaatatggatcaaacacttgaaaagaaaaatcattttgtatcatttaatattatttcttgtattacttataattgatgttaaaaaaaattacatacgattctaaaagtggtgatgcaaataattcacattgttttgttaacaaccaatgcagttctacatgattttaatatcatgagtaatttctaaaaacaaattacaacaaaaattaatttcttttaaccacaataacttcacaaaattacaaacataaaatacaaattcaaaaccacaagcacaaaaaataataatttagaaagtttatcaattactatttttgctgtaagaaaaaaagtttctcaattttatttttgtctgcaatatctttacagattccaaaacaaaacaaaaaaactatctttttatttatatatatatatatatatatatatatataaatgtaaacttcctcataagtaaattaacaagaatatatatcaaacaaaatcttgtaattttttaatataaataaagctaaacctttacgaagaagaaagactctggtgattgattctccaaagtctaaacctagtaaaagccaagtctcattcctcgggtgaactcaacaaccgacgatggcagaactaaggttatcagaaactcgagacttaactaggatcgaaagaatcggagcacactcacacatacgaggtttaggtctcgactcagtactcgagccacgagccgtatccgaaggaatggttggtcaaatcaaagcacgtaaagccgccggagtaaccctcgagttgatcagagacggcaaaatctcgggtcgggctatacttatagcgggtcaacccggaacgggtaaaatcgcaatagcaatgggtatagcaaaatcacttggacaagaaacaccattcactatgattgcaggaagtgagatcttttctttagagatgtcaaagactgaagctttaactcaagcttttcgtaaagctattggtgttaggatcaaagaagagactgacgtgatagaaggagaagttgtgacgatttcgattgatagacctgcttcttctggtggttctgtgaagaagactgggaagataacaatgaagacgactgatatggaatctaattttgatttgggatggaaattgattgagccattggataaggagaaagtacagagtggtgatgttattgttttggataggttttgtgggaagattactaagcttggaagatcttttacgaggtctagagattttgatgttatgggttcaaagactaagtttgtgcagtgccctgaaggtgagcttgagaagaggaaggaggttttgcattctgtcacacttcatgagattgatgttattaatagcaggtttgtttcttgatcttgttctgtatttgtcaattgcttagttttaggtttaggttaaaaagattgcttctttttcacgtattgatgctttttcaagttcttatttggattcttgttttctttctgttgtttgcaggactcaagggtatctagccctcttcacaggtgatacaggcgagattcgttcagaaacccgagagcaaagcgatactaaagtggcagagtggagagaagaagggaaagctgaaatagtacctggtgttctcttcattgatgaagtccatatgcttgatatcgaatgcttctctttcctgaatagagctctcgaaaacgatatgtcaccaatcctggtcgtggctacaaacagaggaatgacaacaatccgaggaacaaaccagatatcagcacatgggatcccaatcgattttcttgaccgtcttcttattatcacaacacagccttacacacaagacgagatcagaaatattttagagatccgttgccaagaagaggatgtggagatgaacgaggaagcgaaacagcttctgactttgatcggatgtaatacctcgcttaggtacgcgattcatctaatcaatgcagctgccctagcttgcctgaaacgtaaagggaaagtcgtagagattcaggacattgagagagtttatagattgtttttagacaccaagagatcgatgcagtacttggttgagcatgagagcgagtacttgtttagcgtgcctataaaaaacacacaggaggctactgcaggagaagaaacagaacacgaggccatggaagtttgagaattttgttttattgctttttcaagaacttattttttcaccccattttgtcatggactcatgggacatggttgaacaaaagatggaatttttcaagttttcgagttctcattgagagatagacaacgttttgtactgtgtttttgacggagcgataagatggtatgacaaaaaggtaagattgtggagacgtttgaagggttaattggtaaggctacctaagttctcacctaatgtttgtattcaattggctgattatggtggaaagatggcggttttgtgggtcgaacaatctccttgtagtaacaacggctataagaataagatttggtgcgcggagattgctcttgaaaaacaagaaagttgtgaaatttggggagaagttgagtggtttggtcatgtgcttacagttccttcaacatgttttgttgccaaggttattgctgctactgtttgatgatgaatgaatgtgtcacaaagcttaaatatgtttttttttggtgtatgcagatatgatgatgacatggcttaattttgtctcttttatttatgtgactgcttttactttcgtacgatttcttcatccaaaaaacaaaacccagaaaaatcgatgagtgactcatcatcagtcattgtccgaagctcaaatttcattgtcgtgattctcttcctcaacctcgtcactttcttctcccttgtctcctccaatgaacttgtctttggtaagtttgtgtcggaattgaattatacttttagggctttcttcaattctttatgggactcgaattttgtagtttagaatcaccaaatttcaaacctttttttacataattaagacaattgcgatgaattatataaaaaaagatccaattttgttgtttattagcagctgtgggtgaaactggttcactacaagtgactccaagaacagaggtgatatattcacctggtctgaaacgaggtataacatcgatatgtgagagattacatatccatggattacaaagaagacttgagcacattgatagatatgcacattcactaaagttgactcttttgagtaataatgcttccaacagtatcgacgtttgcttccacaggtaaaatctagtatctgtgtaatctctatgaatcaatctagtatctgtgaaatcttaaagtttacttctttctgattataggaattcgtcgcgtgcaattggaatgtgtcctgataatcagtggaagagagtgtccaaagggttaccttgggttgggataatgtcaccttttgactataagattcttgatataagaacatttggtggctcatctaatgtcagcaccgtggagttggttgctaaacaaggtagagtgcttgtgttgttttgtgttttgcaaaattctaaaactaaacaaagtagagtttgtatttgcagagtttttcatataccggattgtgtttttaatcatggggatagtgttactgagtttggcttctagacttagcaaatcagttgcgttttactatatcggtgcaatgtctattgggattgtcattcttgtaactcttatcattaatcaggtaaaagttttcataacgctatcttttgttatatgtttcatggttttttctctggttaacgtgataaacggttgtgcaggggataaagcgtctaccaactagagggaagagtcgttttcagttatttttctactcgtctatggtgagagttgtcttctctttgagttcttttgtcgaacatgtactaaccaaagccttcttttatattctcagattggtgtgggaggttactttcttcaatacatacgcggtttagttcaagatttgctaatgcagatagaaatcagtgaagatttgtacatccctgtatgtaagttttggtacttgttgttatgtcacatattcatattctggtttgattaatcttaaacggcttatgtaaaattttgcagctggcgattcttttggttgtgtttgtatttatgttgggagcgtggtcaggattttggactgtcaagaaatttgttgtgacaaaagatggttctgttgacattagtacatcaatctttgtctcttggtccatccgagcttttgctgtggctctgatccttcaggtacttcgttttttctctgcttttgcttctgattcatctttgattataaccaaaccttttggtgattgaagtcttgatcttgtgttaattaacagagctctttagatccattacttgctggaggagcgttgataactggaattctcatctcattgattctaaagagtattagcagaaagctgttagctcaaagaatatatgagcaagatgatgaaactgagagttgtagccccggcttgatccatgctacctcgtttgcttctcctcttcctagaggttttgattttttctctttgtgtctctagtggtctgatttctttatactagtccctttatctcgtaatgttgttcttgaagaaccggtttttcttctgtaaatggtttttgcaggttccaacaagaagttgaggacagtaccattatctgagtcagatatctttccttcttcattccacaaaacaccagaagggagaaggaagctaacgaaggaagagttgcaaaaattcactaaagagagcacggaaaatgcattgaaggaattggtttcttcacctggttttggcgaatgggcggtgaaaaatgctaaaagaatcactgtaaatccgataaaggaatcgtcaagtaaatagggtgatactgttaagcgcagaagaaggttcctctggttctgaaaagcaagcagctaggggaacttctgaaccagtcggagagtgtagtaggttgcttgtgaacaaagcaacaagccttgcttatatatagtcttctggaaaagaactaatgagcaaggcgaaaaagttgagagattaacttctaaatcaacaaaatgtaacctttgacataaattgatattgaccaataagatcatacgtttccatgtgtgtagtcatcaatgatgtgaaactcaatactatagtgtattttatttgaatggacgatgatagttggtataataaaggaggaaataaataaagtcatctttttgttatttaacggctgaaatttcaatagcaatttaatttgaatgattccagttccacaaatatgagttggtcatctatatcacatgtaagttttcttagttatatttaaaaatcattaaaatctaagagtagtccttggagagaacatgtctcttgtctcctaaacctcctttattatccatcatcattgtcactaaccctattattattccattcacagcgaagaaaaagaagcaaagagttcgttataaagaaagaaataaaccctcagataagagcataacagagaagaagaagaagatgtcttatcaagacccacaacatcccgttagtgctcctcctcctcaaggtaattcccaattttttccaagtttttagggtatttttgtttcttgtttcttaagtttcgatgttgttgttttgtcagggtatcctcctaaggaaggatatccaccagcagggtatcctccaccagcaggttatcctccaccacaatatcctcaagcgggatatcctccagcaggttatcctccaccgcagcaaggatacggtcaaggatatccagcacaaggctatcctccaccgcaatatcctcaaggtcatccaccacaatatccttatcaaggtcctccaccaccgcattatggtcaggctccaccgaaaaataagaaagataagaaggattcaggaggcttcatggaaggatggtgcgttgaccaattatctctctctttttatattaacatatagttttgaatacttgaagctgatgatatacctttttttggttcattattcataaattttggtatggagtaatatggatattcaaagtctatatgtttggtacttataaaatgtgtatttgttttgtattacagtttggctatgctctgctgttgcgttctcttggaagcttgcttttgatcggaagatgagctgatatttgccgttgaccgtcttgaggatgctattcaattttgtcaaacatgttaaaaagacgtgtttgatatacattttagatctcttcttctggttatgtgtgtccacgttttgggtttgtttctttaattttctttaattttatgaatgaatccgaatttgacttgaggtcttgtttactttcatgactattgattgattcagggtatgttacccatcttttgtatatgtgtgttttatcttttgtataaaagccattcattctttccaactagaggaacacaaaaaaagaaagcaacccaattttgttctctttctcatcaaaaatgtaagaagaagtgactgtatcaacgtgatcaaaacttagcattaccatcaaacttatataaatttatacttacggtccgatatatttccattttccgtctcaaacatatatgtcacatccaccattcctcggttgatcaactattcaatgtacaaatttttataaaaatactactaaatcgtatataatcttgagtcttcacttcttatatttaatgtaagagagtggtttagtatccaccgattaactcggttcaaaccaaaaatacaccaaaatgatatgactgaattgtgaaatcagtccaagaactaaaagtcgatgagctcggcatcgacctccatgaagataaggaaagattcactcaaatcttaagaaataatacggtaaagaatattagacatattcccatccgaaaaataagaagctcgatgaccaaacaaaaaatccgtaattctattttcgaaaaccctaaatttattatattactaaaaaatctcttgtaattgtcaagtttactctcaaaaatcatttttcttgaatctcttgtttactctaatttctactttgcttttactcgcattgttaatttaatttcataaattaatccctaatagatcaaatgggtgtatttttgcaattataaagtttaagacgaatttgtaaaaatgaagataataaagggctcccagtaaagcacctcaaaatcgatacatacttcatcctccaacatgcgtaggtgaatcgaaagattaaaggtcaaatttttgtgtcttctcttcctctgtctcatgccacaatttttagatttcaaactttgatccatgacactctccatagcttcctctctcattcccttcagctttctcaggcatgtcttcttcttcctcttcttctccttgttaatttccccatttccctgatcgaaagctttaatctttttctcgtgcgtgtcttcgtaatctctggcgtttctattgaattactaatgcaattgaaaaacttggggatttcattataaagtattgatctttgtgatgttttcatctgttcacagagaattgaagtcgagacattagaagtgtttgttgtgtgtgtgtgtgtgtttctatagaatttttgaattttgtgataaaattgtgtgaatgggagctccaaagctgaagtggacaccagaagaagaaacagctcttaaagctggagtacttaaacatggaactggaaaatggcgtaccattctctcagatcctgtgtatagcacaattctgaagtctcgttctaatgtggatctcaaggtaaaaacatcaacaactttaaagtgaagagagattatagaaaagttcgaaacttatactattgttgttgtctacaggacaaatggagaaatataagtgtaacagctttatggggatctaggaagaaggctaagcttgctcttaaaagaactcctttgtcgggtagtaggcaagacgataacgctacagctattaccattgtgtctttagctaatggtgatgtaggaggacaacagattgatgcaccatctcctcctgcaggttcttgtgaacctccaagaccttctacaaggtttggtctctcttcttgtatttgtatgaattcttgatgctgtgaatgtggaatatgggaatagtgaggaatataataggcttgttttaatgtgtttgttgtagtgtggataagattatattggaggctattaccagcttgaagagaccatttggtcctgacggaaagtcgatcttgatgtatatagaggtacaatgaagttttccttctgtgtttattcgttgtgtctgtaaatagttaagcattgcttactgcatctatatacaatcatcaaggtcttagtgttgctgtaaattttcaggagaatttcaagatgcaaccggatatgaaacggcttgtgacttcaaggctgaagtatttgacaaatgttggaacattagttaaggtataaagagagatactttgatcgaaatttcctcttgcaaatgtcacaaatttagcactgacttaacaatggttttcttgcgtttgttctcacctttcagaaaaagcacaaatacaggatttctcagaattatatggctgaaggagaaggacaaaggtctcctcaactcttgttggaaggaaacaaggaaaacactccgaaaccggaggagaatggcgtcaaaaatcttactaaatcccaagtaggtggagaagttatgataatgggtatgacagaaaaagaagctgctgcagcagctgcaagagctgtggcagaagcagaatttgcaatggcagaagctgaagaagcagcaagagaggcagataaagcagaagccgaagctgaagctgcccatatttttgcaaaagcggcgatgaaagctgtgaagtatagaatgcatagccaaactcggtaagaattaagaaaatcattgatgttgtatcggttgatatatcttcaattcttcatgttatgtcaagtttcgatcttgcatcgaaatcaacattttacaatcgccgcagtgtttttagtcagtaacagtgtcttctaactcagatgattatgtaaaacctgttccttctcttgcttctgttgatctggttttgttagtaacttcacaggtttctcgtgaaccattttgaaactggtttgaaaagatataaataaggcctttgatttgtatacagagcttatttccgtttccttggatttttagaagttgaaaaattgagacacttatgtttttgttgcaaagccttaagaatagaaaacaacctcttgagcaaactagaccagaccagaccagcaggtgagacagaagacaaataaagacaaactcttgtttcacgcgaaattagttcaagactcatcatcatcattaaccagacaacagaggacgagtaagaagatcaagaagagagaacatatgatgttcttgttgaagtttagttctttgattttgagtgatttacaagccaatcagtgagctgatcaatggtggtagggttcttgcaggatatcatgagacagcagacttctctacttgtaaccgaactaagccccctgcaacaaaaacaaggcaagaagcataatcagatcgagctaaatgagatgcctttagtgctgtttttggagtgttcagatgaataaagagctatacatttcttctgtcaaggcttctttggaaagagctccatgtatgtcaatcttgttcccaagaaccaaaagaggaataccaataagcgaagcattgctcaacaaatcatggagttcacttctcgagacactcaagttttcagtatctgcagcatcaactacgtacctagaaattggaatcaacatgaaaccaagttgtgaataagccaagcaataaagataacagagaaacctgcctctaagatccttacacaatcatagaaacagcgcgacagtaacgttcccacatgcagcggaatcttggttgaccaccaagatcccatagtctgattgcaacattttcttttgtcactttcctcatgttaaacccgacctgataaacccacaaagacgaatctcttcatgttgttccaaaaaaaaaaaacaggttttggatcgaaaaccgtatttgatcaaagatgcagtgtaacaattaccgtaggaatcatgtcttcactgtattcaccagtctaaacaagtaaaaagacatcattatatccccaaccaccatcatataagtgttaaagagattatcaaaatggaagcatagtatacttactgcaacaacattaacaagtgatgtctttcctgaattttgaagtcctaccaaagaaagctccatttcttttgcttgaagattaggctgcaaagtcatattgatcgaaacaaacaaatgaataggtcctcctcaaaatgtcaactaagagaagaagagagagcactaagttattgtctttttacagcgaatctataattttatatttagatagttgaggcaagtagctactttatttttgttagctactttatatttgttcgatatctagtttctatttcagatatacaataaccagagttaagagtttatttctcttcctacagaacgccgttgattttcagaagtaaaattttttttgggacacttatgtttttgtgtttcaaaaattgcaaagccttgggaatagaaaaacaatccacatctaatatacaaagacaagactggaggaccaaacaagaccagaccagcagaagaaggagagacggaaggcgaaaaataaagacactcttgtttcacacgaaaaattgtcaccatcatcatcaactagacaatacaggaagactaagaagaatcaagaagagagaatatatgttcttggtgaagattagttcttcgactttgaatgctttacgagccaatcaatgacttgatcaatgttggtagagttcttgcatgatatcatgaaacagcagacttctctatctgtaagtgatgtaagtcccctgcaacgataacaaacataatcagatcgacctaaagttgtgcctttactggatggtttagatgaagataaagagctatacatttcgtctgttaaggcttctttggacagagctccaggtttgtcaatcttgttcccaagaacgagaagagggataccattaagcgaagtcttgctcaacaaatcatggagttcacttttcgacacacttaggttgtcaggatctgcagcatcaactacatacctggaaatggaatcaacatgagaccaaaattgtgggagatacagagtgaagagaaactcgagtcgaagatccttacacaatggcagaaacagcgcgacagtaacgttcccacatgctgcggaatcttggttgaccaccaagatcccatagtttgattgtaacatttccttttgttactttcctcatgttaaacccgacctgatcaaaaacacaaaggagatatctcttcatgttattccacaagttaggtgaaagatgaactttataagacatgtagtgtaacgcttaccgtaggaatcatgtcttcactgtatccaccagtctaaacaagtaaaaagataagagtagacatcatcagatccccaaccaccatcatctaagtgttaaagagaatatcaaaagggaagcatattatacttactgcaacaacatttacaagtgatgtctttcctgcattttgaagtcctatcaaagaaagctccatttcttgcttgaagaagaggctgcaaaatcatatggaaacaaacaattgaataccgaatcgaaacataaattagataccaaaaagaaccaatctttcatgaaattttacgattgttagaagttagaacctgttctacatgccttgaaaaaacgcatcttttcaactagattgatgttacaccgatagtttcttcataaaccacattaaagatgctatcattcttacacatagctaaaattggcaatctaaaaagaaaacaaggtcacaccaaatgcctaaagtttgctcttttaaaaactaaaagatacagaatctgcctttatttgtagaaccttgtcaaaactagcccacgataagaaactagaccacgattcaaatactattgagctgataacggtgatgtaatttggttgcaacacgatttcaattgaagaagaagaagaaatcttaaggaaggctctttacctacgaagccaattgagaaaagcttccaacaaacccattgatgatgatgattcacaaaagctccgacaaacagatccgcctgagagaattctcctccacggatctctctgagaagcttcttgtcctcgttgatctctgtcgatgatatctctctctctctctgtccagtgacggcgaattaaaagagtcaaagacaatgaatttggaccgttcgattttttatctggtataccaaatcaacggtacagatcttgtttaagtttttggttgatagaccgagaatcatggggttgctatttaaaataaatattttaaatttggattggccaatcagaggagagacacggtgacagatacaccagaagttcggaagaatgaatggatgaattactcaaccactcgcgtttatgaagcgcgtgactaacacgtatgtaccgtccgttgtttttttttggatgggtggtgccgccaaagattttggcggtgatatgatattggatagtgatcgggaagtgcacttacacgtgtcatttccaataatttatgggttgaaaacatatgtttgatgagttcttagtcatgggcctttatttgacccactagtgatgagtcgacccatcaatgattttctcctttttttattttcttgtagtatatgatgtttttgcttacactttgcatttcccatttaggacaaattaacattgaaatggacaaatggtattcaagtcatgtttatcttctacaagatacactatttgctttgtttaaattggggtaagttttttgattaatgaaaaaaaacattatgcttaatcggaataagtaaaacataattcaaaatagctttcacttgctcaaagatacaattatcaagagttggcttcattaaactgtaaacataaataaatgaacagcggagatacaaaaaaaaggtgaagaatgaattggtcaaccactaaagcagttataggtttaacacttttttattgcatgattaattatccaatagttgacaaaaaagaaaaaataattatccaattattgatttataaaaataaaaaaagttctacactagaacatattttaggaaccagagctgtaatttaatactagtttaatgtgtatgtttgatttatttgttaacaagaaatattagtaatattagattttatcccgcggtacaccgcggtaacaatttatctttttaaagttagtataattttttttttcaaattgtatctatctataatatatttttattttatagtttacaattgttattaaataacgtcctgccaaactcatcccgccaaacctgtcccgtaaaaaaaccatttatttatattaatgttgatcttatttatgatatgtttataaatcattgtctaaatatttttgtcgatgcgagatgttgaacctacacattttttgctaattggttaatatatgtttatttttaaaattttgaatcataaaatatgacagaaaaaattaagatttttttaaactctatatattatataatgatgttaaaaaattgtaatatatcaaactttttataagtttaaatattaataatgttttataaattttaaatatataaataataatatttaaaaaattaatatttttgcttataaggtaatgacataataactctaaaagcaaagatttagaagatttaaatttttaattaaatattttcattaataaataattaatctcagtgacatgacattgtaaataagttcaaatacaaaatttatttatttaaacaaaaaaggtttagtaagaataatatttatttaacaaaaaactttgttttaaaatattgttaacaaatatgtttatgctaattttaagggattgatttgaagtttggtgggattaaatttgattgataatgtgattgacaatttaaatcaaaaattttaaataaaattaattattttgaaaaaaagatttaatgctaatagcattaaattgtaaataaatctaaatttaaaatttatttgctaaaatgcctgcaaaaatgtatatataggtcaacaaaatataagtgttttcatcgaattacttttacttgtcgtctaattttctctcatttgttactattttaagccatttttaattgaaagaagtggtacatatatagcattaatgaatgctatactcaaggagaaagtatattaacgggacaatcattaaatttaccagaacgacaagatcccaataaaatgaaataaaaccaaaaaccaactcagatgagtaaacaaagtatcattcatcggtctcgtcttttggtcgcacgtctgaatccatcatcatcatcaaagacctctctttgttcccgtgacagatccttcttaaccaaacctcaccgacccttgtctttatttccccaattctactcctgggtttcgtaattacgttcccaggttcgagctttcttctccggagaatctgaaatcgaacaatttagtgtctttttctcagacattgtttacttctgagaaagcttaggtctttagactctcattacatgtcggaagtttcagctccggcttctttttcaggtaagatcccgaggtttttctgtctcctagttttctgtgtttattgaacttttgtgttcatcttccgctggaaattagctgtctttagggtttagcttgtgcttatttggatctggtatcgaaatttgtgctaatcaacttgctaaaattgacaatttgaccctcttatgtgtaagccaaatctgttataaggtcaaaatttcatctcccaaaagagtaattagttatagaacacttgtatttaactttagacacttacacttgtatacttcttttttttttttttttgtgtggatggatctacataggttgtgtattgtggagataaatctttggaaacaaagatgagggtgatgaagaacaaacacaacaagaaagcaacgtttttgcgttgttcaccgtttggtttagtatctacagttgtgggatgtgttttcatgattcatttaaccatgttatatagcagaagttatagtgtagatcttgatctttcacctcagttacttatccatcatccgattgtccgtgagctcgaacgcgttgaagaagagaatatccatatgccgcctcctaggaagcgttctcctcgcgctatcaaacggaaaccaaaaacaccaaccactttagtcgaagagtttctcgacgagaattcacagattcgacatctttttttccctgatatgaaatcagcttttggtcctaccaaggaagatactaatgacacatcgcattactacttcccggggagaatttggacagacacggaagggaatccgattcaagcacacggtggtggcattttgtttgatgacatatcaaaggtttactattggtatggtgaatataaagatggaccaacttatctttctcacaagaaaggtgctgctagagtaagttttaaccgtttcttgctttccattaatgtctcactcttggactttagaattagaatgtgaaaacagcttcttggatttgtttcaggttgatataatcggtgttggatgttactcgtcgaaagatttatggacatggaaaaacgaaggtgttgtattagcagccgaagaaacagatgagacacatgacttacacaaatccaatgttcttgagcgtcctaaagtgatatacaattcagatacaggtaagtacgtgatgtggatgcatatcgacgatgcaaactacactaaagcttcggttggtgtagccattagcgataacccaacaggtccattcgattacttatacagcagatcgccacacgggtttgatagtagagacatgacagtctacaaagacgatgataacgtagcctacttgatatattcatcagaggacaacagcgtgctgcatatcggtcccctgaccgagaattacctcgatgtgaagccggtaatgaagagaatcatggtgggacaacacagagaagctccggctatcttcaaacatcaaaacacttactacatgatcacgtctggttgcaccggatgggcaccaaacgaagcattagctcatgccgctgagtcgataatgggtccgtgggagacattagggaatccatgtgttggcgggaacagtattttccgttcgacgacgtttttcgcgcagagcacgttcgtgattccgttaccaggtgttcctggtgtgtttatatttatggccgataggtggaatccggcggatttgcgagattcgagatatttgtggttaccgttgatagttggtggaccggctgatcgtcctcttgagtatagtttcgggtttccgatgtggtcgagagtttctgtatattggcatagacaatggcggttgccttcagcaagagagaagaagattgcttagagaaaaagacaaagcttttcaaagtctttttcacctgttacttcttcttcttcttcttcttcttcttcctttggtcagttgttgtgatgctgctcatattgtcattgttgttgttgttgttgttgttgttgttgttgttgttgttgttgttgtgctgctctgttttcgtcgtttacaggttagaaagttatagagagagaactatagggccattgtgaatacagatcactttaaggatagtgtatgagttctgtaacatttactttaggacacagttctgttacttttcttttaagagtttccagttccggttttatagttcggtttcatttaatttagtctcaagatccaacagtgactgacccagctcttccatcaggttgttaaagcatcaaaattgtaagatattttatgcatccattttcttatgtgattgattgtttcttagagatcagtattttatttgagttttggatttgatttcagtacatagcatattgtgccacactactatcaaagcgatcgatatatctagcagatagattacagttgaatatggcttcttgccttcttcatgtatacaagggtgtttccataaatatcaaaggtttggggtatttatgtcaataacaaaagatattgaggctttcattaaatacgaaaatctccaagggtattttgataaaaccccagatattctggggtaatttggtagtactaaaagattcggggtccataattaaactaatctctcttccgtgtcaaaattaaacccgacccgaatccggaaaaagtgttatctaataaacccttgacgacgttcttctgccggagattacgcagttcacggtaagacatagaaacaaagtagagagatttcacggcgacggtattggaatggctaaacgggagttaagtggaggagatagcagcagcgaagatgaagatcccaagtggagagctgcaatcaattcgatagccaccaccaccgtttacggcgcctccgccacgaaacccgcagctactcagtcacataactatggagattttcgtctcaaacctaaaaaactaacacatgggcaaatcaaggttagtcattacttcatatattgaatgtgaattttcatctacatatagctcttttgatggcaattagactttgtttaagagtttcaatggttaatgttgaatgttagaaagttgcagaagttgagtggatttgagtgatcagtcatcagtgtattgtgtgttcttgaaactattgtttatggtgtttacgactgtgtttatctctagtctgtgttcatgctagttgagttggttatttgttgctgattgaggtaagatttaataacaggtgaagaatcttttgaatgaaatggtggagaagactttagactttgttgaagatcctgtcaatattcctgaggataaacccgagaatgactgtggagttcggttatttaagcggtgtgctactggcattgtatttgatcatgtaggttagtcatcaccgagaatccagctccgaatctgtgaactgtattattattatgaatccgtcgagaaacttgttttcgtgtttttcttgtcaaccagatgagattagaggacctaaaaagaagcctaatttacgccctgacaaaggagttgaaggaagctctaaagaggttgttatcaaacattgttctgttttgcgcgggattatgaaactatcaaagctaatttctttctgttttttgtgggtactgcagtttaagaaacgagtaaaatcaattgctgttgatggttcggatattttaactgctgctgtggaagcggcgaagaaagcctcggctagattagatgcgaaagaagtggcagcgaaagataaagctaagaaagaggaagagagaatcgcagagttgaagaaagtaagaggagaaaaatggttaccttctattgaaagggcaatgaaaaaggaaatgaaggtacgttatacatatggtttctcatatttgtgtttcattcttgtgttagtagtagtaacatatcaacttaacaaatctcgctatgtatttgcagcgtatcaaacataccgcatggaagtctgcaatgtcgtgagctttcttcttttgaacttattatcaattttggagtctcattaattgaagaagaaacacagaatcattcactcttggctacaaaacttttactgaaagaagattatgaaattattatgtagagtagagagagattatttgttcttaatgtagtgagagtgaagttcttcagagatgttgtcatcattgtcgtctttgatccagacgaagtcttctaatccatcataaatctcctctactgcatatgcatttttcttgggtacttgtttggatgatgtagagaaagcattctttattcccataatcagtctttttccgatacttttctgcggttgtgcttgtggtggagatgctcttcttcgccggtaagttgtgctcaggtttgaaacagaacctctatcgcctctctgcgtcttgtttacgttactcggttggtgaacgcaatggaaactcgcggatcgagcagaatccatcacgcttcttgacctcgactccacgatattccggtccgatttctgcttctctgattctttcgataggaatctcttcattgtgtcgagctctttctctaggctttcaatcctcgagcttgtggaattcatcgcagctcttagccgacagttttgcctcgccgccgtatctcgctggaggagcgatccaagcgtcacggaggagtctctcgcctctgtggcaatctctctgtgtcgaacaccagtaggagccgcgcaggacgcagcaacagcagctaccatgatcgagtggcgagtgttgagctgctcttgtagcatcgcccgaactataaacctcaggggcattttcgggttttgaacagcgtgaagtagtaaagggggcgagagtttgtcacagtctatcgaattacatatctgaaccttctcttcctccgtcatctctccgtcatgttcctgaagaaaaattcaaaagttttatccaatcataagataacaagtaacataatcggttaagacacgtttgagttgacgaaagtaccctttttaccttcacataagcatcaacgattctataaagcaaatcgtgacgcgggaaccgctgctgcacggcgtcagcgacgacgttaaaatcgccggcgggaagtttaacagcttcttctagaaactcgttaacgcaatcaccgtctccgatttccatcaaagcttctacacaacgtccgatcagaaacgccgtcgtttcagactccggaagaagaagaaggcacgaacggagaacgatctgaatgtaatcaacgtttacgaagacgactcgtcggagataagactccgtcaagttcctcaagctatctctaactcttcctccgtcgtcagcttccgtaatcagaagaacctccacggcgattctcaacgaaacgacattggacggcgttaactcaatgtgagcgccgtaacagaaaccggcaactaacgaaaacgtttcagccgttatgtttaacggcggtgagagagttaattcgttaacgcccgttaggtggcgttttaaatagccactctttgacagaggatcctatgggattataattaaaacatcacataatgacataaaacataacctcccaataaaaatcaaacctttttgcttattttgcaataaatgtgtaattttttaaatttataacaaatatacaattaaaaatcaaataaaaatatcatagtttttgttaaaaaaaaattgttttttttatgaaaattgacaaataaaagcttgaaaatatgtaaccttgtgaagatggaaccttgtgcctcccacatttacgaatacatcaggtttagagttattagccaacgacctgaataaaaatatagaaaaaacacccaaaaaaaagagaaattataatttggtaaagatttttctaccaaaaaaaaaaatgtggtaaagatttggtaaattttctaagagaaacattaccatttatggactcgagattcaagctccattgaaggagaagaagagagattgataggttgtttaggagaaagagacaaagatgaagaagaagaagataaagaagaagagtgatgatctacgtagtcttcgtcttcataaatcgtatcaacaaaccctaagtttgtccatcgcttcatgtctttttttccgagagagaagagatcaaagaatgagaataatttgtgtgagttttgagaagattcgaattcgccggttaggttttagtatcaagaagagaaggaaattttggacagtgaatgggcaataaatgtgagtaatatgggaaataaatgaatttaagaggatttgttgtgatcgttattatatgcgtgaaagtctttaaatgcgtttttcctttttcttcaccataaaccttctagttcatatagagggaccacgtcccacatgttctccaaaatgtacattcgttctaacattcaaatttcacgagatttcatttaggtttaaattgagcttaaattgttgtgtatatatagtactagtgcaagtttgatcggttatttttctttactaattgacatacttgtcgttgtcgtaaaaaacatggattgtttatttgtttatatcaatttgtttgcaccaaccaccacaagaaaattagttttgatcggccagtttaatacaaagtccacttcatatgatacttatttctttcataatttgttagcccctctgattattattatgtacaacatcattattttgcttgaaaatatatatatccaagagtctttggaagtccttgttcaaacattggcaatgggttctaaaatgtaagagtttcgacctgagattttctccgggatgtatatcacattatagttatgaatgtctaatatattgtataaaaacatactgatataataataataataattttctaattattttatttattttcctgatgtctcaaatccaaggtatcatttgaaaactacaatttgacctgcaaaatgaaaaagctcaaagaaatcatgaaacaagacaagaaaccgaaacatatcaaaagattaagatcaatgacgcaaaagattcgctatcgatgaaaggagcgaaaccatgaagcaagataggttgtagatgaactaggaaaggttgaagatggactaattttgtactggaaaaggtgacggtatagacctgtaagcttgaatttccttaacaagtaaccgagccggtttggagacagtagtgtgaagccttgcatttctttctctccacaaagtgtaaacagctgcttgaaaaataatttttttgttaaattaatattaattttttgaatataatgttaaattaaatatataaaaataacgtttttacaactagtgcatcgtgtttttgaaaatcgaatctaaaaaggcagaatatatgaattgaaacacaactctatttaaattaatatatcatccaaacgttatgcttttgtttctctcaaaaataaaagttctaaattgcatgatacaaaacttctctaaattgcatgatacagctagcctattacaacatgagaataccaactatatcagtgtagtcgttttgtttttacctctttcgctaaactgattgcatccaagaatgaattaacttttactaggccagaagtgtagctaacatagaagaggcccattataaaactctttaaaatcaaaatctaaaacaggcccagcccattcataacaaagccctaatatatcgagtaaacctagctccactcaaaacctaactatataaccttcacacacactcataacctcttcctcatccccttaaaaaaccctaagagtagagactctctcaatcccggcggcgaagatgaagtacaacccaagagtgacctcttctcgcagaaagaacaggaaggctcatttcacagcttcctccagcgagaggcgtgtgataatgagctctcctctctccaccgatcttcgtcagaagtacaatgtcagatccatgccgatccgtaaagacgacgaggttcagatcgttcgtggtacttacaagggacgtgaaggcaaagttgttcaggtttaccgtcgcaaatgggtgattcacatcgagagaatcacgagggagaaggtgaatggaacaaccgtgaacgttgggattcagccgtcgaaagttgtgataacgaagcttcgtcttgataaagataggaaatcgcttttggagaggaaggctaagggacgtgctgctgctgataaggagaagggtactaagtttacgtctgaggatgttatgcagaacgttgattaagtaagaaggaagaagaaatcttcttgaaaggttttatcttttagagttatcttcaatcgctttttaattttcaagttttggatattttggaatgttgtcagtggatctttatggtgctagacatgagaacttatgttttgattttgagtatttgaagtttggttatggaagtttatctctttgtctcattctttataatgatgtgtttgtttggtttagcttttgattatgtgttggatgtgtgttgagattggtgttgaactcctgatttgacataggagtcttgcgtttatcagtctattgcagtagaattgatgatattggtcatttatgtggtgacttagttgaaatgattctctagagtagtgttcttggtttaggttatttcgtttgatagtgggggttccatttttcgacagtggttttcatttttgaacatattggaatgacgagtttgtgtctttaaacgacatatcaatttatcagaccaatcctttcgtctcttcacacttatctctgcaattttgtgttgtctaagacgtttgtggtataggttgagttcgaacttggtggttttcaattgtaattttttgtttggcataagcattactgtggatttaaaagaattgccactctgattaacagcaaatcatttcatttctatgaaactgattctttctcattaccttaaaaaatagtcgtttcctcgagaaaaaagatagaactaaaaaaacatatctcaaatgcaattatccgactgaacagttttcacatttgatgtacatgtgtagaagacctatctctgattcttttccaacttgagtctttgattgattctagtttcacataaggtttgtttctcttaacaaaacaataaaaaaaaactctcagaaaagagcgatataactgttcctattaagcgtgagccccaaaagaaacaaatccgaaaaagaattatcagaaataaggagattagccgagggattcattattcaataaccaactcaactctaaacaatgtcataggagacagaaagggtagtctccattgttaaacctaacttccattggtatgtgtagctcttcaaggtttaagggaaagcgagagacctaaccttgggtacttgtctaatgtcttggtatcaatctcacctgagattgtcactatcgattttggaaggccctcgtgttgcagaagagctccaaacttaccgttactgttcagcttagctttcacattcgttaagtgatcaaccgcatacaatccaccaacagttactgttgtctcattagttgagattttcctgataacctctccaactgttgcgcttctcgtcgactcatctaggtaatatacataagaggctttgatcgaatctcctttatctcccctgagattttccaagaaaagattcagaatatattaagaacagctcgatagaactttgattagtaggagcttctttatcttacaatattatggagacacattgatctggctttgtgacactgactccgacgttgtactttgtgaaagttcgagatgtggtgtcatacccagcttcagcaccaaatgagatagttggtgagccaagagcagcagttacatcaattagagggttttattgtaaggctgcagcggctgtaactgttgcgtgatcatggaaatattggacttccagctgtaaatcatagttgagtttaaattcatttggctgaaaaagtcattatatgtgtatatataactagcttaaagaattctgaaatgcataaccttgctagagttgtaatcaggcactttgaaggaagcaatggcttttgtcgatgggaggatctcagtgatgtgatggttgtcaggatctgatcaagtgaaaaaaaaaaagaggcacaaacttagcgtattgtgatcaattgagacaaatttattcattggataaacaagagacttaacattgaaatcagtatcgatcttgacatcgaagaaagtgtttctgtacttgtattgtgtggcaacattagcagcatgtagtactccattcttgagagcagtggaagtaagagcctacgataaaataacagaacacatagcgtcaatggatgcagaaattttaagcgttgccaggcaaaataaacaaagcaacctataagtagctcatattctcaagtatccttgtggtttaaagcgacaaatgtatattaccatgatacatgttattagctagcaatatcatctacattgttcatcagcctgttatgctaactccaatacagagataatcttaacaaagaacacaagtacatgccgattacccaagtcacagaagatattgcacaatgcttaggcagtagaatccatcaagaggaggtttttgcctccaaaatcacaggtatatcaaaattgactttaacttcactcaaatgcgttgtcaatttccaatgattcactccccagctagagtatagatcaaatctataaccagcaagaagatactactcttgaggaaatacatgatagaagaagaagaagaacctaaaatagtacttgttaagcaaaacatttgctacaaattcatcaatgtgaaacaaaatctactagactgcgaagaacacatcatatgattcacagattataaaaaagctagaaacgagattagatacttacgacgccggagacactgttagtggagatactgaatttctgatcggtactgtaatctctcgtcaacagatctaacacaaaaagggaaaaacacaaaattgagcttacgaaaacaccaggattcatcaatcacactctctctcgacctccaatgatcacattaatacaactacatcgagaaaactcgaaagttgacatcaaaactaatggagatgaagaaggaagggaagattatcatacctttcgcatattttccgatgtcggcgaatagtcccggacccttactcatggtgatcggagaatttgagagagaggaaaccaaatagagatagtgacggcagtaaaattgtccaagtcaataatagttaaaatcaatgattaacggacgtgtaacaacaaaaggtttcgtggtgtagttggttatcacgtcagtctaacacactgaaggtctccggttcgaacccgggcgaagccatttcttcttttaattttttttttttactttgtaaaagaacattacgcttggaatgtcaggagtccattaagctt

SEQ ID NO: 1071 - DNA, 108158 bp, Arabidopsis thaliana
gaattcgccggttaggttttagtatcaagaagagaaggaaattttggacagtgaatgggcaataaatgtgagtaatatgggaaataaatgaatttaagaggatttgttgtgatcgttattatatgcgtgaaagtctttaaatgcgtttttcctttttcttcaccataaaccttctagttcatatagagggaccacgtcccacatgttctccaaaatgtacattcgttctaacattcaaatttcacgagatttcatttaggtttaaattgagcttaaattgttgtgtatatatagtactagtgcaagtttgatcggttatttttctttactaattgacatacttgtcgttgtcgtaaaaaacatggattgtttatttgtttatatcaatttgtttgcaccaaccaccacaagaaaattagttttgatcggccagtttaatacaaagtccacttcatatgatacttatttctttcataatttgttagcccctctgattattattatgtacaacatcattattttgcttgaaaatatatatatccaagagtctttggaagtccttgttcaaacattggcaatgggttctaaaatgtaagagtttcgacctgagattttctccgggatgtatatcacattatagttatgaatgtctaatatattgtataaaaacatactgatataataataataataattttctaattattttatttattttcctgatgtctcaaatccaaggtatcatttgaaaactacaatttgacctgcaaaatgaaaaagctcaaagaaatcatgaaacaagacaagaaaccgaaacatatcaaaagattaagatcaatgacgcaaaagattcgctatcgatgaaaggagcgaaaccatgaagcaagataggttgtagatgaactaggaaaggttgaagatggactaattttgtactggaaaaggtgacggtatagacctgtaagcttgaatttccttaacaagtaaccgagccggtttggagacagtagtgtgaagccttgcatttctttctctccacaaagtgtaaacagctgcttgaaaaataatttttttgttaaattaatattaattttttgaatataatgttaaattaaatatataaaaataacgtttttacaactagtgcatcgtgtttttgaaaatcgaatctaaaaaggcagaatatatgaattgaaacacaactctatttaaattaatatatcatccaaacgttatgcttttgtttctctcaaaaataaaagttctaaattgcatgatacaaaacttctctaaattgcatgatacagctagcctattacaacatgagaataccaactatatcagtgtagtcgttttgtttttacctctttcgctaaactgattgcatccaagaatgaattaacttttactaggccagaagtgtagctaacatagaagaggcccattataaaactctttaaaatcaaaatctaaaacaggcccagcccattcataacaaagccctaatatatcgagtaaacctagctccactcaaaacctaactatataaccttcacacacactcataacctcttcctcatccccttaaaaaaccctaagagtagagactctctcaatcccggcggcgaagatgaagtacaacccaagagtgacctcttctcgcagaaagaacaggaaggctcatttcacagcttcctccagcgagaggcgtgtgataatgagctctcctctctccaccgatcttcgtcagaagtacaatgtcagatccatgccgatccgtaaagacgacgaggttcagatcgttcgtggtacttacaagggacgtgaaggcaaagttgttcaggtttaccgtcgcaaatgggtgattcacatcgagagaatcacgagggagaaggtgaatggaacaaccgtgaacgttgggattcagccgtcgaaagttgtgataacgaagcttcgtcttgataaagataggaaatcgcttttggagaggaaggctaagggacgtgctgctgctgataaggagaagggtactaagtttacgtctgaggatgttatgcagaacgttgattaagtaagaaggaagaagaaatcttcttgaaaggttttatcttttagagttatcttcaatcgctttttaattttcaagttttggatattttggaatgttgtcagtggatctttatggtgctagacatgagaacttatgttttgattttgagtatttgaagtttggttatggaagtttatctctttgtctcattctttataatgatgtgtttgtttggtttagcttttgattatgtgttggatgtgtgttgagattggtgttgaactcctgatttgacataggagtcttgcgtttatcagtctattgcagtagaattgatgatattggtcatttatgtggtgacttagttgaaatgattctctagagtagtgttcttggtttaggttatttcgtttgatagtgggggttccatttttcgacagtggttttcatttttgaacatattggaatgacgagtttgtgtctttaaacgacatatcaatttatcagaccaatcctttcgtctcttcacacttatctctgcaattttgtgttgtctaagacgtttgtggtataggttgagttcgaacttggtggttttcaattgtaattttttgtttggcataagcattactgtggatttaaaagaattgccactctgattaacagcaaatcatttcatttctatgaaactgattctttctcattaccttaaaaaatagtcgtttcctcgagaaaaaagatagaactaaaaaaacatatctcaaatgcaattatccgactgaacagttttcacatttgatgtacatgtgtagaagacctatctctgattcttttccaacttgagtctttgattgattctagtttcacataaggtttgtttctcttaacaaaacaataaaaaaaaactctcagaaaagagcgatataactgttcctattaagcgtgagccccaaaagaaacaaatccgaaaaagaattatcagaaataaggagattagccgagggattcattattcaataaccaactcaactctaaacaatgtcataggagacagaaagggtagtctccattgttaaacctaacttccattggtatgtgtagctcttcaaggtttaagggaaagcgagagacctaaccttgggtacttgtctaatgtcttggtatcaatctcacctgagattgtcactatcgattttggaaggccctcgtgttgcagaagagctccaaacttaccgttactgttcagcttagctttcacattcgttaagtgatcaaccgcatacaatccaccaacagttactgttgtctcattagttgagattttcctgataacctctccaactgttgcgcttctcgtcgactcatctaggtaatatacataagaggctttgatcgaatctcctttatctcccctgagattttccaagaaaagattcagaatatattaagaacagctcgatagaactttgattagtaggagcttctttatcttacaatattatggagacacattgatctggctttgtgacactgactccgacgttgtactttgtgaaagttcgagatgtggtgtcatacccagcttcagcaccaaatgagatagttggtgagccaagagcagcagttacatcaattagagggttttattgtaaggctgcagcggctgtaactgttgcgtgatcatggaaatattggacttccagctgtaaatcatagttgagtttaaattcatttggctgaaaaagtcattatatgtgtatatataactagcttaaagaattctgaaatgcataaccttgctagagttgtaatcaggcactttgaaggaagcaatggcttttgtcgatgggaggatctcagtgatgtgatggttgtcaggatctgatcaagtgaaaaaaaaaaagaggcacaaacttagcgtattgtgatcaattgagacaaatttattcattggataaacaagagacttaacattgaaatcagtatcgatcttgacatcgaagaaagtgtttctgtacttgtattgtgtggcaacattagcagcatgtagtactccattcttgagagcagtggaagtaagagcctacgataaaataacagaacacatagcgtcaatggatgcagaaattttaagcgttgccaggcaaaataaacaaagcaacctataagtagctcatattctcaagtatccttgtggtttaaagcgacaaatgtatattaccatgatacatgttattagctagcaatatcatctacattgttcatcagcctgttatgctaactccaatacagagataatcttaacaaagaacacaagtacatgccgattacccaagtcacagaagatattgcacaatgcttaggcagtagaatccatcaagaggaggtttttgcctccaaaatcacaggtatatcaaaattgactttaacttcactcaaatgcgttgtcaatttccaatgattcactccccagctagagtatagatcaaatctataaccagcaagaagatactactcttgaggaaatacatgatagaagaagaagaagaacctaaaatagtacttgttaagcaaaacatttgctacaaattcatcaatgtgaaacaaaatctactagactgcgaagaacacatcatatgattcacagattataaaaaagctagaaacgagattagatacttacgacgccggagacactgttagtggagatactgaatttctgatcggtactgtaatctctcgtcaacagatctaacacaaaaagggaaaaacacaaaattgagcttacgaaaacaccaggattcatcaatcacactctctctcgacctccaatgatcacattaatacaactacatcgagaaaactcgaaagttgacatcaaaactaatggagatgaagaaggaagggaagattatcatacctttcgcatattttccgatgtcggcgaatagtcccggacccttactcatggtgatcggagaatttgagagagaggaaaccaaatagagatagtgacggcagtaaaattgtccaagtcaataatagttaaaatcaatgattaacggacgtgtaacaacaaaaggtttcgtggtgtagttggttatcacgtcagtctaacacactgaaggtctccggttcgaacccgggcgaagccatttcttcttttaattttttttttttactttgtaaaagaacattacgcttggaatgtcaggagtccattaagcttacattatttaaatcgataagtctttaacaacaaacgtggttatttcactttgtactaattattcttgattatgcgttatttccattttctttgtgtcttatggttagttttaatgtggatttggaagttctcgatgcagattatgaagccgtgaaatattatttgatgagatgattgaattgtgcccccaacaaaaagatgagatgattgaataaatactgaagcatgattgatggaatagtttgtgtattcattaatgatataaactatgtttttcgaatctacataacaactcgatactttgctcacatgtacgttgctcttttgaatttaggattttatatgtttgggaatatattttcaatattttataaaagattgctaggcatatgtcaacgtattttatgatgcaagacaaataaaacttcaaagatgaataacattgctcgttattatgctctatgctattattattaaagcaagctacaaagcccaatagtaccattactagtctaaactctgaaagcctatgtaagtagggttttgcaatcaagattatgttttcatataaggatgtgtaatgactcttaagatatataaccaagagagttgttaaagaggcagctctccttcttccctattttatgattgaatcaaagtattactaatcttggtgacaatctaaagtcctttttttttttactttctttgcacaataaagctcttcatgagctatgcaagttgttagtttatttctatcttaataagctcatttgactttgagttttaattttgttgtgcaaagaaaacttaactaacttcttgtatataggacctaaattcctccattattcatatatcatctcttaatctcctcagattttgtttttcttataaaaatctataataaatcatgatctgtatataaaaacttgaaggaaataaataagcaagtaatgtcaagtatataagacgaagtttttttaagcaactaaactatgagatcctaaacttgatggttgtaaactaaaatacaaaagaaaataaataaaattagttgcttatgaagtgggtggtgtcactcacaaccatgtcgcctgagccttaagaaagtgtctcgtaccgtcttttttaagtctccaccaaatcgtaccatttccaccatacataactaaccacgtgtccccaacgaaagaatctaacctgcttccaaccaatgaaaaattgacaactcagttatgacccaacgccatgaaaagattcgctaacctggcctaacctttaaactaactccgaagatatggcaactcaaatcttcatcaacacctgtcgcattttatgccttgttgtttttttagtttcttgcttttaatagtaaactaaattatcctctcaatataataataatacattaatactatagactacactacaaatgtaaaagttccttttacttttacaatcattattataaccaaaaaaaaaaggtctaatgtaaaattatgtgtggatatatgtttatttttgaataaagtgtattgaaattgacaattcggataataaattgttgccaatagaaaaaaagaggaagaagaagatattgaataagctgatcagctcatgatttggactgctacctatcgacaaaattagcacaactttgataagtactttagttttccatctttgtgaatgtgttacttttttcggctttccaataaagtttgatgttagactctaatacatttatagttacatgacttcccccacaacacataatttttaaaataggcattcttagattacgcattattggacaaggtgccactgaaaagatagtttttctttgatttactttatttttttataatattttcacaaatttatcattattgatcattcaaaattcatctctatttcattgattctacatcgactgcatcaaactctaatattcttttttcgttcatttttgatatattggaaatttggaaagaatttagttcaattatataaataaatttatgttaaagaaaaatatataaaagatgaaaataggatgagatattaatggatatggagaaataagagaagaagcaccacttgatcacttagagcccacgttcccactcttaatcacccaaaaaaaattaaaacaaagacgtgctcacatctcatctcactccctcaccagctcacttcactctctctttctctttttttttcttttttttataatcatctctctcaattctcaatcatcttctaatcaaagatcaccaccatatggctctcgacactctcaattctcccacctccaccaccacaaccaccgctcctcctcctttcctccgttgcctcgacgaaaccgagcccgaaaacctcgaatcatggaccaaaagaaaacgtacaaaacgtcaccgtatagatcaaccaaaccctcctccttctgaagaagagtatctcgctctttgcctccttatgctcgctcgtggctcctccgatcatcactctccaccgtcggatcatcactctctttctccactgtccgatcatcagaaagattacaagtgttccgtctgtggcaaatctttcccgtcttaccaagcgttaggtggacacaaaacaagtcaccggaaaccggttagtgtcgatgttaataatagtaacggaaccgttactaataacggaaatattagtaacggtttagttggtcaaagtgggaagactcataactgctctatatgttttaagtcgtttccctctggtcaagcattgggtggtcacaaacgttgtcactatgatggtggtaacggtaacagtaacggtgacaatagccacaagtttgacctaaatttaccggctgatcaagttagtgatgagacaattggaaaaagtcaactctccggtgaagaaacaaagtcggtgttgtgattattattattttttaccgatcgggattagctagtggttgatcattagctgagtctgtaatgaaaatgattggagtggactttggattattttaatttctgtttacgtatatggaaagaaaataatcttcaaatgtttattcgttgttggtttttgtttataaaaagtaaaaaaaaaaaaggatatatttgaaattattattaattttgttaataataaaaagaattggattaatgaaaattgaaaactactatttcatggaaacttcctactgttgtttttcttcattacttgattaatttttcatttactatttccgcaagcaaaggaaccacttctttgaatctgtcactcccagcttgaagtgatctgttcctaagaatttaactatttgattaaacatttcagatttctatttaaaaacataatttgataggagaaatagtattaattttgggttatgttagtattaattattgaagtagtgatagatcggttagtagtacctaacgaagctaatccttaagtggcttgtcgactttgattggttggcactcacacttccctccacgcttaaattatttttataattctgtattatttcgttttcacgagttttacgagtcttttaataattaattaattgtataatttgttacgataaatatcttacacgtcttaatcgatcccagttcttatgtatcttctaagaaaaagagtagttatacattccgagaaaaatatggatattgggtattttctgaattaaatgccgggaaaatattgtttttttggtggcacaaaaaattgacttataattattctttataactatattgtagtatctgatggttaagaatttttggaattattttaagatttgtttttttcttgtcaaccgatttttatttagagttcagaaaactcatcccttaaaaatgttgtttatatatgtgatattatgcggttcggtataaacttttcgtcaaattaagatttggctttgaaaagacaaaagcaaaaattttaaatctaaaatggtgtgggaaaaaataataataataccttgctaaataagacggaaaatatgtcgtgcagcttactgcttatacttacatcttacattacctattaggctataacctaatgcttgtgttataagtctgtaagatttggtcattcattctctttgtactattgtcttcttatattgctagaaacttagaaactaaagaatttcaccaatttttgtgggcatagtatatagcttattagcttgtaataaggcctaataaggccctcgagcgttacaataacatccaaattagttttggcatggtaccgttaaagtggtgttaaactattaatttaccaaagactcattgtttggactttggaccatacgaaaaatgcagtagagcccatagtgacatagtgtaccggctcttatagctgagaaattatatcccaattaacagcccagtatttaatcatttagaactcaacgtgaaagaggacatgttaaagcccaacacaagtccatagactcatgaaatacaagtccacaaacccaccttatctaaccatgtaattaggttttatagcataatataatgaacatcaatgaatgtaagtaggaatgcaatttgtgcaacctctatttgacaatttctttcatttcttctcaatagtttacaagtctcatacattgtttttgttctgttttcaaagaaatagttttggtttttctattgtatgcaatatgacttcccactgtacatcataaacattgaagtatatataatattttttctattgtgttctgccgtacgtctaacttataatctattttataacattgattttactaaatatataaaggtaaaatctatcttgttgcattcacttcagaaaataaatttttggaagaagggccacaaaacaatactaattttcaaaaattgagattgaaattatgttataagattgatatttaaaataggaataccgttgtaaaaataagtagttgatttatcgaacatctaagcatctgtttaacaccaattttatgtcgttgttgatcaaaactgtcgcgttcaagtgtcttgtgtcgactaattaagcaaatgaactttaggtaccagaagttcaacgaaacaataatgcatttttaaattactaatggactgaagtaattgggaataaagaaatataaagagacggcggcattcagtggaaaatttgcctaattggagtgtaggtaagcacaccacgtaagccatgaacggcgccgtttcaccgcattgctataggaaagtagaagaagacactttgacttattaatatcattttgttgtagatcttctgttcatcatatatttgattttgttactagctaatgtaaaggagaaaagaaatgtttgatttggtcacacacgtgagacagcatcgtaggcaaaaaaacgcctctatctttcttctaaaacatttttcatattaaattatcaaaacccttaaggttgatttaagggtcaggtagtggatttgtttcgttgaagggtcagcttagccttaaccctaaacaaaacaatctcattggtttcataaataaattgtttacaaagtatacgtactgcatgaacgaatgaaccatatctatatttataaaactcatagagaccaatagtttaagagaggcacttatatagctcaacaaataatagcgaactagagagaatatgatctaattagttataaatctcaattttgaaattgaagtgcgttatttcatttgagaatctatgtgttttttttgttgttgttagatgagaagctaggtttttttcttttctttacaccgataatcgataatatatgttaatcacactgatttttgtttgagacatgaagattcgaaaaatttgtcaacgaataaacactggatagatagaattgagatctgccatcaaataatcgagatcgttcatgcatgacgcaaacatttatatagaaatgaagcaagtaaagaatatgaaaaagaatagaaatgagaaatttataaagaaagaaaaaaagaaccaatggttgaggaggcaactattcgcggggacacggagccgttcgcacccatcaccttggaatctctctttcttcctctctcctcatcaccaactagtcaacaaccacacaccatttttaactttcataattaaacctaacataacatttttttttgtataaactatagcataaattaaattcagttaatgataaaataaatatattttgtagcaatcattctattttgtaatttggtagggctctttaaactttgattattatccaatttttattaaaatataataaaatctcaaagccatgacccattccttcactcaagtatcaatgtctattgtctataaatattacataactcttcttcttcaaccaaacattgaaacactttgtcccactctctctctttctctttcttgtaccaaaagctttttgaatctccaagattatagcaaaaccaaagataaaatactaacttaaaagatttctgaaaataatgagttgcaatggttgtcgagttctacgaaaaggttgcagtgagaattgcatcctccgtccatgtattcaatggatcgaatcacctgaagctcaaggccacgccaccgtcttcgtcgctaagttcttcggccgtgccggtttaatgtctttcatctccgccgtaccggaatctcaatgccctggtacttaaaaacaaaaacctctcggtcctttagatcttcgtctaaacgttgtcgttttggtttctgatggtaagggtatttggtctttttacagctttgtttcagtctttgctatacgaagcttgtgggagaactgtgaatccggtgaacggagccgtcggattgttgtggacggggaattggaatgtttgtcaagcggcggttgagacggtgcttcgtggtggttctttaaaaccaataccggagcttcttaacggcggtggattcgccgggtttccgtctcctacttccgacgaagcttcggagatctgtacggaaatgttgaatctacgaaaagctgatgattccggtgatcggaacatttatcatcactgccgattctcaagctctagatctagatcaagatcaacagcttctccgccgaaacggaaacgattatcgtcggaacaacaaccttcgtcggagcttgatctctctcttattcctatttatccgattaaaaccttgccgtttaaggaagatacaccgtcgatgtactcggaggagtctgttaccacggtttcgtttcaaaacaacaacgccggtgatcggtacgtacgctgcggcggaggaggaggaggagcaacgacaaagttgctcaatctcttcgcttgaacggcgtcgtttttgttatgagggttaaaaatgtaatttcgagtaactttttgttgtggccttttttggattaatagcccttaatattttgtgaaatgtagcaaattacgtgatttatttctctctttaattatgagaaattatccaaagtaatagagaataatgatataattcgtcggtggtgtactattttatttttagttcataatcaattaatcatcattctcatcgaattcaaattaaaagataacaatgataatgtgtacgataaatcaatacttattagctactaaattatttgtttttatcgacatattcaacattaataataataatcacgaatcggagtcaaaatatacatctctccaaatccaaagcaccggcaaagtcttcgcacccaacatatttcgattctttaaggaccaacatgttgtaatgtacacacaatcatacacaacttgctattttgataatcatcttgattactactcgcaaaacaaaatattagcatttattatctccaggtttattgtctttcgatactacatttgttattcaatggtttaatgatacctagtaatagtataacacaatagtacgtattcctcgagatgtgatgatctttttgtgatatctcaaattatcctatactagtactgcaacggtcttcttcgcaacactctcaatggcatatgtacatcttcatgtgtttctttctatgtttaagattagtctaccacacattctccggatgaatacaaactctaaaaaagattaaacaaggtgcattacataatataagtaattgtatgtatagagtagatatgcattatataatgcatgtagttgggttgaacccaaaaagttggggttataaagggaaagcttttgggggaggcggcttttggacgacgcaaagagccgtttatgtcacacttcataccttcgtggaatcttcaaaagcactctttttttattgttcttctattcttcttcacattttgtttaataaaaacaacaaggtattgttgctctatggatgatggcgtagaaacaatgaaattgaccaataacatgtttgcttttgaaacgttgaaatgagaatggattgttgttggaacagaagaagtgatttgaagatcttatgaagtgggacatattttaaatatactttcgaccagccagtcactagtgggcaaacaattgcttgtggtccacgtcactctcctttccttttccgaccaccggactctttatgttatttttgaaaaatataagtttttagttctgaccatttcaagttttatcaacaaccgggtatcatcattcgttcaatctcgtctgttttttacatctaattagtgtctaatcatgagttacaaaatttatggagctaaatttctttttctacttttaaactatggagctaactatactagacgaattcgctttttaaaaatttggggaatacaatataacaatatggatggataaacatgaatccatcaagtataatgagaataaaataacattagcaagattcgtgtttaatgccaaaagccacgagcagccgcagtttcttatgggcccaatactttcatcaccttctccacttaagtcggtgtgtgtgagtccacttgatgttttcttaaacttttcttccgaaaacgaacaaaactttagttaattatttgtctttggtatgaatgtcaagaaaatggtagttaaattagtaaggaataactaaacttaaataatcaagttgaaaattaaaaccctaggtctcacatgattatgaaacatttactactttgtgtattccaaaaaacatggtgatcaataaaaaaatttgaaggtgaaaacaaaacgacgtggattatcaaatgatcacaagaaaactagtcaatctaaatagaatatcaaataacgacaaaaaaatagaatatcaaataattaattaagaccatcaaaatcaagttggtattcataatgattctggataaaatacagaattaagtaagtgattttttttggatatatatatatatatatatatgatttttttttggtgtgttaattcataatgattctggataaaatacagaattaagtaagtgatttgtttttggatatatatatatatatatatgattttttttttggtgtgttatatatatatgaatgataatagtaaagtaatattttctcattatttcaatttttatttttgcaaaagttatatatacatgattatctgactctcaaataaaacaaaaactagggttagctgaatattagctaccaaataacattttatcaaccggtaaacacacattagaccataacatcttgatatgtaaccgtacatagttcttgatgaattttttcgtacattactatacaaagtgatatattaattttctgaaactcaaaaaacgttatgcttaaagctgcatatattgtaaccaaagactttttaataaattttacattacaatgattcaaaaaaagaaaaaaaagtgatatattaatttctacaacacatatttggaaatttttgtaactgaatgtcatcatgtcccgattatccccagagattttgtatatgaacctctttaaaaaacaatctcaattgtttgtttcttgcttttagttttctcaagtcttttgctattcaagagtttatcgaataagtttcttgtggatcaatatcactatctaatttctaacgattgattttgttattaatatagatgatcataagacttagcttggtctacattttttgtggttcttagggttttgtgtgatcattcttcgagtaaggtgaggacccaagagccatcttgccccttcaaatcttttgttggccgtacattcatttacacttaattaggatattcttttcttaaagcaaaaatagagtttaacaaataaaatataaaaataagataactctagtctttgatctttatcgactcttctaatgtcggattgattcaagttttatagtatgattattaatgagaacgtcactaagataatcaagtgctaatcataatcctttgcgaaggctgttttttgtaaatttaaacgagactttggaggagctagaaaggatcagtgttgaagatttgggagagatcgcgacaaggacgtgaaatggatgcgacacgtgactttcacgtgactggttccctcatcgctggaacacataatccactctttcacctattgggtcctacaatagcttcttatctttgactaaatcatttttcatgttgtaataagtaactagaagatgtgcatatacgatacgaattagagaatacatacgtcctgataaaaatagaatatatatatatatatataccgacaaattaatcattttgtattcttggaaaaattatttcttctgctcacctaacattattaaccactcaataaccgttaatatagtttgtcaattctcattgagctgaataactagttaaatacatagtctctaaatgtgtatagtgtaaattggaccaatcaggaaaatgagatctaattattcattccttttccatagggtccttatttcttcgtcttttttttttttttttaataatcctttatcaaatgtacatgattgtaaactgtaatattttctatatattaaaaaatatataaaatatctttaaaaaatgatttcaagattccttaatatattataaaattttaaattaaaatcacaaatctttaagtctaaatttttgaatgacgtaaatgcaattctctttgtataatataattcattaaaatatttaaaattcaatttgtaacttttttttatagatgaatttttatatattgtatgatatttatatagctttttaatttaaaatatttagcttacaaaatttggttttaacatttttggattaaaactttgagttttagttataaattattctatcataaaattatatagcataagatttatcagtacatagcacatattcttacctagcttattttttttgaataaaatgtaaaatttattcgaaaaaacatgtttacatcaagtgcaccggaaatttaatcgctttaaagttacagacactgaaaaaataaaagagaactcggcctctttatcttgttgcaaaccaaactgtcatgtgcttctcatatcttccatctccttgatcttttagggaagatatcctattcctaacatccttgtctagctttctcattagttgagtcgggggagtgtgcttatcgccatgtcttctacaatttctttctctccaaattgagtagattacaatctgaaaagaatatcttagtagaaataagcgaaccttatcaagcgtgttgtccgtgagcagccttagaatcacgttcctatcggtagagaattttgcagctaggagtttagaggtgaggctcgaccaaactattttagagtaatggcagtcgaagaacaagtggtttctagtttcttacctagttactttgcttaaaaatcagtaattactacaaatttctaataaatgaataaatagggggggggggtattggatcaaagagtttaattgaattgaattggatacataattacagattttcactcattgcaaaagatttcaaatcttgttttcaattctaacgattacattttcactattttattagaattgaatagaactgtaatagaattaaaaaaagtactaataattcagttttgctaacaaccggacctatttcttctccacagtctccacttgtaaatctctaatcacacgtttcaaaatctgcaatatttcctccttcttcttcgtctcaaaaccactctcaatactactaagtttaacagatcccatagcttctccactttcctcgctaaatcctctgtgatcattgtagatttcgaaacatcttcattgtattcttctcggaattcacgttgataacgagagctatctccgcagctaagggcgtcgatgatgattatgcacaatgacgagagtactctatggtgcaaagaaccgttttctgagaaccagtaacattttaggcttgaaagtttggagagtacttgaagacaagaattaggaacatcaacaataccaacaataggcttattaatcgtgcaaaaggggaaattagcagcttattagcctttccactagatcgaacatgcccttatacgacaatttgaggccccttatatattttcatccaaatcacaacttaaaaggtaagaatttgttttgtgcattttgcactaatatttttattaaattcttgacaaatgacgttgtcatgaaaaattacaaaatattgaataacacttgaatttagtagaattaagaaattgagaaactgaataatactagaatttaaaagaatttataaaatgcctaattgaataacactagaatcaacattctaataaattccgtcaaattcattgctccaatacccccctccccccccccccccccccaagtaattgaaatgggcttgaaaccatggggccggaaattttcactttgtattattttgatgaagcccaatagactttacggaaagaccttaggtttcaagtaggtttttaagttttatgaaacagagaaacatatacgtgttcgtgaaggagaagacgtgaaggtaacttggactataaagtgtatagtgttagcgaaaaggtgaagcagaataaataaagtgttatgcgttatcaagtctacctaatataactagctagggatttctactcttgttttcataatcgatctacggacatttctcggaacgtggtcaagattcatgagtcttctgttttttatgtctctgttcaatttggtttagagattagtatgcttatttgtttatttcatatatggttatgagaggagaggctaatggcatatactctgatgtttgtgatggctgctaatatcgttgaggagttattcacgttgtttcatgcgcaaaaatcaacagaaaaaattctgattatgagccaactctgtgaacccttatagtgcgcccagaggtttgcgaggcaaaatcccgatgaaccagaaggaattttagatctctatcaacaataactatgatggagctcgtttaaattcatcacagcgacaacatcattaggctgcccaacgtctatgtctcctggaggtgatggtacttgatctctcaaccaattttcttgaaaatatcatgccttgtgagcgctttcatattgcgcctaaaatacccaatacgcaatgaacctacttccaaaggcatagaaaaaaaactgataatgataatgagatttgtcactatacttatcctatccctacataggagccgtttgattgtttagtccatgttttcattttgtttagtctaatgctatataacttttctttatcagtctattgttatatgacttatatatatctcaagagataaggccaataaatcttcttcttaattatatctgaagactcaaaacatattttgagtttaataaaataaataacgtccaaatgctacatacaaacggaccaaattcatggaggtataaatttaaattattttttgttccaaagtgtatgcagtgatttattgatgaatgcgatagagcggcgaaagagaataatcgtcacctagaagacaaattgatcggccgtacatatatacataaatacaaacctgccacttcacatgtcacccacctttaagcacccccttcacatacatactttctataacaaaaatatcagcttctagttcatatttatgttacaataactcgagtgaatcatactaaaaaaatgtaatgctttctctaaataggagataaaatgcaccctccgacctaactaaagattccttattttagctatttaagacatattgcacatgtatagagatacataaacacatatgcaatatgcacatcttctatacattgaaaaaagctgatcttgcaaatatttgtcttacacaacacaagcgaccaaagcgatgcgtttcccaatgataaggttacgacatacttacacgactctctctattgtctcgtctctttctttcctcatccctctcctttgtctcctttcactctatttttcacttttcagaatacttttacgtaaaaatcatggacatgtcattgtctccaccctactatactctttttttgttctttttgtttcctcttgtgtcacaaaaataacaagattaaacgtacatttctctctaaaaccagactcaaatgaccaaaacccggattctcaacccgacccgattcccttctcccaaacccttacgtggctgcggcgacgctaacttcatggaacagctcctccttcactgcgccaccgccatagactccaacgacgctgcattaactcaccaaatcctctgggtcctcaacaacatcgctccaccagacggtgactccacccaacgtcttacatccgcattcctccgcgcgttgctctcacgcgccgtctccaaaacccctacactatcatccaccattagcttcctacctcaggccgatgaactccatcgtttctcagtcgtggagttagccgctttcgtagacctcactccgtggcaccggttcggattcattgcagccaacgccgcgatcttaaccgccgttgaaggttactcaacggttcacatcgttgacttaagtttgactcattgtatgcaaatccctactcttatagacgccatggcaagccgactcaacaaacctcctccgcttcttaaactcaccgtcgtctcttcctccgaccacttcccaccattcatcaacatctcctacgaagaactcggatctaaactagtcaacttcgccaccacacgaaacattacaatggagttcacaatcgtaccttctacttactccgatggcttctcctccctcttacaacagttacggatttatccttcttcattcaacgaagctctcgtcgttaactgtcacatgatgctccgttacatccctgaagaacccctaacttcatcatcatcatcgctccgaacagttttcttgaaacaactccgatctttgaatccaagaatcgtaaccctaatcgaagaagacgtagatctcacatcggagaacttggttaaccggttaaaatcggcgtttaactacttctggattccgttcgatacgacggacacgtttatgagtgagcagagacggtggtacgaggcggagataagttggaagatagaaaacgtggtggcgaaggaaggtgcggagagagtggagaggacggagacgaagagacggtggatagagagaatgagagaggctgagttcggtggagttagggttaaagaagatgcggtggcggatgtgaaggcgatgctggaggagcacgctgtcgggtggggaatgaagaaggaagacgacgacgagagtctcgtgctgacgtggaaaggtcatagtgttgtgtttgctaccgtttgggttcccatttaaatcaggttgatttaatttaattagcgttttaattggatacctaatatagtagaatagcattgctttaatttctgatctaattacaatttaataatattttttattaacttttttttttgttctaatctagtgtcaattgttttgtactagttcaaaacattctaacgttgaaaaataatcgttattatgactaaacatattttacatcttcataagcacttttagtttacatagatatttttccgtgaataggcttagtgataacagtgaaaacttattataataggaaaaattgaatagtatatagttatttaaatttgtagcgagaataaacatgttggagatacaaagtagagaggatcagatacaattgccttcttaaaatgaagacataaacaaaacaaatgaaaaaccaataatatcttctcatcgtcaaaatgaacattcaaacattaataaaacgaaaggaaaataggagataagacaacttatattttcccattaccagctctagttaaacgcaccacaatcacgacggatgtttccattgctgctattcttaactccaacacggccaagtttggtcatggctatcacaaaagcgcggttaaaggccgtagagtttgaggcccaagcattaacggtgggcctagagcgaccatccgtgaagagaacttgatcggaggtgaagagacctttgccttgttgaagattcttgaagtaagtgttgtcaaacgtcttgggcgtgactgggtccatgttgattgcaattcttgggtccacattcttaggacaagccttttgaagctcaatagcgtaagccttgtttaaagttgggtccacggagttgatgccgttgaatttgtggattcttttaaagaccttgccacaatgtgcgaatccaagggtgtgagccgctacattatgaatttatcggtttagacatcgatgcatcttggtgatataaatacatataactatataagatgttttgatttaaatttggtttacctgaaagagcaatcatatcttcttgggtaagtttgtttttcgtgaaaagagcattaagtttgtctacattgtccgaaggtcctggtaagttcccttcgacacttgacgcggttgataccaaaccatcgaacctaccaagttcaacttcataggacggtcctccagcctatacatgcgtaaaaccttgttatataaaacatttctaaacaagcaatgtgatatactaatattaatgtgaaattttgtttaggattaattatctggttatagtaaggctagtacaaatactcaccgcaacaacaacatctcgggtggccaaagtaagaatatcggcacatgagaccttgttccggcaactagggttagagtcaagggctttcttagcttggatcaccacatcaaatccatctccagctagcgaaatgttatctggatgatccttctctgccttgttcttaggcgttgattggatcatgacagatgcatcacaaccctacaatgccaattacgccaaaggtaccaattaatcgcctaatgaaagaggagaaaaaagatatgaaaacgcttaaatagaaacatacattgacaaagcagtcgtggaagaagagacggagagtggcagggacggcgacgaatgtcttctttattttcttttggacagcatttctcacgatttgttcgacattggggcaagttttggagtagaaaccgcggcttagttgtgcggtggttgtatcgggaaagacagagattatgaggcaaagacctatgagtagaacaatatcgaagcgagccattgtatggacaaaaccgagagagagagagtgttgtatataaattgagccaagacaagaagaattgcttttgaaatgatgacggtaaaaggtgcacgataaaggtttatataatgatgggcttgaagaatataacgcaatattaaagaagattcatttgttttagtataggcttttgataaaattattcgatttttggttaactgcaccaggcctaccttgttcatttcatttatacttgttagcatgatgtacttcttacaagagtggaaaatcatcaacgaagagttcttcagtgagaatgaaatataaataacaatagcaagtttaattaaccttaattaattgtatactaaaatgattaattgtataaatatgtgattatggatttatctagtgaaaaaagtaaatgtggattgccaacaataatacaaatatggatcgtcgaaacatgaaagtggaatccaaatactgaaagtggagatgtggtttgcacgttgttacatgaactgatgaaagttagtgagagcatcataatgaaaaatatataagaataattgtagtacatgtaaatgaaccatataaataaattataaaaagaaaaataaattgacaataaaattagtttagacaattgtagtattcaccattaactgttataagactcatcattttttttctcttcataatatgttacttttatataggagtttttttctaacttagtaaatggaggttttagactgttttatgggttagattgtgattgttggtttatacttgatagacatttgaatcgatagaaaacaaaattaaatgagaatggaactccgcacacaatgcttaatatggagtaattgataaacttgtaataagtaaaaaagtttcagtaatatccctcaaaaccatacatagaatttgtatcttcattctgacacgccatgaaattatgagaaaagcaatgccctttttctttaataacaattatgagcagattgtgcaaggcacgctccttgtttgtgttgacaactttgttaatgtcaaaccattataatatctgcggtaactaaagtctaagcaaacggaaccaaaaccgaatttaaaccgatcaaaaccaaaccaaaatctatgttcaactatttggttaaccttttcctcaatcctaacggtttggtttttttttttgtaggaatcctaacggtttggttgtgatagttctaaatcaaaaataaaatcccacatttaactctaaccctaatgatcctaactaaaatcacgtttccactttaaattttccgattaccacaatacaaaagatgaaaagaagaagagtctctttgtatctttcttccccatgcttcgagtgtcttctaaattaagttttttttttttaatccgaataattaaattttctgttgactttttgagaattgctctatgacgacttaacgattcttaagattatactcaacacaaaatgtcgacaaaaaaaagattatactcaacacataaactcaaagacattctcagctctctatacaatcaacacagaaacatccatgactagaaattgaaaatttccaacaagaacaagtgttcatgtattgtttaagatatagagtgtcttctgcttttaggttgtttggtttgtccttgtttgaggccaaaagggttaataagctttccgagtttttgagaaacagagtttataaatgactttctaggtaatcgaggcttagccaccgaagcagttgaaaccgaagaagaacaatccgaaccactcatgacttcaaaagctttctccttctccaactccttgaacttcattttcactttgagcaactcaagcttcaagtattggttttcccggtttagtttggagagttcattcttgtaggagctgagctcaggaggagaaagagttttttctgctgttgctggtgctggagaatctgaattgcttaaattttcttggaaacgatcgttttgagctgcgtgagcatacacatctcgcgatagctttttacagtccattaagctacaaactttcttcttctccacttcacttatattcggatgtgtctgcaccaacaagattaaacaacattttctaagatctttaaacttttcaagatataggtcagaacattttgataatgttaaaagctctagtttattcatcaatatagttttagtgttatcaaataaatgtataccttgaggaagatgtcaatggctcgatacatcctagactgtttcggaatacattcagcaaaaccgatgaacttcgcgaagtttatgtttctatcagaagcgatttcagccagataagtctccattaattcaccaatatcactagcaaaatcagcagagtttccttcaacttcaaactcaagatagttcatgaggatacgttgaacagtatcaacatctaacattgtgttgtctccattgaatgaataataaggaatcaagagatcatcaataacagcttgtcttaattgcaatcccattctcttctccaaatcaagcctgcaagctaccgtggtttcgaggtatatcgcagctcttaaaagtatcgaaagaaaactaactgacactgagtttctctccctcggaagaagactcactattgtttcaaggatcaaccttttctcatgttcttgttctgcctccatcttctttgcctctttcccaaaaatgtcctgcatttcccacagagaaaccgacattacattattctttaaagtaagcaaacacattgttctgttaaaaaattcaagaatctcaccaaccctctaagagctttttcggcatagagtttaagtactggaccaagtgagtatctcttaaaccctctagcgatcatcgcgaccaagacacgtcgaaacatatcaatctttagaacagctaaatcgtcagcccaccagtcaactatatcctcattgctctggctctcctggcatattgcataagcgattgaatcgatacaccggtccacgagtctcactctctcggctataggcaacaaatcttgagatttttgcagaactttaactgattttgataaactcttgaggatcacttcgtttaagtaaacctctattgtctccactaggttttcaacagagtgttcctctgtcatctctagatactctgctgcacatagtagcatcgcaatgttctctgtgtttatctcgaagcttatgtcgtagcagaatttgatgactagctcaaatccttctgcacctccaggaaaatctgggattctgataatgttggaatcattgcttgattcagaagcaagtttctttataaacccacattttgaaacaagtggaaactgcagattatcacagagactatgtatatgagaaagtgatctccttgtgtataatttagtagatcttgaaaaaataaaatcaccttgtggagtaaaaacgaaagtttctccaacatgaacagtgacgtcactaggaatttcttgagaagaaatcctgaaatttaatttgtaaaaaataagaaataaaatgagaaaaagttggaacaaagtgaggattaaaccattcgctagttctcttcatggctgaggacaaaagctccttcttctttccagacatattacgaacacttgacgataacagtttcttcttgctcaagaaataaaccctagaactacttcaaagacatctctcattgatttatagatatagtttcatgcttgacattcttacacacaatcaaaagagacgatgaagaatatgatccaccaaagagtttatggatttgtgtggttcaaacgtcaaataggtaagagcaactccattgcacataaaagagagtgtcttcccacaattaaaatataatgtatgtaaagaaaatatcttattataatgttttagtgtctttaaacttaagacatatgtcttaaatgtcttgttaaagaaattttagagaagaatgtctcaaatttaaagacccataacatttaattattagtattttgtaactttaatttttttaatgtttatcaaagacccctttcctaatgtgcaatggggtggctctaagggtccttctgtatctgagacgtcttttcgaaataatccaaacaccaattattgtcaaatattttatcttttgaacgatcacaccgcaaaatagtgtgattttagaaatattatagtgtgaaaccgcataaaaatacacagaataattttatgttaccgacaaaaaacatgtggaatgactatcaataattccacaaagggcacataaagcttctattctttacttctttctccaaagtttaagatcttaaattttgttgactatcaatagctccaaaatgttatggtccatacagctttattatagagaacattcacggatttgtgaccgaacatgaacaaatgactcatgaagactaaataagctgcacgggccggattttgtgacagaacatatgtcttgtatcccccacaaagcttttattatcagatttatacatatcgtttgataattgaatttctgattaagacacactactcaacctttgctataaatggtgtcttttaatttgctctgtcactttcgtgaagtttgactagtaatagtgataaacactaatattaaagacgtccgcatccaaaaaacgattcaagatttgtaatcttgataaacaacaaaacactagcatgtcttttttttcgttccataaactaactattcagctctttttcgtttgcctccgattgttggatttgaatcaaacttggaacataatcaacaaaatgtggccaatatgaagtcattgtcactactggaaaatacactcgtgtggcattactatccgcctcaaccatggatactgttataaccggttggcattttttttggcatttctcacaacacacgacaatcttcttttcctcgtcgaccaagaaaggtctaccgctccacatataatatctagtaccgacttccacttcgaaaagctttctccacgacatctctttggtctcatcatccatcttatttgttatccatatctctcttcttggtgcatccttaagctgtaataccaccgaaagtttttcttctccaacaactgatagagaataatcatgatcagaaatatcacactgaaagggaagccatagacgttcaaatctctctgtggtataatcaaaactgattaaccctaactgctcgtctttcaaatcataagcaaaccagtaagtatttcccttcaaagacacgcggtaatcagaacaagtgaagtagttgcctggaatcggagtgacatcaagattcctccatgtattagattttatgtcatagattttgaattcttggtcgccataattataacccttgtagctcaatatcttgtagctcttatcgcttgatttattgtcttggtaatatccaagaacaaagtcttgaccgttttcgtcgagattttcgccggtttggatccacttcttttgaccagtacacggattccaaaccacgattctagtgtcttttaggatggtgcatacaaataagccatcacagtgaaatattttcattataatgacttgacttgaattagaatgataatcgattgggctaagttcacctgtaaactcttcagaaggaaatccactatggagattgatgctcagtgaagaaagcctacatctttcctctagtactgtgataagaaactgttttggggctttatcaaagtgttttcttgagaatgtcctatcgttgaataaacggttccattctttgcacgtaagtcgtaattgtttgagagatgtggccggaacacgacatagtatctcctctaacaactcctgtggaaggttcaacaccatcattggaagaaagaatcggtggctttgattactatcattattttttaggttttcgtgtttcaacgtttactcaatgttatcttattggagttgtatataactctttccttttttttcattttactgctatttttagttttttcttttcctatttgagctttttttttttttttttttaagtttttccttatcccatctgatttctatttttattgttttacaaggtttttatttcctgttatttctccaaatgattcatatatgtaattaatgtcagtaaaacattattatgccaagacaaatgtcactatgaagaacttgctcggttgctccacgacattactttggtgtttgatctcatcatcaatcttatttgttacccatatctctttctttgatgtatgtgtacgctttaataatcaacaccgaaagtttctcttctctaacgactcataaagagatagtttcataacaaccacgctgatagggaagacgtaaacgttcaaatctctctgttgtataatcaaaactgagtaagaatataccgagctgttcctatttatcttcatcataagcaaaccagtaagtgtttcccttcaaaagataggcggtagtcagaatttatgaagtggcagtccagagtgtgacatcatgattcctccatgaattagagttcatatcatcgatttggaattcttggtcgtcacagttttagttcttatagctaaaatatcttgtagctcttattgccagatttgttgtcttggtactccgttggtagtatccaagaacaaaggttaaattctgatttgagtcgactctgttctcatcactttctcgaaattagactagtaaaagtaataaataatattcaaaagtccacatccaaaacaagattcaagattttcaaatcttgatgaaaaagaaaaaacaaacagcaaatattacacgaaatggctggaaaaactggttttaaacagtctgagaattgttttgttttaccttagtcatattattttagaggtctcgacgatggaccagaggtagcaacagctctttgagcacgctgcgtttcaccgcaatacagcatctttgtctgtttcttaattatccttgcttctcgcttttcggcttttacagcatttttccgctctttcttctcttctttcgactcttgaccatgagtcttcctcttgatcggttcagcttttgggatttccgctttgacatcggtttgttcagctctcctaccaggtaaaaactcgacaggaatcctctctctcccttggagattaatgattcttccatttgaactcaatgcgttagctaatgtttcactcagcttcttctgcctagctgactctgcagcaaggattttaccagggaggttatcgagattcgagtatgttgagactatggtttcacaatcatgcttctcgctttcatcgctgctttcttcagtcagctctacaaattcatcttcattcccgttatcaaaattttcaccatattctacagttcggcggataacatgagcagcagtgtccacttcctctttatctctgacagagtcactgttcttcagtatatccgcagggttcatatatttttcttcaagctcataatcttttgccttcccatgaataagattctgaacttcttgagccatgaagtcttcttcttcttcttcttctccatcttcagctatgtaaccatcaccgtcactatcacttccatattcattgagttcgagctgatcaaatagctcatcaatttgacgaggaactctcgggttttcagccacaggttcatcactttctctttctctaacctcacgtcttacagaaaactcgagctctccattgctcacaccagaagattcacccttttgagtaagattagcttgaacaacaaaatcttcttccaaatcctcaacatcagaaccaaactcagacccatcactgttttcaagcaacgcagcaacttcaggatcaatagctttctgcaccttgacgttaacagtcttggacgcaacactatacatcaacttattatcattaccttcttcattcaccataccagagatcttcacacgagacgcatcataagccttaacatcacgaggtaactgagcaacctcatacttaggattcacatagaaattagaaccaccaccagtattcttaatctctctcaaatgctccaagtaattataaccatcatcaggataccctaactctaaaatctccttcctcacatgagcaggtaaagaactactcgaatccccaaaactagagtaaccataatccatctcttcaggagcatcatcaaaccgtgagctgtctccttcttcttcttcatcttcttcaatgaaaccattgatgttaacagggttttgatcaactcgtaagaagatcttatcaccacctggtgcatcactgtatcttgggtctgacgtatcacgaggacacaactcgaaagtcgccgcctttttcttatcaataaacttcttcttccccattacttactaattcacaccttcttaagggttttgcaaactgtaaaacaattacgaagatataagatgtctaacttctaagtcacagcaatcaactagactatgtttcaatcctgactaataaaatgtaaatttttatcatcaatcaacacgaaaacatcgaaaagggagaaactttaagtctagaaacgattcaaaaacactaatttaatgaaattgaagaagcttacctgaagagtttgagagagagaggcggagaacaatgcagatgaagaacaaaaacgctgttgaagatttttagttttagggtagagccacccaaaacgcatcattttagggtttaaccaaaacgctgcgtttttgtgttaagcaagccaaaacgcgtcgtttttggcaacaagtcaaattaaatatttgttttatttccataactcagtgtatgccactaaaagaaataatccaccgcgggagagtgcaccgaatggttacatgcacctaatcttcttcttctcctactttcttcgacggtacctgttgttattgtgcgccatcttgatcttacgtgcgccgttggcgcattctcttataccaccattaacgtgcgtcaacaccggaaccgttgaatcagacgttactggtatcaggttcgatcgttgcctcgataccgattctctcgccaagatctctctttccaccgtcatgtcgaaagctcgtgtttataccgatgttaacgtgatccgacctaaggattattgggattacgaatctctcaatgttcagtgggggtaagatcgtatttttcgaaaattatgaaaaccctaggaagctaatcagttaaaaaaattggatcttgtaatgtagaaattgagctttttgtctagctggcgatgttcttggtttttaatctggttttgaggagagtttgttggttattatgattatgatcatgatgggtgatgatgcttttgttaaagttttgagcttttttatgtgggtttcgttgtcagggagcaagatgattacgaggtagtgaggaaggtggggagagggaaatacagtgaggtttttgaggggattaacatgaataacaatgagaagtgtattatcaagattctcaagcctgttaagaagaagaaggtgagtgtctatattacttcaattggtgacttatgattgatagcaatgaatggtgttgcttttacaaaaggttttgtctttacttagttttgattttgggttgcctttctgaatttgtatgatccttttacagattagaagggagattaaaatacttcagaatctttgtggagggccaaatattgtaaagctgcttgatgttgtcagagatcaacactcaaaaacgccaagcttgatatttgagtatgtaaacagcacagactttaaggttctgtatccaacattgactgattatgacattcgctactacatctatgagctgttgaaggtaattttaatttattttatgtagagtttattatttcattacgacttctgatttgtggaattttctcggttccacaacaaatttagttcagtgataaccttgcaaatttcctatgatatgctgcaggctttggacttctgccactcacaaggaataatgcacagagatgtcaagccacacaatgtcatgatcgaccatgagctgcgcaaacttcgcctaatagattggggtctcgctgagttttatcatcctggaaaagagtacaacgtccgtgtggcctcaaggtatgtatgataggcgccttcaagataagttggtttcctatccatttttaatatttagtcgttatcagtatctaagcttgatcaaatgttgtctcagatacttcaaaggtcccgaacttctagttgatttacaggactatgactattccttggacatgtggagcctcggttgcatgtttgctgggatggtgagtaccttgcgaaatgctaggcttccaatgctacatttatatatgatcattcttttcaaaaaatttccaaaatatagtatcgtaatgatgaagtgtctaaattatcttttcttgtagatattccgcaaggaacctttcttctatggccatgacaaccaggatcagctcgtcaaaattgccaaggtaatcaaatgcgtgggtaaatgtgggaattttagagggattgagtgttttttcacatctttagagtgtatgtttgattcttgactcaggtactcggaactgatgaattgaatgcatatctgaataagtatcagttagaacttgatactcaactagaggcacttgttgggaggtaagcagaactcacatattctctctatagtataagagtagattaaagcagtgccaatgaccaatcctctttccacagacatagcaggaagccttggtccaaattcatcaacgctgacaataggcatttggtctcacctgaggtttgtttactttgttctctgtattctataagaaacacaaacgcttttgtttgttgccatggtttctctctcgagctgtaactttgttttaaatgtaggcgattgattatttggacaagctgctccggtatgatcatcaagacagattaactgcaaaagaagcaatggtaagtatcatataacgtaactcaaacaagttttcgttctcatagtctgctaaattgtgatggttttatgaattgatgacaggctcatccctatttcgctcaagtcagggcagcagaaagcagcagaatgaggactcaatagagatgtctcggccgatttttgtttcttcttcttctccagtgtgctcttttgttgtttactaatacattttcatatccatatggatttcttttataatgtcgaaattatggatttataaatatgagaattcttattactccctccggtttcttaaaagtttgtgttttgagatttttgacactttaaaaaattatttacagtaccaatatgaatctagactaagttgtaacttgtaacgaggctcagattacacacacatgccttgtttgtacacaattatgtgtctttgatcattttgatctacgttatgtttccaaattgatattttactgaacttgtatctatacttattgttccccagcagtagttatgaaattatgaaaaacaacaagcgttcaaaaatcacacagatgcaaagcaaaatacgataaatcacaacaatatcgaaacatatcagtgttttactttcaatacaacaaatgaaagttcttataacttggaagactaatggccaccaaggtagatcacctctttacttttagtaagtaaacatgatctggaacaatattcaaaaccattgcactggaaaaatgttttgtgtggacaacgcttcttgcaaataaagcaaaaaggtcgagacatatgatgattgtttggcagaacacttacctctgcaccgtacttgttgaaccattttgaaccgggcttcatgtagaagtccaccccaaccaagcattcaatgtgtatggtgacacaacaatactcatcacaactataaaaccgctcctttggatttaatctttcctcacaaatttcacaccaataagtcatggtacttgtcttgtccccataagaaagagtgagcacatgcttatcatgcttatacctcaccttttgagctaaagtagcacactcaaaacacaaagcaaagtcgcactcctcgatgcaattgaacgtttccttggtgggacaatgccctgacttcttgcaaaccgaacattttctttgctcttcgtctggtttggatgtgaggtataaaggatgtatatgacttggatgatctagtggctcggaagctatggcacactgcacgtgtagataaaaacattttctgcaccgatagaggaaaccgacagtacgcttcctaggacacaccgagcattcatactcattgatctccccatcaccgtatcctgcctctaaattaagctgatgtggatgtatcggatgatctattttacgaggaaaatttgcgcatgtttcgtggagattataatcacagctaggcgtacacgagtagaagttaccaaaatagattggcgtaatgcatatgttacacagcttatcctcgtcgtaatctcttcccgtgtccacatcaagtctcaaaagatgacgatgagtgaaatgtcgtatgactccacttcctttcgttgcaaacggtggatctacttcttcctcattttcttctggcactccctcaagttctacaccatcccacacatttttttgtgttgcacatcttgaatgtgccgcataccaacaaccatttttgatacaagaatagcctccgtataatttgttgatctttctgcgacaaacaccacaagacaaaccttctttctcaaacgaagaagtaaaatagatacgatggctatggcgagatatctttatgacacgtggtaagttgatacatcttagatgagtcacaaagtcacaaggcggacacatatagataggagagcttggatcggccaaggcgcaaaggttgcaagttaagaaagcttgtcttggaaacagagcaagaggatgaccatgccactccggacggtgatggtttatcaaaaagactggtggtttcctcgcacaaagtatacttatagcaaaatcgcaagccgagcaataataaagtatacggctaagagcttcatcacaacaatagcattccctggtactatcttcctgcaacacgacaagctggagagaatgatttggatgaagaggatggttgatctcaacaggaacattgttaaattctttatggttatcgccattgcaacctatgcagataaaatggagagtgtcttcttctcttgataacttgaatgtccgccagtttacagaaaggcaatgccacttgttattggtgcgccacgagacgtcttcaagaacacgaaatcttccgttttccagttttacttgtgcttgagggcacaaggaaatatactcccccgagtttgagttcatagagacgacgagggagagtatttgatgagtgagtgagataagttccggctccggtttgacttccaaagtttcatcaatgagagaaatcttttgagaaatgaatgatattagctccaccagccgctttggctgggaatctgaatccctagagttgactagagagagtatctcttggatgagtaacactagctcatcagactctggcttctcctctgtagtcaaatccattgagctgaccagagagattattttaccaaagagtgttgtggcttccgagtccaaagcagagttaaagagagataaattttgaaaaaccattgacatgagatccgacagcagtttggactgagactccaaatccatagagttgaagagagatattgcttgagtagtgagtgacatgaactctgactccggcttcggctgcgaatccaaatccattgagctgactagaaggattagttcggtaagcaatggagtggcatcccagtacaagttaaagtactcgacaaacattagttgagtaaggagtgataagagctccgactccgaatccggatccggatccatagtgtttgccgagagaggctctttgagtaaaagttttgttaatatgagagatttttgaggatgaatgtaaggtcggcttatgcaactttcatattttcttcataaacaaaacaatagctttgacttttgatgcctagtgggagagtgaaatttaaaaatactggcaagtaggcaacgaaaacaaacatatatataaacaagtaccaattttttgtatttgtataaaagaattaccagctattaacttttctatatattaacaactagattaggacctatctaaatacacctgtataagaaatacatgttaagttttattcaattgtaaatggtaacatgcacacaagtttttctttataaaccggttttgaactattcaatcttacaaaacaatttaactatctatctcatcataataaattatattttttagttttgtgcattttatctcaatggttaagagctgaaaaatttatattaaaatgtcacaatatatatatatatatatatatatatatatatatatatatatattgttagttttctattttgagtaaggataacaagtcaataagaaatttacatatacacatataaattagtatatgtaaaaatatttttatttaattttccatattttatgaagaaaataaaataaaactatttagacatataaatatatatatactacaagaaaaaatggtaaaatcttagcaatttttctacaaaacttttagtaaaaaaagtttttcattatatacttatgacttttctacgaaaaacagttcttagaagaaattggtaggaattttgtccaaccatatataccctacgacttttctatgaaaaacagttgatatagaaaataggaaaaaatatcctatatatttcttccaaatatatagttagttaaatttgtatatgagactggaaggagtttgatgggaaatgaagcagtagaaatttgataagtatatttgatagatacatgtatcaattttgataaataccacaatcatataaattattaactttaaagtgaaaagttttatagaataagatgcttacacaactaaaaattatctagttaaagaatgaccaacttgattatcgaaaaaagaaagaccaacatacggtttatttctgttagaaaatgaccaacttacactcttttgacgttggtttcggccaaatcgtattaaattactgtcatttttctccctcgaacctatctccagactgtcttactcgtaagtcgtaacatcaactttttctttttcttttgtaaatattcgttgctctatttaatattttttttgtgtcccactttaactcgtaaatatcaacgttctatatatacaaacaattaaacaatgaccagttgttgatgagtactattttaataaacaaagacagattaactgcaaaagaagcaatggtaagtatcatataacgtaactcaaacaagggttctttctcatagtctgctaaattgtgatggttttatgaattgatgacaagctcatccctatttagctcaagtcaaagcagcagaatgatgattcgatagagatgtctcggtcaattttgtttcggtgtctccagtgtgctcttttgttgtttactaatacattttcatatacatagttacatacatggatttcttttacaatgtcgaaattactttaaattatggatttctatatatgagaagttttattactctctccgtttcttaagaatgtatgttttcagatttttgacactctaagagaattatttgcaataacaaatatgacctcattttcttaactaaatccattattaatcttgtttaattatacgttatattgtattaaattgattttgggtgaagtagcccaataaccatataattttaaaaaataaaacacctttctaattcagtaataagtgaatttattagattggtcttttgtgttcttcagagtatctagattccataaccagaagcagcttgtgtttggaaacttcaaaaacagtaaaaatcacaagtaccttgtgatcgcagaggaaaaacagacttcaagtcttgacgattcaagtcttttggatgatgctcaagggttacatgaattctcaccatatttctctatctatcatgaattctctcgtttttgtttcattttactcagttacattacataactaaattttgttattagagtaagatggtaggatgattaagcaacaagcatgagccctttgcacatttcattatctttgagaacatattcaaacacaacaagcaacaagtggtgcattttccaaatttttcatctaagaatttttttgaaaaatatttcggcttaatttgttcaataagcatcatatttcgtttttgttttcttgatacacttcgaatagttgcataaaaaatgcaaatgttgttaacttagaagcaatttatcattcataatataaattacgatataatcaaacaagttttttaatctgagagaataaaaatacttatcggaaattattgaaacgaaagatataactgaaatagctaggtaaaagaacaacatagttttcttatccgacatgaggaatattatagttttctcatccgatgtgaggaaaattactgacaggaccattgggacagttgttgacgggaacacggacaatgacacggttacaacaattgacggctagtacagcaacatcatcgggaatgataacaaccaccacttttggattgtcatgttcgattattctcttagcttcaagtccctttactccatttaattctggccaatccaccttaattcctgcaaacaattattccatatgtttttatcttttttttctaaaaaaaagaagacaactctaaacatttgtataaagcaaacttttgtttattattttgttgattttcataaaagataatcgtatcagtttagtgtagataaattggtggtttacaccaaaatcatagtacgatatgacccataaaaagagaagaacacaaaaacttgaagataaaaattaaaaacaatgtacctggaaatagaggttggcacgtaatgccagcacagctgcagcgttgacacggaggactatagagcggacaattacgattcattttgattatgcgatgatactttcaagttacaatgatgtaatgttataacatatattttgcattagtttggtcaatatttagcagaatatatagggcttattaggaaacgtaatcaatgtaattattgttgactaaataaatcaatttttaaaaagaaagattaatgggtttcatccaaaaagataaagaaagatgtaatggtaaaatctaatgatactgtactttaagtgtatgttataatagcgaatcaaaatgtaatttgttatctttttgggattggtcaaaatatataggagatatttagggaaaggaaatcaatgtaatctatactattaattggcctttaacaagaaaaatatatccctttaattgggggtattttaaataactatgaaattgttatactttatttcaaatggttttaaatctactagtgtttaaaaataaaacttttaagattttattgtttcttgagattttgcttaattttatgtattatatgatgagtcagaatagttataaaaattaaacaattatgatagaagaatcataattttaaatttcaaccaaattttaaatatttattattaaatatggaatattatatggatcttttattttattttataattattatagatgcaaagaatataccatagatgtttccgaaattaatacaaatatttggttcataattttggttatgttttgactcgatcaaagtaaaatgtaaaaaaggcataaatttcacggctctgtaaccaaaattaattagtgttagattctttctgaaagggtttgaaccagaaatgagtccgatcaaccagtttaacgatgagtttagatcccatgtatagtctcgggcatggtactcacacttcatccatagtccctggatctgtagttaaaggagcatgctttctaagatacgccttaggcgttgctcgtggaatggctccacaagcacgaattgcaatggtatttttgtggttgcagctactagcaatgactgtctgaatcatgtttcatcttgttcttatttctttttgttctcttccagtaagctacgcaaaacgaatgacatttatcgttcatatggctcaggagatgccaatcagcttcaaagacaaatctgaatggtacaaagccaacgttcgatccctctcaaactcggcggagatcgtttacacatacaatcattcaactcatggttttaggctgaataaaaatacaaatctagaatagagttacttcattttagaataaaataaaggaaagagttggagatgcttttatatgtatcactcggacacatttttttatgagaatatgcactagatgactatggattgtaaaagaactaacaaaatagccatggtgtcagagcacactctctttcttcacttgcaattacctttttacccattttcgtattatatatatattacatgctatttttcaaaatcatataaaacacttagaatcatctcatctttctttcttccaccaccacaactaccacatcttccaccatcacaaccacctgatctctttttcgataaatctaggctgccaaacgttatttatattgatagatcatctctccttcaatttgcagaagatttgtcatttttttattcgattttgattatttcttggaatctccgtcgttatgttttttttttaaattgtatgttattttcttttataccacgctactttttcgaattacacgtgataactagaaatctctctctctcgacatgctactttttcatataacacattatttattaaaatcacatgtaatttcttctaaaaacatgatttaaatgttaaaactttctcaaatctattattttatcttcgtgtaagcttgctcatggttcaacttttcaaatgaaacgatatttgtttatataacatgctatttgtgtaaaatgtacgttataaaatatcatcgtttttataaatatcgtgctattttaacatgtttcatgcgatttgctaaaaaatatcaaatatatctacataagcttgcttttggttcaacttgcaaggatagttttgtattttcttatgccgtcatatagttatttatccatagaaaaactgacaatggttagttacttgattcttttcaattctatagttagtttctaatattaccctttttttatttactgaacgagttacctatatatgtagaatatctttttgaaacatcgtattaagttttcaaagaatttagtgatttttttttttttaataacaactccaacgatgttatagttatttgacttattgtaaatgctgaaataagaaaggagaaaaacaagttgagaaaaacaaagagaaacataagcaaaatataagcaaaacataaggaaattatttgcataaacatagaaataaatatttgaattgaaaaattgaaaaaaaaaaaatgaaatggtaaaattatgaaatgacatctggtaccaaacttcattacaaacccagtaatataaagtttgaaatcccgcttcaaaaattttttgtacatgcttaattatctcattatcaagaacattatctcaaaaacaaaatgtggaagaaatgtcaaatattttgtggtaatgttttcaagatgatttgaactttaaatactaaacagagttggtaaaccatgtgataaaagaagtttgttttgtttttgatttaaattttaatttgactagattttaaggatttttatttactttgatgaatttttttgagtttttatttatttttgttaagttagcttaagtttttattggtttttttgaagtatatcagtgtaggcgctgacatcgtagatcgtctttttccaactacaataaccttaggaaacggaaaaaagtttgatgtcgtctcatcattgttcaaacccagcagtggtttgtctaacacaccattacctctactcggtacacttttttaccatccgtgttcgtcgataaaaaatcgggtgacaatattaaaaattatatcttaatagaaattcaacagcgaaagttatattcaaatgaatcatcgtagatgtcaagccttcacccagagccgtgactataagctaacgaaaaaggcaattgcctcaaggccctgatatattacagaacctcagaccttaactacccttcgtttgcagtcacgatcaaccagtcactaggtggaggcgaaggcgcgtacacatagaggcgcattgtaacgagcccataaaataagatttaagtgttgttaatctaagaaataatattgttatggggcttaggcccagtttaaataagcagcccataaaataagattataacagaatctgatctgttgttgaatcgtaccaagtaaattattggcttatcaccatgaaataataagttattaacttttagtattcaaaaaagaaaaaaacggtacaaccaaattaacgaattaatatctaaaactttttaatcaaaagttcaaaacaaatgatataaccaactactaggaagtaccaatagtcgagtagttcgactccaaataatcgtattaccctcattgtaagaatttggttatggatcatgttttgtcgatccaaatgacgattaaaaagaagaaaaaataaaaacgatttcgccaaatcagtttttgattaaagaaaacaacacaatttcatcaatctatcgctaataaattaataattcatcactcaacttgaagacaattaacgaattgttaacaacaattaatgcctaacacatcaacaccttccttcgaactttgattttgaaccgtcagatcatcgactattcgacacaaccccagagaaaatacacgtggcgctcatctgttttcttatcatctgcgccgcatagtagggaatcctctgtgtatttgaatgcttgactcgatgatcaacgaacgctaaacaatccatcaagctctctctcgtcgatccttttaaatcgaacgcttgagatcttctccacaaactcttaccgtggggattattcacaccagataaacacaaagccctagtagcatcactaatagcagattcaactttcttcaacaacaagtaacactgtgctctgttgctaaacaacacaaccctatctcttaacatatccaacggacacaaatcaatcccaactgtgtaaatctccatcgcttctttaacaaaacccttcaaaaacttcttcttcccctgtttctttaacgacttcaccatctttcttctttcttcaagctctgtttcactcataagcttctctttcttcttcctctctactttaatctcccatagattctctatacttctatgagcttcctcggtcgtcatcttcaagccactatacttaatcttgtgataatcttgtaaaactatctgagctactctgtctccaacaactttatcttctgctaaatccactaacaatgacctaaaacatcgataactcgatacctaacatttgagtctttaagaagcaacaaaagtgtatctaaagcagtttctttccaatcatcagacgatctcgaaagatcgcaaagtctctcaatcacttctctaacctcactaactctctttctccccaactctgttttacaaagagactttatcaatccaagtcctcccggagacttccggtttactaaaccaccccacatttcgatcactttcttcaagaaccctccctcgcagattcggtcaatagacttacctcgagatgcgaaacaattcaatagaaataaagaccaacattgtagctgaatcccccattcctctgctttttgattctctgtctcaaacccaccaagccctctagtcaacaaatcgctctgatactttaacctacccctatcttcaaccccaagaaagcttttgtaaacattcttcaaacaattagtagctatctccattgcaagcttcacaatttcttcttcgaataaagaaaccgcttcaaaactcttctcatggctagctaaatgaccaagtgctcgagctgcggctcgctgctcaacccaactgatcttccctctcaaaagctccaacaaagcaggaacaagaaagacctttgaatcaaccgccatggcagctaaatcttccttgttcataacatacgatccaatgatatgagctgcgtaataaggaatgaatatgttctggtctttgagaagccaaacactgtttttgatcgatttatgtatgagttttgacatacactcgaacaaacctagtgacgggaactcaggatcgtcaggctcggacatggctatgttccacaaaccactcaagaccaagacatggtcttttgactccgtacgaggaatctctttgaagattgcagcgagttttgatcttcgacgaaacgggttggtatctttcatgctgcagaagaaacaggatgggtttgtgcattttggttcatcgaatttcagcatcttcttcttctcctttgttttggcttttggtttttcaaggagataactaataaagacattagtcaatcacttatgctttaaggccaaaaagaccacataaggttttttcttttggatgaattaattgttaattacaaacacagagaaatattaatcacataaatattcgccggcgtggaaagtttatggcggctcctctttttagcctttaactttccacttcaagttccaaagattgttacttaataataacctataacgtaatgaatcagaatactaatattcatcaaggtttcgtgttctttacccaaaattaggtagaacaagaaaccaaaagggttgtgttcacacaaattcaagatatatgaaacggaatcatggacaaaatccatggtagttttgacatcatggtgttgttagttatagtccaaatatataattaataatcttatgtgcaccaaaatggtgacagctaaagacttttccatgtagtgaaactccttaagcttttcaagatactaagagaaaggaaagcatttttatcaaatttaagcccgagtacgacatttacgcttatggaataaatgattcgagatttgaaaatgtaaagaggctatagagaaagtgagattgtatttgcggtcccctcaagtaaggccaatgaaagtgaagaaactgtctcataagatagctttgtcgtcgtttacaaatatcaaagtgtttgtttgggtctcaagaaaatgcggctacctaaaaagtttctctttaattatcactaatatttggtctttacaggtaaattaattatcactaacctgactcatcttccatgttaatcattttaaaagattcgaaaatcaagaaagagccttttgtaggaaaaacacttcagagttcagactaagttctcgacttgacatgtgtatgtgtcggataaagtttctcaagattattaaagaaaccaaaccagagtctagtgttagtttagtttaatcacagtttgttgttaatcaatcggcgtgcgtgactttttgactcttgtgcacaatcacatgaataaactctccataaggaagatcaaaaagatttgaatttagaatcaaataaggtctaatgactcatattgaacaagaaagataatagccgaagatatggtgctaagtcatttaactctgcacaaactctgaaacctattctggtttcataattcataaagagccaaatccaaagagttagtagagagatagagaagaagaataaacggaatataccaatattactatcttatgagagctttatggacatgaattttagctgatcaggcaggaagataaggctctgtacagagagagagcttcagtgagaagtattccgcttcttggtgaccggtgtaggatcttcttctgcatctgcttcttcccgtggcacgcctgtaatctgattgattatcttcatgaagtaatcaagctttttgtcatccccttccatttcatgatcattcatctctggctcatccattagcagctgcataaaaaccatttcaaagatttttctgaactctttttcaactccaaacaaacattttatcattaggaaattatcgaataaacaactcttacgtcttcaaggatagggtgaaatcttaagctagatgaaattggagagttgttagtcaaacattgcccaccaatatgtgtctgaggcaccattaggtgttcgatatgatcagcaggtatacattgttgaccattttgtacatgagtcaacggggcttcaacaagagcacatttcttgccagtttgtatcatagagtctctatgacagggagctaccatttgaggcattgatgatgtatgagcaggctgagaatcccacatcaactgatcaacacgcttcctcaatcttcttgcttttccctgtgcctcatcaatcttacacagaaactttgcaagtacatcatcagaacaatctaactcagaaattagactatcatcttcaatcgcatcttgcttccccgtagctttgcgacctgtaccaaaatcttaacataatattgatgattcagtactaaaactcccattttcaatcagacaatcaaaatcaaacaatctgtatatatcttacctgaatcaagatactgccctttaacatttaccggcacccgcttatctgataagaacaaaaagttatacaccattgttatccccaaaaagaagaaagttaaaagaagcaaagaaagctgcattgttgatataccagcataagagaaaaggttatggttagacatataagcagcaacatctgtagtctcttccactcgtttccttcttcctctcttaaaaacattcctcctttgattgttttcacgaaaaggaatcgatttgccatcaaagccttccaatttcgacttctccaaatcaaactgtttagtcaaatagtaatctttaacttctttctcataccctctagcttgagactgaatctccttaaccttaagctctatccacttacatctccacattataggcttagtcaatctcctccacctatcattcgtcttcttcttaggcaaacccaaaaactcagtcccatcatcacaagttccaggtaatggataatcattgcttaacatagattgtgcttcatcaccaaaaccaaaatcatcaccatcacgagcacacattgaatcaccaaaagaacttgaagaagaagctccacacaaaacctcttctctttcctcttcaaaatcatcatgccacttcaagatatcaactatatcctcttccacctcttgtgcatcctccactacattaacaccatctggttgttgatttgcagaacaatctgagatatccatttcagatcttggttttgctttaagcgccataaagtctcaaactttcttcagctataatcggaaaaaacaaagattagaccaaaaagctttcaactttaatgaaatctaaaacgattaagcagtgaaattgatcttactgatctcaaagcctataagagttgttcaaaatctataaccgagaaaaaaggaaagccagaaactttcggcgaaattgaagtgattcggtgaatcacagaaacaaaagatatttgatgatcaaaaacagttagcgtaaatccaaatttcttggagagtcttaaaccctaaacctcagaagaaagagaaagagagagaagaagatactcaccaactatttccgagagaccgccggttctcaaatccgatttactgaatccaaaagaatattttttttggaggtttttaatcccaaatttaatttggcaatattgtaaaatctgttaataaaattatattatttgtaataatgttttaaatatatatattttggtttttactcaaactaatttattcaatattctgtttaccatttttggtttctttagtttctttttctttttcttatttttaactttctgattttattttgggatatttttctcgattctcaaatgatatttctaacaatttttaccaacaggagcaattaatatatttctgcctaaaaagtagtaaatagttttttttctcttgttttggatttgaccaattcaaaaaattgtgtctatttatgatatttttactatttagtaatcgatactccttttgtcctaaattataggatattttagcttttgttttgttctacaatatactactcattttctgcttcaatacgacttaaatcttcatttgttgagtttttaacaccaccaatttagatatattaaataatcatgattaaaattaaattaaataaaacaaaaattatcatgtgatatacggttacttaataaaaattgtaaactatacccaatatataaatgttttataaaatcaataatttgtaaacttttacatataatatatagtcattaaatataaaaattacttatttaaaaaccaaaatcgtctcacgagttaaaatctggtttctattaaaagcacatagattaagatataataaatgttttctaatttgtaaaaatttttaccaatagaaaaaaatactacataattcaaaaagccatcaacaaactaaataaacataaattatacatataaatctgagtaaatcttatattatagaacaaaataaaaaccaaaatatcctataatttaggataaaggaagtaaaaataccataaatgaacacaattttttgaatatcatatgctttgggcagagagagtacaaaataacgatccacctaatttaacgccaaacattaaacagaaaaacaatatatttggagcatgtgtgattatcatatgtgattcagcaaatcacccaattatcatatgtgattttaatcccaaattaatttggcaatgttgttgtaaaacattattatgatttttgtttttattttatacatgtaaaaatctattaataaaattatcttatttgtaaaattgtttttaaatattttttctaaaatattttttttttgtttttactcaaacttatttattcaatattctgtttacctttttttggtttctttagtttctttttattcttcttcattttccccttatttttacctttttgattttagtttgggatattttctcgattctcaaatgatatttctaacaatttttggcaacaagagcaattgatatagttttgcctaaaaagtagtaaatagtttacgttttttctcttgttttaaatttgaccaaataaattatgttcatgtatggttcgacatatacgggttaactcttcattttattagtttttaacaccactagtttagatatatctaatgatcttgataagaaaaaattattaaaaaaaaattatcatgtgatataccgttacttaataactattgtaaactatacccaatatataaatatcttataaaatcaataatttataaccttttacatataatatatagccattaaatataaaaatcatttatttaaaaaccaaatcgtcccacaaatcgccggacgaattaaaatctagtttttattaaaagcacataaatgaaaaaataataaatgttttctaatttgtaaaaattcctaccaatagaatttgtttttgcagaattccaaaagtcatcaacaaactaaataaacataaattatgcatataaatctgagtaaatcttatattatggaacaaaagaaaagctaaaatatcctataatttaagactaaatagtaaaaatactataaatgaacacaatttttcaacgaaaagtcataaagaattaaaacaacttttcaaacataataaataaatcaaaatatatcttacaaaaattatgataaagatatctaactctcataattaaaatatttatgataaaaactcaatattttaaatggtgttatgttaaagaaagacaatgacatagacatagaaagaaaaaaagagagacaatgacacaatgctatataacgaactaatgcaactttatatgaaaaaagtatcacacaaaaataataataaatatacataattttctaagaaaagagaaaaataagtatagagttaaaaagacataaaagtttaaatagaaaaaattgtttgtaagagatacaattattggaacgaatattttgtgattaaaaaaaacacgaataaaacatggtgaagaataaaaactctatatgaacaaatataattttcatcagtgctcgtaaaaaaatttcataaacggcaaatgttgcaacggttagtaaaatataccaaagttgtaatagttcttgatatattctaaaggttgaagtggttcatcaaatataccaaatataatagtaataacaagcctaaacaaaaggattagtttcataaattaaaacgaaaagtaggcattatttactaaacaataaagatcattcagacagttgggattctgtttttttttttaataagaccaaacagctttgctttttcagttttgtgtatgaaaaaaaggagaaaataaaactaggtaccaaatcctttatataggttgaagttcttgctcagctactatagcttcatcaacaggcttgtatggaattgatgtttgtttccgtttccatatcaaccaagctccataagctgataacccgacgattacagcgatgattccaatcgcgatcacgacaatgttgttattcgtcctaaaaaacgaatggaaaagaattttctttttgagacaatggaatgataatcttttagctacggttgagaatgaatggcgattaccgttttcttggaggctcgagtttgtaattaaccagctgatagtttccgaagatttcaggaagctttatttgatgatttgtaaaccgagaaactatattctacaagaagcataatggaatatgtcatgtgagaagataaaatattgagcaatgtaaggagaagtcttttgtgtaatcattaccgttgctgtgacatttgaaaaccaagtagaaggttcaggtgggaggacaaccattctgacgagagactcgtttcctttggaggtgagattcgataaactgacctgtgacagacacattttcactcaatattggcgaaaatagtgcttaaggcttacaagttgttgtgtgtttatcagtttggctcacctgtgaagatttgacatcgagctccttggagaatatcttggagagatcttcaatccgaggtttcagataggacgagttgactgttagttgaatatcaaggtttatttgaccaacttgagtcacacctgaggaatcaagtaccacaaacatcaggagaaatagaaatagtttcttttttcagtttgtaatttccaagacgagagagtttgtcgtgctaacctgacagattgcttgatgaattgtgggagggatttgaatcatttgaaggcaaagtagcaggtggtggtgcaccatcaatatgaagcctatccgataactccgaacaattggttctccagaatccaaccttcgaattctcacgatcatacacaacaagtgtattacgaaccacaattcctgataatagtataagatcatttgttacaaatgaatctgttggcaagtaaaatgatatgcagtataataacaaatgaaggtagccataaaaagagaaaaatcaaacaaagtaatgatatctatttacctcctaaaagagttgtgtgatcttttccgtttgggaagacaccgagacagtaagcaccatgcaccttggaatgcttttattgatcaaaaagtaatcacatcagctactgatttgtggctaaaccaacaccagacacagagagacttataaatactgcatagagtgctagctatagagagaacatggaacttcataataggttaagggctacattacttactcgaaacatgtaattttcaggggacaacagccatgactgtccactcttaaataccatctcgaccgatgggaatatctttgaaagttccgagacataattacttcagcataaacaattataagagtcagttacttgccttgattataagttatgatatacaccacaagtttgcaagagataataaataccttgcagcgacttggaagcaagtatctttaaaatttggatcaggaccatcaatctgcttcaatgtggaaacttctctcattaccttcaatacaacaagataagagcctcatgtaagataagcaacagagaaacagggaacttaactaaacattaacaattctcagaacagttcttacagcttcctcaaatgccgcaaatgctgcgtctggaagataagcatatgttgtaccactgtctagtacggcgccatgttccccgtcaaagactctcgaatgaagagacaactgcttcccagcaacacgtatccccgtcaaatctatattgtaatatggactgtcgccatcccgaaactagagtaaatgtgtgaaaggtattaaacgtatttgttaggattatacaagatcccattcaccaatcagaaaaagccattcccttggaaacatacctacgatcagggtccgagtccgtaaacaccatatcagatggataatcaaaaccgccaagaatcatcgaaccaccaccaacatccatccctccataacacaaaccaaaagagttgcttatcaaacctttatccaccaattgatcaacaagactaagatctccttgacctaatccaataatcccatcagcacgttgactataaagatcaccggtttcaacagtttcacaaccgaaaacagctcgttgaggtgttagctggctttcattgccaaatgaaataagatcttctccaagaacacctttactactactatgttcagcatactctctctcgtaaacacattgttctctatcatcatcacaattacaatccatgttacacttaacaggttgataagtgctagacatttctggctgaaattttgggtcctgatcaataaccataagaaagtttcaaaatttgcaactttacacgagacaagacacaagatttggatatctagagccatcattacctggtgtttgccacattgttcacaatcagaacaaggaacataagtaacagtactaccagaatcaactataagagcaaacatttgtggtggtgtaccaatccaaagcctcgtagtgtaatacctacaaatacgatataatagtatataaaagagacatctttacatgacccagatcgggaaatatggaaaaggagattacccattaataagaagatcgtcgtagagtctcatgcgagagtgaggaagtgattttgagtcggatttgtggagttttcgatgtgggattgatatggatctcgaagaagaatttggttgagagaggaacaatgggaacaccatgggacgtcgtgatctagcggttggagattggtggaggaggttgttttcaccagctgtgattgaataaggaagagataaatagattaggagtgagaacgtcgcgccgattgatgagatcgacggcagtgccatttgatctccggttggatttttcgaccgtaccgtcggagaaaattggaggggaatcaaaagagctgagtgagtggagagaagaggggagactcgaacgtaactttagatctacgggaaccaaaagcagctttctttgagacaaaacccagttattgaaacgacgtagcttttgtgtttttaacgcatttttttaacctctactttttaacatcgctgtaccagtgtttatttatactgtagaatggttaaataacataaaaatcttcctacaatttatttgaaatctttggcatgttgtaagagattttactctatagtaattaaaaagtatgtattgttttgttgttgtcagtttttttatagatttaaaacgaaaaaaaaaaactgattttctagacaatgtatttattttttgtaagaatgtagaaagattgatctaatttttacgataatttctaaattgtcgaaaaataattatgttaacaaaaatccgatttgacagtaattaattttatataaaagtgaagtaatctaccaaacctatagaaaaggtttaattactatctatagactatagagtaaatctcttacaacaagcaaaagattttcaaataaaaggttcgaatgttttcaaatagatgttaaatctatacctttgttgattttgatactacatgttacaaggtctcactaatcatggttactgtatagctctatgaaaggattaacatgaaattcatctatacaatatgtaagaatgtagttatcctacattttgttgactaactcagtatgtctctttgtatgataatgtctcactaatcaaggttcaatttttagatttagacttgttatagattttggttatgaatcaccaaaacaagtaacaaatatttgagatttaagattattccatagaaattttaattcctctgtacattttgtttttgtttttaattttaccataaaccccaaaaatgaatgctcttgaaaatccccaatcgattcaagttttaaccctaaaccaaaactactcaaccttaggtgttattactccacaatccctaaaaccaccattgccgccggattcgtataaacctccgacgacgaatccaccacttgttttctgcatttccgccatgtaactcctcacttcagcttttatcatctcctgcaccaccgtcataaactcacctctacgtccttctcctctctcctctacattaatcttcatctgactctcaaatctcggaaacatcaacgcgttgttgttattgttatggctcgaactcgtgttctcagctccaggtagtgacaaactcaacgaagtaggtggatcctccgaagacgaagacatttcaaccggtaacggctgcggaaccaccgtaaaaccgccggaaatcggcattggtttaaacagctgagcaacaggagacgacggtgacggaatcgtgctagaatcactaacatcgattccgttaggactctcaggactcatgtacaatccagtatccaccggagcaaaagcagaatcaaagctaacagatctcctcttcttcggccgatcctgatcttcctccgtctccgtcaccgtcgtaaccgccacacctccgctgcatttcctcttaagcgtagagttccagtgatttttaacggcgttatccgtacgaccgttaagaagacgagcaatcgtcgcccacttgttaccaaactgagcacgggcggttacaatagtctcatcttcctccggcgagaaaggacgatgctcaacctccggagataactgattacaccaacgtaatctacacgatttaccagatcgacctggaatcgatttgctaatcgcagaccaattcctcggtccgtatttctcaaccatccttcgtagctgctcatcttcttcttgactccatggacctttaacacgatccgccattgaaacagatcttttgtttgtttgttgtagagaagaagaagaagaagaagaaggtggaggaaactgaagagaggagaaaaaaggtatttataacagagagagagatagagaggaggatggataataaccggtaaccggtagagacggtggagaaagtcatgcaccgcttcttccacgcaagcggttttgaaagttttgggatacagctgtaggtgtacacgtgtcgtgatctcggtgcgtctgtttattagtttatggagcgtgtgatacagtcgaaagagagaaaggggaagcacgcgcgcgtgagaagagagtgggaaaagaagggaagttaaagcgacaaaatcacggaaacctacaaggaaagagctctgatattattcgcacaatctgaggtgaaaaattagaaagctgttttgaatgtttatttgaaaaataataataatatctgagacgataacggttaggtttggcagtttgggtaaagacagttttttatgcagatttctgacttttttgactggacacgccagcctgtattccttgttatgcaaatttacccttttctctgaaacttttttccttttattttattttgtagaatacaaaacgactaatttgaatttttttttgaagttacataaggtttaaagtttatgggtcgggaaatattggaggataaaatttgatcacagtgttctaaaaatatttttgtttaatttaaatgttatttttgttattgtattgtattattttcaaattggatgatatatttaaacaataaaaataaaactgaaatttttgaaaatataaatgtgtagaaaatataaaacgacattagactgacacaaaaattaaaatgcaaaacgacatctaatttgaaacggaaaacgtattagatgtttttataaaatatgttttgattcgttgaacttgaaacgatattcgtaacgcttttgaccaataaagtttatacataaaatctgcatagaatataaaacgacgtttaatatgacacaaaaattaatatgcaaaacgacatttaatttgaaacgagaaaagtattagctacttttaaaaaagtattttgattcgttgaatttgaaactatacttgtaacggttatgctacgttttaattattcatagatttctttttttttttttctcgagaatacaatacacataatttaaaatttgtatatttttaaattttaaagtaattgcaagtatagagctggcactcttgaaagtaaaattttgattacacatttttaaaaaaaaacattaactaatttatgactggttaaacagtaattgtaacagttttgagcgatgaaattaatattttttacttccttttggtttatctttctaactgaaaaaggttcaaactgcctagtgctacaaatttgggataaaaatatttgtatcgtttatagaaatgtggttcagttttgtatggtttttttgtctgtgactatttgttaatggtacgtttttgaatgccccaaatcaaagtcatatagtatttacacaatacgggaaactacatttatatgattagatacgattaatattctgtttcataaacttgttacaaagaaacggccacacaagataaaagtaagtggtcggaaaaataaaaataaaatttgctgacatggacaacacgacaaaagagtgttaggccaattggaatgtgaatgaaatcatatttatttataatatatagtttttgattgacgaaaatccaggctgtaatcctcaacaaacaactaactgtcgtccattaagcaaactgccacgtgtcaaatttttggaactgtttttgaaattgtgtgtaactgtctcttacgttagtaacgcactaaacgtcatttgcaccttcttcccaaccttcatcgaacggtttcacaacttattttttaatttatctttttccgtattttatgtcgaattagttacatactaattagtcaaattataaacggattaccgaaactatttcagttttgatgttgttggttttcagtttactgaccaaactttcccttaattgttatttctttcatactaataatacattctagtgacgaaactaatattatatgctgtaattttgggtctgtagagattacgggtttcggcccaaaacctcctaatattttaaaaaaataaaaaaaaataataataataatacacttagtcttggttataaaagttaacaatatgtttacttttattatgtgttccacattctaacatgtcatatttaaatgatggttttcttggtgtatttctaatcgaaaacttatcctatttaggttatattatatgggttgaattagactataatatataccatgttaagttttattggtttgtaaactaaattgaggatttgtaaattgtttcgtgttactttttttttttgtcgtaaattgtttcgtgttacttaaacattgtttagatctatttcatttcggatccaacattttattttgggtcaatgtataattgacacgtacttttgctgtacacttagctagattttgaaagatgcacgtgaacatttggtgaacacatatacctgagagacggtgcacgatgtagaatataattccaacaatgtgtgtcttagaaacattgtaattaaaatattggtaataggttgttgtcaaaaggaacaagacggtgcacgatgtgtgaatatataaatcaaagtatatcatttgctgtttgttgttaattagggtccatgcttcgattgtcgggtttgttctcctaatttttaaattcatttttgtaaggtttgcctaacagaaaaactcgttcgatatatctaaacaacgataagctttaaataacataaagatcataatactaacacacggtggtagattagtcggtgtaagaggcggaaaaacaaatatatgttgactgagttcattgtatcattcgagactttcgagttatttaccatttagtggaattttatttacaggaatgaaaattgttatcttgtcccaaaaatattcgtatgaatatgttctctacacatatacaaataataagtaacatttaggataaactgtattcgtatttattaagatattcatgttgttgccgttagtcatattgagtgttagttgttccatttagccgagctctcttggtagcaagggttcgataccattctcttccaatgtggttaaatgtgtaattgtataaagttaattcatttttgttacttctatttagaaaatagatatagaattgttattcataactcaccgtagacaaactaaaaatttagaaagccaaattggaatattcaaattttagcattttaatattcatttggttgaggaggaagagccaccaaccaaaccattgagtctgatcatcttgatattattgtaatttatgtttgtttaatatgatctttttaatttcatttaaattaatattattgtttattataattaatgaaaatctaagaaacaaaaaaactttgtcttcttcgtttattcatcgttcgactatgaaaacaaaacatatccaaaaaatcaattgcgagattgattgaaaaaacaaaaatcaacaaaaatatatataaataaattatatcatatgaatttatattcaacaaaattaattacttcgtcattttttatagtggtgcaaacaaaaaaactagtttggaggtttaaagaattagtaaaattactttgatggtttataaatgttagtaaaagaaattcgaggtgtaccaatgacactttgaaggttaaaaatgtgatttcttctttttaaaatctcttaaagaactatgatcttaaaaaaaaaacttatggttgtatgaatgtatttcttattttacaatgatttttaacataatacatatatttatttgtggttactaaagtacaaattttgttttgttatgacatcatacatcataataatgtgcaagttaaatatgaaaaaaaaaaaagagttatacatgactaaatgtctcatctttttgttatttttcatagtttgttgattcttttgttaatatctaaactttacgtagcaaataaaaaaccacaaaattcttttgacaaagttcagtagattgaaaggcaaatacatagaagatacatgaaatgacaaaagtatccatcatcctttcacttttgaccgacgacctgcattaaacggcttcactttgaaaatttttagccgcttattcgccaactaaaagacttgtccgtactgtcaacaacacatgtaggaagtaggatctttcatgtgaaacacccacgtgtatactacttgcatgcacgtgtgcttctaaacccgtcagacatcagtaaaaatttatactaaatgggccgtatcaatcttcatttgttaactttggcccaaaacggctcaacaaatagtaaatacgtcatcatctagtgatgccatcttcaattctcaagaaaccaacgcttatagttacttattttcattgttgtttcttatgcattatggtgatgtatgttttcagaaattctagctacaaaactgcgaatagcgaattgttgtttttttggggtcagtttaagttgatccaacttaagcttatcatcattttgagattctgagtgctattttatttcaaacattatggaacttcatatgatacttagttaatgtttacatgcttgattgaagatttaggatctaatacgtcaacgatgatttgacttttcaaaaattttgagactttgagattttctactgtaagactctgtttgtttagtcgtctcatatgtgtctagtaatgaatattggaaaatatcaaatgttggattttcaatggactcatcacaatcagaaatgatgatgaaaactttggtgtgaaacctctgacttgttacatgaactaatgaacaaatttgtaaaattgttatattagagtatcctaaaaaatatcgttctgaagcgactaagagcatgattataggtgatactcataaagtatcactaaaaaatgtttagtattatttataatgtttgtttaatagatatatatatatattttttttgtttttggtaaatctgagcaatcagaagatggcacgtcagatgatactagtatcacaaatatcactggactgatactcatcaacctcattccaattgttttgtcaatataaaaataatttttgcacttgtgatacttaaaaaatatcacctatgtacatggtctaataatcttaattaggtcttaatgatacactggtaaactccatttgcatatgtttgccttaggggaacgattgactcttcaacatttatgatttatgtctttagaattcataatttctgttttctttttgttctatttttttcttgaaagtattaatgtgagtttcacacaagatctctgagatgacagaacaaaagtttatgagtggtttggttttggtacattcactcaagttcaaccaaaacaatctaattttattttctttatatcttttttctgttgaatctcttcaatgctatttggtcctgtgtgataacaagactcttcatggaaggtatatttatttaatgttatgacatgacatagcaatggcaagaagtagataaagtgatatgtgtacgtaatgttatgtgtatatcccaacctgttttgcttttcaccacaactgaattgaacacaagtacttggaccaacccaagtgttggtctctctgcatttcctctcaaatcaaacctcccaaaaatagaacaaaatttattagaacattttttaaaaataaaacttaaaactttggaggagtagctaacaaactctctagttgtccaacactattggtcatccaactaactcaatcgttgtctcttcaattcaaacttcaaaggacaaatttccacatacctgtactaagtactaaacaatcatgtatgtgatgttttagaccaatgccaatagtgtaatggtaatgtttgtgtataatctttgactgttatctttctacttgcaaaatgcagaggttgtgagacgaaattagatcatcatcaagccatgaaaaaggtaagatccagcggaaacttttaatgtaaaagaactttgtttttagaatatcaaataacgaaacgtacaccatttgcaaccgtccataaacacaagaaccgagaaccatatagccgataatatgtaaaacatggaaacagattttaggtaactaaaccgacacattttgatgggttgttgacattattagcgaggactactactaagcacatcgaaaaacattcggtttattgaagatagcctcatctgctgctcttgcactcttctcctcttgagcaaaggctctgaagatggtgaagacgacactgaagcagaagcagacacaacccacgactcattcgagctatcagaactgaatgacgcatcaaacacaccgatcggactagcgggttgttgcatccaattcatcatccttttcttgcttggactgtggtctaacactaactcatagcatttatttaccttctcctgtttcaagtataatgatgataaaatcagttctagatccttaaaccttacactaatcacattggcatttattgatcaaagacaccgtaaccacataccgaatcaactttgagtagagtcatgagctgagattggtatacagcttcgtcacacatcttcaaatctctaataacagagaccattattgcagtggctaacacagaaggactaaaactcagaaatctcgaatctgaaaagaaaccaagaacagaaaatttagcatccacaacaaaatcaagtagattcaagagatctaaacctaatggtaaacattaccaggaataatggagagtaataaagattcacatctactcaagaactccaattgatgatgagatttaaagctgtatcgtcgaataatgtgatcgaaaaacgagattggagtcacaggatgcatcctccagtcaagagtagacagaacaagaagctccattctctgtatagtcttagcttcaaagacatatcttgcttcttccaccttacaaaaagaccaaacacaagtctcaaaaatctgcaatttcacaaaattgaatctgagaaaaagtgagaaacttacttgaaaatctaagagaaaaggaacacggatctcttcaaccttagcagctaaagacagacaagccaaagcagtaagctgagacatccatggcttatctgtctgaaacttcctgcttgtaataaacctatcgaagtaattaacagctaaaagagccgtcaatgaattaaacccataatgagatttcactttaaaaatccaatcaagagccttttcacgacacaaaaccagaaactcatcatctaagatttcgtcataaagacacggttcttgtttcgaaatcaaagttgataactcatcatcatcccacaacatatcatgatcagacaaacccagatttaaaaaaggaaacttttcaacactctcgtcgcacaaatctacttgttcgtgaaactcactctcttcctcacagaaaagaccatcaagaacacaaaacggtgcgttttgactctcttcctcctcttctaaagccatgatttttctcttccgagaagaagatgattgctaattcctttgttcattctgccattagagactctctggattcttcactctgtgtgagatagaaagagagataaaagaagtgaagacaaatgccaaagaaagtgaagggttttatttcacgcttgtcctcttttttttttctttttttttattaaaagattttatgttttttttttaattttatttttattttctctctctgcttttattttgtcttttaatattcggatgtttggcgcgcgagaaaattaatgaaaccgtacttcttctttgttttattcacagaaatggaaaaatcttttcttttgtaattaatttcctatctccataaattaattataaattgaaatcataactatgaattaattaaaatctttagttttaaaaacatacgtactatttacaaaaaagcttatactcacgtgcttattgaatgtgtagttacacgcttttgatccctgttcgttggatgcgagtaaagatactctctgttagagcgtgtgattcacgcgcttatgaggtggtggtggaagtttcagtggtggataaatgcgttgaccattaattatatttgtcacctttcggtttcaagcatcgatgattacaagtgaaaagatttttttttttttttttttttcgtcattagtactttgattttggttaatacaacataattttacataaactctgaaaatatcgtaatgtgtagagtcactgtcattgtgtttttattcgatttaaagatttattaatcgtaatttattagtagcaaatttttcacttttttttttggtgaattaatttatgatatacggaaaaagaagattcaaattgatatatataatcatataaaatcacccgtggggtcatatatgtcagaggaaaatccacgtggacgaatgggaagctttatatggtcaacgagctgacataaacattagaaaaaacaaaaacataattaactaggaaaaaaggacctcgttctgttaaaacgcttgcgctttattagtaaactacgttacttaatttttctttatgtaacctataaagttaatttttaaatataatagcttgatcttgatgagcatttcaagtttaattctcactgctttatatgctaaaaaatctaaagactgaggacccaaaaaagccgattaaaatgtaaatgtattcgatgtactcgtaacaaaagttgtaccaaactttaacgttcaagatacataaatgcaacttatacatataactgagtctatttataatagttgtggaacaaacattatagttagtagtacaaaacataatgtataataaattaagcttctgtttaaatatttagtactcaatagtaaactgaaagataatttcatattttacatctatagtagtaaaagtgttattataagcagagtgaatgatcctgttgtcacgtttactgcgttcctatcgacctagacgcggttaacaaagcaacaattgttacttttttttaacacatagtatatatattgatgatctttatcgattgtgaaagaaagcaatgtgtggtaaaaaaaaattgaaaaaatgaaaaagcaaaagacaaataaataaggaatggggaaaagttaatcacgagaggaagaggccattggtaacaagcgggagagtctgagatttgtacaaagtttaatagcgacttctcatttcttacacatttcatactatcttttaaaaagataaaaaagaaaaacaaagaaattccttatcatatcgctttaaaatgttgtctgttcatagtctttttaaaaaatattccatttgttctattatgttttttttgttgatgtgtaatggccaaataggtctacaatatgttccattagattggtaattttgcgattttatacattgttacgataccatttttcagtttttaccattaatacaatagtaatataaaattatataaaaacttcttatattaaacatgtatatatatatatattatagaacttaaactttcaattgttttactcttaaattttggaacaagtttttatataacaaaaagagagtaaaaggaaaggagtataattagagataatgaaataaaggttgtaatctagaggagacaagagttatttataataatggtccaagaatccggacggtaaccttttatttaatgggtcaagaagctagaagataagaagtgagagggtattgttgtttaaatgacaaataataaaaaccaagatgaagttgattagattaataagaggatgtgtgtgtaagtgttgtgttgtgaattgattagatcgaagaaggtttttgggtcataattaataatggcgtcttgtctgccagagaccaacgccgtacgctaactttcgatctcctactctaacctcttgtttctttaattctaccactaatactataagatataagtgtacacataatatttcatttataataaacttatttgatgttaggtgtcacccatttgctgttaaatgtattgcctagctttgctcctattccccttatagtgttttgtgcattttcctttttttaaaatacataagaagtcccatgagtttttggtctacctgttcataacatgtaagactatatggagtggcacctaatatagtccatacagtgaataacttagttcatactgggtcaaaggacataacatggtaacttagtcttgttcatacggtcttacttcatactttcataggttcatatatagttgaaagttcatactcctgtacaataaaagtaaaactaagagcatctttattgggagtatctcaatgagatacccaacaaaaaaaaaaaattagaaaaaaaaaaagtaagagagaagaaagaaaaagtaaaagagaaggagaattgagttcctcgtaggaaaaactttgaaaaactattctcatctaaattggacagctgtcatcgtattattagttcaagtattaaataacaattaatatatctgttttgactaaaatttttttttttttttttttagaaacttttcttacttttatagatgctctaatacattcacttcttgttcattaagtgatttttgtttggtgcaagtcaatatagtatgttttcatgaaattgtgttagcatattgtttatttatatatatggtttagaaatcgaattagatcggttaaatatgatttgaaaaaaaaaaaatcggtttagtctaaatggaaaagttgatttatttggtgtagtgtctttttttttgtgtgtaaccaattggaatataataatagtaggtagtagtaaatagtaacttactatcttgtgaaatggtaaaattgcacatgaattccgtaatagattaaataccaatcatgtcaatttgcaattgtgttagaaaactgcttaccactcacatgttcacaatttctttacataaaataaaagatagagtaatgtttatacattccaaaatgtgtaagataatatttttgcattttacattttcagaacacaacataatttgcattatctaattaattttgcattttacatgtaaagataacaaacaataaaacaaatttgcgtttcgtaattttgttcactaaaatattatatttttgatcaaatgtatagtggcgagtatttttcagtctctttgatgaattcatatttctagaaaaatggtttagtgatgctggttcaatttggatagttagcaactaagcatgatgataaaatgttaggtaagaggtaacattatatacctttactccaatccaaataaatttgttagagatattcataattttccatcattttggtacgttctcattattacacaatctaacatcattaccaccaacctaattactggcaccagttcataataatgcatacagtattaagacaccaatatacaaatgactacgtgtgtcagaattcctttgaatctctacttagttttttgagtcaaccccaacaagttagccgtttatagcactcatcactgttcttgctataattttcggttggaaaagaagagacaagcaaaagaacatataaatataagtatatcccttatatttgtaatgattttaatttgttaacgaaattttgcagttctatagtcatttaactggagtatctacaaaaataagaatacaaaacacatttgtagagaattgaaacatgcgtttttttattttaccacaaattaaacatttatttacattttcagaaaatagaattaaatggtaaaagtgaaaacaggctgttgatggggccatggctttatttttaaatgttgatattctatacaaaattacatatgacaataaaagaattgatcaaattgtaactccacgacagaggcacagctgaagcctgaagcatgggtgaatttctaaagcaaccaaaaattaaattcaaattgaaactgtagttacttacagctgcctggcatttgttttctcaaaaaagtactaacattttacaacaaatagaaaatagagatttgttccaaaaaaaaaaaaagacttgttccaaaaaattaaaaatttaaaacattttctgttataattaaaattttaatggtcaatatttttttggtaaacttttttttcttccataacttgtttttatcgaatctttgaattctaaaattttgtatgcaaaagaaatatattttggtgacatgtgctggtttgctttcagagttttcgaaaggcgatatagttctaaacatcagggtgaccagtgtaaccaggcagagtatcgaacttccgatagagtgtaacttggtcactaactccaaccatttttcaaccgtatcgaaacagtttcttgacaaaatgaggccatgtgatttgtaaaagcgtaacctatgtctatccactccaaaatactcatccattttaacgtcaatgttctgtttttaacttaatgatagtggagtctttgttgtaaaaaaaggtcaatgttcataaatggatataaatgtaatcgttttcaaaacatggtcaattttttttttaaatacttttcaccgttagtctcaattttattaaaaaaaacacgtaaaaccagaaacaatcggattaaaaagttcttcaataactttaaagaacatcaaatatttgaaaaccaagtcgaaattttttaccctctttcaagtcaaatactctagcagaggaggagtcttgcaaaaaaaaaaacccatagctattcatatatccacatttgatttgatctccactaacattgtagagtagatctctctttctttcttctagattcgtatatcattttattttattttggtagttgaaatgtatattatgtgagatctagctatttgaaaaaaaaaaatctttcaaaaatcatgttactgtattatctaaagttatcaactatgctttttaatagtattaatagtattagttttactttggatggctcaagaatctaagcgagatgtggagagatggattcaactttcaagttcaaccatatagtgcagtgtattccagcaaaacccacccaatttcccaaaagtgttcacaaatgttcttaccacaaatactactccatatttttctctttgcttccccatttatgaaactcactttatagttatcccataataaattagtcatgtgttgctcttagtgttctcaataatgtagtacttgcatccgaaaccaaaactattggaagtttagaagtagaacatagaacttagaagaagccaaaaaaaccaatggttttgtcaattatcaaattaatatcattattgggcctttatggcccattagtgaatattccggtacattaatactgagcactacaatggaagaaaatgaccatggctatgttgaaggtcaaactcaaggaaagcaacgaattagtggaataaagcccattgggccaaacgtatgagaaaaaatggtggcctcgaaggtgagagttgttgactacagtccgcagaaaaaacattaaaaacgaaagatactgaaaaaaaaaaaaaaactcacgagtcgtgtgtgactcggtgactcgcgactcaaccgaaccttacccaatactcaaccacacaacaatgggccaagctccgtcgtctccggcggaaccaaacgtacgcgatacttctttatgtctatggtcaccggaatttctcgattgcgaatcgattggtttcgaagacggagattacgatttcacggcaaatctaccagacgattgcctcgctcatatctttcaatttctcagtgccggagatcggaaacgatgctctcttgtatccaaacggtggctattagtcgacggacagaatcgtcaccgtttatcacttgacgctaaatctgagattctccctttcttaccatgtatcttcaatcgattcgattccgtaacaaagctcgctcttcgttgtgatcggagatcttttagcttaagcgatgaagctttattcatagtctcgattcgttgctcgaatctgattcgagtcaagcttcgtggttgtcgagagataacagatctaggtatggaatcgttcgctagaaactgtaagagcttgaggaaattatcatgtggctcttgtactttcggtgcgaagggaataaacgcgatgcttgagcattgtaaggttcttgaggagttatctctgaagagaatcagaggacttcatgaattggctgagccaataaagctgagtttgtctgcttcacttagatctgtgtttttgaaggagcttgttaatggtcaggtgtttggatctttggttgctactagaactttgaagaaagttaaaatcattcgttgtttaggtaattgggatagagtttttgaaatgaatggaaatgggaatagttctttaactgagattcgtctagagaggcttcaagtgactgatattggactgtttggtatatctaaatgttcgaatttagagactttgcatatagtgaaaactcctgattgctcgaatttaggtttagctagtgttgttgagagatgtaagttactgagaaagcttcatattgatggttggagggttaagaggattggtgatcaaggtttgatgtctgtagctaagcactgtttgaatttgcaagagcttgtacttatcggtgttgatgcgacgtatatgagcttgtctgctattgcttcaaactgtaagaagcttgaacggttagctctttgtgggagtggtacgattggggatgcggagattggttgtatcgcggagaaatgtgtgacgttgaggaaattctgtatcaagggatgtttgatttcagatgtaggggtccaggcgttggctttaggctgtcctaagttggtgaaactgaaggtgaagaaatgtagtttggttacaggtgaagttagggaatggttgcgtgaacggaggatgacattggtggtgagtatggatgatgatgaaaccaatggtgtgggtttggtggatggtggtgatcagagagttcttgagacggttgttgaggaggaggctccgccagtgattgatggtgatggtggtttgggagttgcaggtggtggtaggctagggttagctatcttgaagacaaagttagggttacttgcaggaaggaacttggtggcttgcacgttgagaagatggtctcaaagtgaagctactagttccatttgattgcacttttttttttaaacaagggtctttgactcgttgtgcattcagaacaaaacccacttctgtattattatttcttgtttgtttattttatcttcacaattcattttcaaaatatttcatggcataagattattactattactaacttttattttattaatatttcatgtaatcataaaatagttgatctttaaatttgtatagtgaaatggaaaaacttagtaagtagtaataatagttgatctctaattctttttcttataacaataaattcttagaattaagctttaaaaaccaagaccttgatcattcaatttcaagttaaggaacgcacactactcaaaatattgaaaagtgttatttttatttttccacaatactgctaattatgtagtacattttgttatcgtgaaactaaaaagcaatatatatatataaatgtttaaattctgatatttattatgtctaggtaatacaaaccaaaatggttgaccgaccaaaatacaagttcgttttgtttttctaaaattttttttattttattttttggaaatcgcagcataattgacaattgatgttcatacttttagaaaaagaagacttgatatatttgtttactaaaagatctccaaaatattctctgataacaaaattatatatgctgataacttgttactttcttataaaatgtcacattactatcatttttacatagtataagaaaacatatgtgatttgttactgctgcgtctgtatcaaccttatttttagaaaacaaatagtatatgatttacgatatttatctcttctttttttggttaaaggatgtttcttatcaaaccgtgctgtttcccaattttcattgaaaatcaaaattcacacatttacattcttaaattaatttacatacacttcagtgaggtcaacaatgaacaattaagtggagtattcaaacagtttcgaagccaccaaactctatatatatcaacatcatcacgtaaagttcctatagaatcttaaaacacatacacttgaaaaagccaactcaaaaaaaaaaaaattgattggtcccatggattatttgcaagtaagtgaagatatgttacacaatgtcacttataactttattgtagtgattaatgagttttggttatttttatttttttgtttttttatgctaaggctatgcgtctccgcgaagccaatcgtctcatgattgcaaagttcaagaaagaatctccggctaatgactctcctgaacaggtgtgttggaaatctatcaaaacatgtttttgaggaatatgtttgtataatttgtaccgtaatatgtttgaaaatgttgttggttgtacagaggctagttcgattgaccaatgagaatccgcaatacaatgtcgactttttgtttcattcatactccaaggtttcttaaacaatagtcttttgatgtttaatagtatatccaagttttgtatatttcatgcgcttttttttaagacttcttaaattgctaaacaggactggtttgtatccgatgttggaatgaaaatgtcaaatgtgatgattccaaaccaaatgctagctcttgactgtgaaatggttctatgtgaagatgggacagagggtgtggttagagttggcgctgttgaccgcaatttaaaggtattgcgtatagatactttgagattttgaatcttgatttctttattggtgtcttttattggatccttgatgactcgggtgatcaaatttttatgtctttaggtgatccttgacgaatttgtgaaaccacacaaacctgtggtcgactataggacagctattactggagttactgctgaagatgtccaaaaagccactctctctctggtggatattcaggtaaatctatatatagaatcttcttctttattttattatttcaagagacaacacttcaagatgttatgtttattgtgcaggaaaaattgaggccgtttctttctgctggtgcaattttggtaggtcacagtttgaaccatgacttggataggtaaataaaacttttctagtagagtccttgttaattttaatttggaattttgtctaaaatcatgagtattttgttaccagtgttgaagatagatcatcccatagtgattgatacttcactagtatttaagtatcctaattcacgaaagctaagaagaccttctcttaataccctttgcatggtaagtctatatctactcttgaggtattcacataaaaatgttaacattcttaatatatactttctaaaaataaataaatttccagtctgtgttgggatacgaagtccaaaaggccggtgtttctcatcactgcgtacacgatgcagccgctgcgatgaaacttgcacttgctgttataaagaaaagagttgacacaacaatcacattaactaaagaggtgacaacaaatatttacctagctaacttgtttatgataaattacaattacaatgtttacaagttttttgaatagatggtggaggccgagaaatcaagactctttctacatcgaatccctcaccatctgtcatctgaagagctgaagaaagatcttgctctaaagttttttcccaaaaactttacaattgatgttaaggttgagtttaaaccatatatctatttcttttctctaaatcttaactttttttttttgatatacggtttttttttttttggcagccagcaaaaacacagggaggttattattgtgcagttgttatctttggaagctcagtagaagcaaatcaagcatttgagaacgttaatggatacaaagagacggtattatagaatcttttgatttgttttgaaatggtccaataataattaaaagtgatgaaataacttttttttttttttttttttttgtgtttggttttcaggattcatcggggctgccacagaaactcatttcttgttcaatatctacattttatgtccgttaaatggcttaagatgggtgggtttggttgaaggcttgaaatcttcttttaaatttgctttttaataatgttggcatttctgaatctgtttaaacattgattaataaatctaagctaagtttttttttttctatccttaatttttggtattttgtttgacatttgtttttgatacaaatcattggcaaaatatacacaattacagtattagaacacaaatcgaataaaaaaaatctttgtgaacatcatcatttaaatgtaattgaaacagagtcaataaaggttctctcaatagaggtagcaaacagagtcaactatgctataagaagttgttgcgttatgttttgcttttctgcaggattcatttgggctgtcacagaaacacattgtcttttggcgtctaagttatgaagtttatttttaagtccataaaatggtttacgatgatgatgtaacctcttttttttccatggatctatattttcaaattctatgtttgtaacctaaactgttttaattatctataaaatatttacaatttagcgaaagaaaaaaatgacgatggaacctcagatcaggtttaatacaacaatatgactaaaattaaatttctatttccactacatttttattcgctccaatccatctccctttctaacttagagatcttaatattttttcttcatatttggagatttcttttttcaaatttacactaaaatttgaaatctccagtttgttgggaaaaaactcaactccataactccatattgaaaataaaaaatgtttatgaagaaatgggagagatgttctaagcaaattttaaataattcctcttaaaataatggtaaagatgttactacattgaagtcaaagatgtcacaatttaagcatacaatatagttaaaattatatataaaaaaacccctaagaataaaatataatccagttaattatatattttgagaatataaccctaaactctgtttcttcttccccaaacagtttatgccaaattcactcccagctaataaaataaaatagaaaaactcgttgagccgccattgtttccgtactatggagcttaaactagccaccgccgagaaacaagttcgtctctttctttctttctttctttctttaatttctcagggcaaaattcccacttttgtggagtcgaattagcttctctgtaactaaccattccgttaaaataggtgcttgacgagttggtgaagctattgcagagtcgagatttgcgtggcgaaaatggaaactggaaggaatttttacatgtttacgacaaaaatgctgattcaccaagtgatccttcgaggcgttctcatgaagatttggttcagtttctgacaacttttaagaagaaagaagatttgcaagtaagtgaaactgaagaaatacacaatgtgattgtaatctttggccactaaagttttgttcttttttgctgctaagcttctgaaatgtcacgccaatcatcttctgattgaaaatttgaagcaagaatcccaagatgaagacactcctgagcaggtgggagatgcttttgttatatctcgttctttgataggaatatgtttgcagtgaggtttaagatgttgttgtttggcaatacagatgctagttagattgacagttgagcatccgagttactcgttagactattctttcaagccatactcagaggttttgtttccttctcctaaacaatgagttcttgttacgtgttttatgcggttgtttaagagttgttgaattgcttaagcaggactggtttgtatccgatgttggaatgaagatgaaaaaggtgatggaatcaactaacatggtagctgttgattgtgagatggttctttgtgaagatgggactgagggtttagttagagttggtgttgtagaccgtgatttaaaggtatagcttagagagaatctttatgctttagtgattcgtcttttcgcaatggacctgctttcttgacgagggttatcaaatgttgaatggctttaggtgattcttgacgagtttgtgaaaccgaacaaacctgttgttgactataggacagacattacagggattactgctgaagatatcgaaaatgctagtctctctgtggtagatatacaggtaccatgtagagtctttctattggttttatcttcacagcagaaacgtatagttgttatgttgttaactttgtgaaaaatgtgcaggaaactttgcagccctttctttctacgggtacgattttggttggtcacagtttaaacagagatttggaaggtaagcataaagtttccagtagaggattttgtaattgtaagtttttcgctaacaagtttatggttattttcatattttgatgccagtgttaaagatagatcatcctaaagtaatcgataccgcacttgtattcaagtatccgaatacacgaaagctcagaagaccttcacttaacaacctttgcaaggtaagtctattacgtgtttctctactcttgagatgaacatcacaaaaagataacattttcaatactttttttcatttgttgaaatggttttcccagtctattttgggttacgaagtccgaaagaccggtgttcctcatgattgtgtacatgacgcatcagctgcgatgaaacttgcacttgctgttgtagagaaaagagttgacacaacaatcaaaccatctaaagaggtttgaaattaccaaacatgcagttttatcataaattccaacaataacaaatgtctgcatttttaccatagatgttggaggttgagaaagcaaaactctttctacataaaatccctaacaatgtgccatctgaagagcttgagcaagttctttctggaaagtttacacttgatgtgaaggttgagaaatcaaaaccatgtactttctctaagtctctcgaacatagaacctttctctgacctcagctatttttcttttggcagcaagcaaaaacacagggacgttactattgtgcatttgctcttttccatagttcagaagacgcagatcaagcatttgaacacattgatggaatcgaaatgacggtataattttagtatctctgcttttggatccgcaactatcttgatcgatagtgaaataagtttgtgtgttatgtttttttttttaggattcattgggtttgccacaaaaagtggtcatcattaagctgagttcaggatcaagagctagtatatatgtccgtaaaatggttcaagatgaatgatgcaacctaggattagattaactattcaatgaattgttttttcagatatttgaacaatcaatggcaaaattcaatgactagtttttttttttataatttgcaattgtttcttttataatgggaaacagagacaatatacttgtgtgtgtatgataagtgtgataaaatctgagtcttcatgatcagtcgctttcatagtcttcttcctcatctccaaaggagaagaccgatgcatctgcagcaatagctttgatatcactaactgctaatgagttgtttggtattggattataatgacccgaggacgatgaacttgtgacacttctgtttgcggaagggtcatctctctttggtggctcattgatctgatgaggtttactagttgtgtgcattgagcttgcggttttctcgttagttgaataagactgagagtttccttcctcttccccatcactgtcagagaatacatcgtcgtctttctcattagacttaagtttgctggaatcagcactggagctgctttgagattgttgttgggtggaatcagatttggactttgttggttgtgaattgtcgggttctatcattacgatctcgacatggaaacccggtgcaggcagttttctctgcaaaaaccgccagggatgaagcaaccaggtttgtttcttagatcttataaggctatgaaaatttcttttaccttgtcaaagccatcaaagtcactgcctttcagcattgttctgttatcagtcagtgtagtatttagccaactgcgtgcagaaaacagtaaaagttagtgaatttgtcgatttggaagatgtctgtgaaggaagaagagagtttaccagtagaaatctccatcgctatcttgaaagtggattttgaagtcgccggctaattctgttagaccagcttcaccaggtattgcaaagacaaccactccctttttgggtgcctttatccaaaaatcttcaggctataacccacaaacacaagtttatacgtcaagacgagttgcggttataacaccagatgaaagagagagagagagagaagaaccaaggagaacaatgcctacccccaaatccttggttttctgatgtttctttgttgagaaaagtatatctgttcaatagaagaaaatgagcatttttcaaacgtatgcgaatattcaaaagatgagaagaaactagctttgtaccagtgtggttggagatcgtaatggcaggtctaatccagtaagggcagttgattaggcgaaatcctctgagcatgcatctacataaatgtttattctctggttagggatatatgaatatcaaccacaaatcgtactacctgattggtcagatatgtctaaagcataccttcgctcgggtggaactttcccgtcaaattggttttgaacacgttcgtagtacttgacatatcgctgaaggaaacaggaaagcttgtttaataggatgagggagaatcgaataagcacattaaaagattggtgtgagctcagaacttacaatctgacttgggagaacaagagctttcccatcaagacatctcttttggttatagtaatcaatagcctcttcagctgtaggaaagaactgcaatggagttaccagtaagatctgtcacaagagtcttacagaggaggaatgcgtgcatcagccaagactttgtttcatttaagaagtgtcaccttgagatatagaagaagacagcaaatcattaatccggttcttgccattccagctttacaatgaactaccactacattttggatatcttccttcagccatgtgtatgcactttgacaaaacgatggtatcaattggataggaggacaattatgatcatcaaatgggaaagatgcaacctgaagaaaaggaaatcagacaagcgatgaagcaaacactgtaagaggtctataaacactagctttaaaaacaatgacaaccacagaaactgcctgcaagatatatggtctgagatatcaagtgctagagtttgtatataccttcccctcaaatcttgaagcatcgtacaatctctctgaacaaaggttgtagaccttatatttatcctgcatatcgggggcaaggtttagagttctggtatgtaccaatatgatcaaacataaaccaagtaaccactacatgtctgggctgcagtgtcttatcaaatccaactggtgtgaatcttatgagaattagtgagttgtcaaaaactctttaagaggcttccagtcagtgccaatggttaccttatgatgagtttcaaaaaactttatcacctcttccatgtgattacgatatagtccctgaatatgacatttgtcaatgagaaactcaagactaagagaagaaaagaactggctggggaacttatatttcaaaccagaccaagctatttacctcgaaaaatccgaaaagaccagagcttatgtcaccagctgggaaccccattgcgattatattctcagttatatatgtcatgtccaaatcgaattccccctcctgaagattgcaccaggtgccatgtaaagcagagatgtaagtggtactgatcagggcatacatatatactataatctaatcgatgcattacactagacagcagggaaagctcataaaaataaacaactgctagttttggcccattcactacaatagggtagtgtgctgcaacaagctgttgtgactataaggtgcctcagtttcaaagaatctaacaaaagcagaaagacagcattaccatacctggtatcttcttttgttctgagagacaatgtggcgtgctttcacctgcattgctttaacggcaccacgagatgaatcaaccacagcttttgtgagggactcaaaagcaccaccaacttgtgtgtttgatgatctagaatcaccaacctcctcagaccctttcgttggcaaatgcagaccaagttcagaggtgaatcttgtgaaagctgacatcccagaatctgtacgatttggatcttgctgctggaatttaaaacttttggcccaagaagaaagaccagaagaagaaaatatagacggcggtgattcgcgtggggaggaacctggtgggcatggaactatatcatctgttttacttaaaggttcagagccggtagaactagcaggcatttgagtatcatcaacctttgcaacagaagcttctgtactaatagagtcttcatgagcttctctttcagcgctcacaggatcttgtacaacgcccacagtattttcagaaggttcaggaatcaatacatctttctcagatactacagctggagacttcgatgaagagttagcaggatcagtttccattttagcaatccaacgctagctcagacaacgatgagccttactttacgagaaaacgaaaacctaaaaaaaaaaaaagtcaatttcacgtttgagtattgagtccagtttctcatttaatcaaacacttagcagaatatacagaaacgactccaaattcccacattatacataagcaatatccagctaaaggttttggctaaattcgcttctataatcatctgaaaatagcactgaatacgcaaaattgcttcggaggataaggaatctaagaccgtactagtgcacattgctataatccaaaggtcgcattcatttccacatctctctcaacgccaaattcaatggaactagatctctcaaatcagaaaatcaagtgcatcatctagcagaggcagatcaaaaatgaaacaaggcttccaaattcgacaaagcatcggccgcgaaagaaaaagaaaaaaaacgagagagtagacattgattaccggagaatgcaggacgataagcttcgagtttttttccgtagcgaaaagagattcaatggaggaggaagaagattggagctgattctgattcagagcagcagcgtacgaaatttccgatgaacgtgcggagattaacgatcaattcccgttttatcatcccccgctcttgccggtcagaattttgtgtttcgttcattgggcctatatggtcacattatgttgaatcctagttggtctgggccttatagatatcgaaaaggcccagttttggtaatccagtgggcgtaagtgcgtgacgtgtcaatgtaatcacaaacgatctacatatcctactatataatttgggaaatacattttaaatgtaatcttaatttttgtaagtaattacatagggatgccattagaaataaaattttaaagagtaaattaatttatgtatttaaggattaaaaagtcaaatactaatttaattaattaaattaattaaaaaacgaaatacattattaattttcaaaaataatagccaatcaaaatcaacatataagatttgatatctaaattttaattaatttaatttaatttcaatatggattaaatctttaatttattattttaataaaatttacaagttttaatatatattacttttaaaaataaatcgtcccgcggtataccacaagttaaaatctagtacatatgtataatataacacacaaaaaaatgctttgaaaaacaagttataaggttaagaaggtggcttataataagcgtaaacagcgtaaaaactttgagagaaagtgaggactagtagaataaccgcagcacagaaagaaacaattgcccatggattattgaagtacttatgtttcaacgtagccctccaagcattccacttatgatcgtagtaacgattaacctcaatcgataacctagataaatagctatcttcggtgtcgaatacaacttcttgacataaacggttgaacaaatccgcgacttcagaatcgctccctagccaatgttcgatgataccacagtagtgtaagtagctaacatcttcgtgagaatctattagattgtccatgaagattatgtaggatgttatatcattgctcgaatcgatatgacactgctcaaaagctataagattcagaaaaagagatttggtacctacaaaaaaacatacgaggatggctttacttattataaacatttagttgttttgttgagaaaatgtatttgtttcattatctaaactttttgccaatctgaaaacacatactcttttccattgcttagatcattctgaattagtcaattgatgacatttcttatattccaaagtagcatttttatgcaacataccacatcaatacatcatgattcctactaatatattctttgtcaatccatataaaccaatacaaacgagaaaatatcaatttatatggatttgatgaattaaaaaggtgatggataagaaaaaaaaactgtaacattttactcaaacaaaagaaaaataaattgtaaacatatggggcatgtgttaaaaagaagaaaaatgtgaaaaacgtgaacgtaccgtcatggataagtagcctcggtatttctagataaccgtttttgaattgcatatcccaaaaccggtcggttttccttcttctgaattttataccagcctcttttagttccgtcacacaatgtatcaattgttgccggcgcttgtccgccacacgcgtgtttcgagaccatctctttcttgttaacctcggctccggtttaggactagaccgtaacaaactacgacggaaaacatctagacaatgcagttcacccatatcagcgaatgggtcaaaggatttatctcttgccagtgagttctcgagttttgactggccagatttagtcaacggctcgtccgttggcattagtggatcaaagaaccgaattgctaattgtgccaccaaaccggtttggttccgtgtaccaagctgtaactctaataaccggtttagaacaaataaaggaagttgattttcaagcattaccatgtcacgttgaatcgaatgcatcgatcctctcatcgcgaaaactggatcgttacgtgcatatctacacaaaacattattgtgaccggtttaacaattatttgagagaaccggaaataaccagatattgaaaaaatcaggcttacccgagttcagtgaatccttcaacggctcctctaaagagctcaagcacaaaacaaccatcaagaactagcatttcgataaattcgttactactcaaacttaagggaccttcgtaacaagctcgagccttttcctctagctctctcatggcgtcgatatacattttaatgccttggttcgtacgtttcaagactctattgacagcacgccatttgtgacggtccatagaccggagccgtttcttaccatgatggtacggaccaagcgagactgtctgagggaaatacgatttgttgtcgttttcttgaaggtaatatggaactctgtagatacagagcttaccccagagtgttgtgtcatcatctctatgtgcttgttcgagcttgtctgtgatcgagatcacccaatcgtctcgtgaatcttttggactctctttgattacgtagatagcgggatcggattgagtttgctggttgttatgaatgttttgatcttgatcggatctggtgatttcgggtaaaccggggaggttttgatcttgattaaccaatacggattcttggttttgtgtttcgagtttttcgcggatcttaagggtgagtaagtaccagctcaacatgtctttgtagaagacagccaccattttttttgttgcttgaagcttttttaagaaaatgagggagtgagagagaaggaagtatatgtgaatgatttgaagatataattggttacttattgtacttatggacccaactgatctgtaatgacaacaaccataattagatatttataaacacacacacacacatattaatatctttgaagaaaaaagtaacaactaaaagtttatatatcttacctaattattttaactactaaaatatacaaattaatttggaatcgtgcggcttaaaagggtaacatagaatagaaaatatgcatttgtgttctataatttaccatatatccgaccattatccatagataatagaattttgatataccctttcgttttggtttgagtacgaatccttaacgcatcaaagaagggtaaggtcattgcgcaaccatactagaaacgctcgtatggggaatatgagagtcgttggacaagataagattatttgtcttgtcgaatttgggcaattttaaacgataaaagcacaaaataaaatctcttctttagtggtttttttcttctcccttttttcctttttgctctttgtgtcacatcttgaaattcacatttcatcgttgttattgatattctatggggtatttggtgcattatggtatttttcttatatctcgagcaacaattattaataagaaaaatagaaaataaaaatatagtgagagcataacggaacatgtacactacacagctagtgtgtggaacatggcacgacctcaccatttctcgtatggatgatgattgctcaacaaactttgaatctatattggttgacgggtcacagttttttttgtgcttattttcattagccaaactctagggtgtggccgaagactaatctatgatgtaaaagagaatagtagaaaaggttttcacattaattttatcaactgtaagaaaaaggtaaaaaaatgtttccttcttattccatggaaaacccaaaacacaaaagtgaaatgagaagaaactttttctttaggttagaaatgtggaaaatatttcctctagtgatcacttcccattttttactgttttattcctcttgtttttctttctttgattgcacccaatcaaacctttatatgattttatttaaattactgtagtacattcgacaaaagtgaaattgactatctagactctttagtcttaatacatcgagtgttatggagatttttcgtcatcttggaaagtgagtcaaactttggaatatccgtcaatagacaatggtcattctcattaatgttttggaacattgttgtagtcttaatttccgataacatattcaaatctgaacataccacatcattggctggagacgtactggtgaatcaaaagaaattttaaagaggtgtacaacttaatataactatttggtaaccatatagtgctaaactagtgtagaaatgcaattacaagtttaagcatcgatggtaaactagtttggttgtgacgacggcaaaaatgtctcttgggacgatatcgttttatcgacgtaatctatatttgttctgacctgtctcagtgtctcacctcctatgaagctaactgttaatatatatatggcatcgtcccccctagacctaccgagtcacagcgatactttcatgctaccacagacaccttgtcatgatcagattcaagacatgtgaacaatcaaaaataagattaaataaaaatgctggaaaattttaattttagtttctgattttatttttgcaatacaatagaaaataaaataaacaaaaatgctcgaaaaaaagttacaaacattccaagtttaatgaaggaaactactgaataataatgaaaatcaagaaggtgggttaaaataaggataagcagtaaagaaactctgaaataacgtgagaactagcaggacaagagcagcaaaaaaagagaagtatgcccaaggattattgaagtacttgtgttttaagatcgccttcagaacattccactttcggctataattccgatcaactttattcgacaattgtgacaaataactattttgggggtcgaaagccacttcttgacataaccggttgaacaaatccgcaacttcataatcattccctaaccaatgttcgatgataccacaataatgcaaatacctaacatcttccgacgaatctattagattatccataaagattatgtacgatgttatatcgttgctcgagtcaatatgacattgttcgaaggctataagattcgagaagagagatttggtacctgcaagaaacacgagaaaccatggtatatgtgtaagctcaaggagttaaacgattgtataaaaaagtgtattttttgtagctattgcttaaatcattctgaagtagtcaataacgaataattgatgacaattcatttacgttggcaacttgcggagaaattttggttttatgattataaaattcgaagaaaaaaaaaaatcatgttggtgtgtaaaacgtgattttcttaaaaccatgtatatgaagatggatatccattatgattcatgttctttatcattgggaataaagtttgaaatgttaccgtcatggattagtagttttggtatctcgagataaccgtttttgaatcgaatatcccaaaaccggtcggttttcctcgtcctgaatttaataccggcttctcttagttcggtcacgcaatgtatcagttgttgttggcgcttatccgccacgcgagttctccatgaccatctcattcgtgataaccttggctccggattcgaacaaggccgaagtagatttcgacggaaaacatctagacagtgcaactcacccttgtccttatcagcaattgggttaaagaatttatcttgttccagcgagtcgtcggttttggtcaacggctcgtcggttggcattagtggatcaaagaaccgaactgctaatcgcgacactaaaccggtttggtgccgtttaccaagctgtatctctaataaccggttgagaacaaacaaagggagttgattttctagcattaccatgtcacgttgaatcgaatgcattgatcctcgcattgcgaaaactggatcgttacgatcatatctacataaacaagaacaaaatcataagaaagtcaacggtttagattaattagcggatctgaaatgatacactaaaattatattagataacaagaaatttaatcatatttaccctagttcggagaatccttcatcagctcctctaaagagttcaagaacgaaacaaccatcaagaaccagcatttcactaaacttgttgctgctcaaatctataggaccttcatagcaagcacgagccctgtcttcgagttctttcatggcgtcaatatacatttcaatgtcgtgtttggtacgtgccatgaccatattgactgcacgccacttgtgacggtccatgggtaggagatgtttgttgccatggtggaacggaccaagtgagacagtctgagggaaataggacttcttgttgttctcttgaaggtattgtggaactctatagatacatagtttgtcccaactagttgtggcgtcttctctaagtgcttgctccattttgtctctaattgagatcacccattcttctcgtgtctcttcgggtttttggttttgtttttggagtttttggcgcatcatgagggtgagaaagtaccatgtgaacatgtctttctggatcgtagacggttgtggtcgattagttctttttcttttgacagaataccgccaaggaagaatcggtccaaatggtcgtgctggcggtagcggtggtggtggtggtggtagacttttgcttttctttttgaagaaatgccgccgaggaggaattgatctaaaagatggtggtggtggtggacgaggaattgatctaaacgatggtggtggtggtggaggaggcggtggtgtaaaagaaagaatacgcaccatttttgttggttaaagctttgagagagaaaaaatgttgtaaaactaagatgtaacaaaatgatagatctgtgcacagcacacacattaataagtttgaatatctaatcatacaccaacatcaactataactttgtcaaacttttgagctgttaaataacaccttgacgggccacgttttgtttgttttgattttacaaatctttagaaaaagaactctaaaaacactcgtccgtcactagctcaatggtgtattatgagagccttaaagaaaaaaattccgttaaaaatcgccaaaatctgttgcaaattgggtgataaaaaggaattgtaaatgatgaaattctttgcagaacgatcttagtaaattgatttcttttgatttttttttgctattagcaacatattgcaaaagacttttgagacgagaatttgcaacaacctgttgaaaaaaaaaaatgttgattctttttttcgcagtagagtattgatgatgtggacatcagaattcagaagtattcagaaccaaataagacccagagttgaccagaccaaccggttcaagcatcaactaaactaaccaaatcaaaaagaagaattttggcgcaaaccaagttccgatcaagaaactggcatacgattggatatttacaaagaaatatatccttaaaagagtaattatccagctggaatcataaatcaccgtaccgaattgaagttggtccatgatggctcacccaaagcacacaaaacttaaatcctccaaccaaatgaagatttttcccgacctaaattgaagactcaccagatagttacatatttcaagacatatgggcgagacgaaaacaaaaactaccgaaccattcaactagagcgccaagaagacccacccggatcaagcctaagatcatcaacccaaagtcacatttactcgacatacctttggtagtcaccaatattatgcatatttgtgaataataggcgagccaaatcacccaaggttcgaattggtttaggagttactcatttggttacatcacacattttttggttaattaaattacaacaaaacttacgttgacaattataaaaacataagtaaatgaaaccaatatatgaactgaataatctcttccgtaggtctaacatatagcttcaaaataatacagtaaaatctttcttttctttaagactcaacagaaagaagaaaaaaaaaggtaaaaaaagaacaaacattcaaagttaatgagaattaagaaggtggcttaaaataaggataactagtaaaaaagctctgaaataatgtgagaagtagcagaataactgccgcaaagaaagagaaatatgcccaaggattactaaagtacttgtgtttcaaggttgccttcagaacattccactttcggttataataacggtccaccttatttgacaattcagataagtaagtattttcgaggtcgaaagccacttcttgacatagccggttgaagacatcagcaacttctgaatcatttcctaaccagtgctcgatgatatcatagtaatgcaaatacctaatatcttcagcagaatctattagattgtccatgaagataatgtaggatgttatgtcgttcgttgaatcgatatggcactgctcgtaagctataagatttgagaaaagagacttggtacctacaaaaaacacgaagagagaccatatagtgtttttgtgagtttaaggaattatgagggttctctaggcgggaaaaaatgtatatgcctaaatagcaaaatcattatgaattgatgaaataggcaacgattgatgtcagtctatgtactttagcaacttatgggaacaaaaagtgaacaaaacctatacatgtcacaaatttttttggtttggtacaaaatcatttatatgcagtagagtatcacattttgattcttaggcaacaatataagtgaggtgtaaacaatatgatttgaatgaaactcatacgaaggaacgtaaaaataaataaaaactaaaaagtgtgaacttaccatcatggataagtaattttggtatttctagacaaccgtttttgaattgaatatcccaaaaccggtcagattttcttcttttgaattttataccggcttctcttagttctgtcacgcaatgtagtagttgttgttggcgcttgtccgccaccagcggtttcctggaccatctactccgcgataacctcgggtccggttttagactaggctggagcagacttcgacggaaaacatccagacaatgcaactcttccttctccttgtcagcaattgggttaaagaatttattgttgttttcttgggagttctcgattttggttgatgacatataagttggcatcaacggattgaagaaccgaaccgctaattgtgccactaaaccggtttggtattgtgtaccgagttgtagctctaataaccggtttaagacaaacaaaggaagttgattttccagcattagcatgtcacgtcgaatcgaatgcatagatcctcgcatcgcgaaaacgggatcgtttcggtcgtacctacacaccaagataaaaagaaaaaagttaaaaaagaaataaacgaaagtcaacatttagtttagtcaaccggatctgaaatcagtccggtttagcataaagctaaatcatgcttacccaagtttcgagaatccttcataggctcctctgaagagatcgagaacaaaacagccatcaagaactagcatttgggtgaacttgttactgctcaaaccaataggaccttcgtagcaagcacgagccctctcttcgagctctttcatggcgtcaatatacatttcgatgccttgcttggtacgtttcatgaccatattgaccgcacgccatttgtgatagtccatgggtcggagatgttcgtccccatggtggtacggaccaagcgagactgcttgagggaagtaagaattcttgtcgctttttttaagggagagtggaactctgtagatacagatcttgtcccagctagttgtggcggcgtctctcattacttgctccatcttgtctttgatccaaatcacccattcttcccgtgtctcttcgggttgttggtttcgggtttggagtttttggcgcatcatgaaggtgaggaagtaccaggtcaacatcggtcgtagttgatagtttcttcttgcttttcttcttatgataatatgagggaaaggaagcttcggtccaaatggtagctggggcggcggcggtggtggtggcggtggaagtggtggcagcaccaatagacgaggaggcggcggcggtggaggtggtggtcgtcgtttactaggagttgccatttttgtttgttgaaggtttttaggagattgagagtgacatagaaaaagtctaaaagcaaatatgtaacaactgaactaaagctgtcattggtcgcaatattatttgatctgtaatgacaacaaccagtgattgacatctaatcatacttatacattaaaatgtcttaaacaatctttaaacgtaatggatatataatgctttggcgagcgatgttttcttggacttttcttccactactcttaatagaaagactttattacaagtctttaatgtaatatatatatttcgtagagtgagatatttatttgaaacattcactcttatttaaaaaaaatgaaaatgcgttgtactcttatagaaatactatatactatataatgcgttattcattattgacaatgattgatacttgaattatccatatgaaagaaaaaaaatctacgaattagaaaacagcaagtttataatttcaattaagatgtgttatcaaccgtagacatgggaaactcggcacatggcacgactgacgacttcaccattctcgaatggataatgaggtgctcttatagaaagactcgaagaaatagtgttcatgacatgccttaaaaactaattttataaagctattatatattaagacttggaatattcaaaatcttacgccttaaaaaaaaactcgaccacccaaaaatggtattcagacatgcaaattgcaaaccgaaaagactccaagaaagtcaagtcatctattatattttatgcttaagatatattcaaaatcttatgccttaaaaaattgacgtaccaaaaaatagtgttcagacgtgcaaccccatttccaagcaaatggaacctaatcagcctcgacccgacgaacatttctaatcgctgtcttgatcatctgttcttgtttttgtttattccactaagtttattcacattactcttttgaatgacaactatttgtaaatccatagttctcacaaccatgtctatcactatactgtttagtgttttttttttcattctttttttcaatgaatgaacaatatttactacttcttaatattcactacgtctaggatatgcagtccaaataaatatccgaaattaacctttttcaatccattaactatttaaaattccaaattttacaacgtctttttttttttaattatgaatagaaaatattgaaaaaacaagaaatacaaatattgtaaataaaatgaaaaaaaaaaatgaaaactaagagagtggcttataataagcatagacagcaaagaagctttgaaagaatgtgagaaatagcagaataactgcagctgaaaaggagaaatatgcccaagggttattgaagtacttttgtcttagagtagccttcaacgagttccacttacgactataataacggttaacttcacgagacagttgagatagatacccatcttttggatcaaagatcacttctttacataaccggttgaacaaatctgcaacttcagaatcactccctaaccaatgctcaataataccgtcgtggtgcaagtagctaacatcttgagaagagtttattagattatccatgaagattatgtaggatgttatgttgttgcttgattgtgtatggcactgctcgaaagcaataagatttgagaaaagagacttggtacctacaagaaacaagtgagaccacagtgttttggtaacaaatatattctttgtcaaactgtaagatcttaaagataatggatagtaaaaatttgtgaggaactaatagaaaagtagagaagaaaaaaccggttaactcaccatcatggattagtagtttcggtatctttagataaccgtttttgaattcaatgtcccaaagctggccggtttctttcctcatgaagttaacacctgcgcctcttagttctgtcacgcaatgtatcaattgttgttgcttttccaccatgctcatatcctcatatggagtcccttgattagttgtctcactagattggatgagacttcgatggaacacatccaaacagtgcaacccgccattgtcacccaattcatcggatttttcctgcgagtctaacgatctttctgatttggtcagcacctcgctagttggcattagtgttttgaagaaccgaacagctacttctgccactatacccgtttggttcggtgtaccggtttgtagccctaataaccggtcgagaacgaacagaggaagttggttttccaacattatcatgtcacgttgaatcgaatgcatcaatcctcgcttagcgaaaaccgggtcgttacgtgcatatctattcagcacacaacagagtcaacagtttaagcaatagaaaaaaatcactagataaaatttagccaggcttacccaattttctggaatccttgaattgttcccttgaagagctcgagaacgaaacaaccatcaagaacaagcatttctgtgaactcattactattcttcatgtcaatgggaccttggtagcaagcacgagcctcctcctcgagctctttcatggcgtcaatatacatttcaatgttgtgcttggtacgtgccatgatcatattgaccgctcgccatttgtgacgctccatgggtctgaggtgtacctttccatggtggtacggaccaatagagacagtttgaggtaagtaagacttcttgtcgttctcttgaagatagaaaggaactctgtagatacagagcttgtcccagctatttgttgcgtcgtaactaagtgctttctccatcttgtccttgatcgagatcacccattcttctcgtgtctctcttggcttttcttcttttacttcgatcttactgggctccacgtaagtctccacgtggttgtgcaagttttggcctagatcacgtctggtaatttcatggaaactgtggattggcacgaaccatgacaaccgtctgtaccttttgtgggtggaagttgagcgaccatcggaaaacaaaaccatgatttctgctcgtcaatgttgaagctcgggagatcgagagagagatagagacaataattgtcaaatgtcaaagctaacatgtaactgagttaaagttgtaatctggtcatataccaaactcttataataaataggctaacattttaaaaaggatagtagtacaaaactgcgtttccttgattattaactaagccaatgacatgaataatccacatggtcttgaattcttgatccttaataatataatttactcaattatgattaaaatgttcatttattacacaacatatttacttttaacttatgcgtagtctgaaaatgtgtcccctcttttattttaattttttatttcaacttctttatataattttcttatatctcgtaaacttagtaaaccaaatacatatagtgctatttatgtcctcatagtgtataccataatttgaattttaaaaaattaataaaaattatttgagaaataaagtgtcaataatatattagatggtgttgatatttattggatgttatattaatcgggtttgtatattggatggccaagcataacattatcttttgaaaagaaccgcataatcttctactagtaaaaccaaaatctggatatggcttccaaacaaatacagaccaaacacaaccttttaataatgtttttcaaaacacttaattaactcttgaaaaaaatccaaatgttacaatattcatatttatgttgaatagaaaaaatacaaaaaaaacattttaaaagaaaaaggaaatcacaaacattactatatttttgttggttgtgtaacaaatttatattacaaaaaaaaaatcacaaacattaattgaaagtaatttatcaaaaacattgtcaattactttcaaatgtttttttttaatcaaacaaacattataaagtaataaaataacaataaatgttaataatgtagcaattatttggtcacagaaaattcaaagaaaccaaacgtttaaaaagacaaaccagaaaacagacccagaggcataacaaagccatggtcaaaacagatcaaaacgaaaaagtcattacacgtcaatcatcaattttttatttgtcgaagagatcccttagctagcgagggttacctcgggtgacatatatactgaaggaccccatgttccgcatgcaataacaacacttctagctatttcaaaagctcttatgctgcactttggagagattcaaacaaaatataccaacttggaatgtctgagaaaacgtgagaattacgctcctatgtcttaggtggtggcttaaaataagcaaaaacagcaaaaaaactctgacaaaatgtaaaaattagcagagtaactgcagcaataaaagagaagtatgcccaagggttattgaagtacttgtgtcttaaagtagccttcaaataattccacttacgcctatagtaaatgttaacttcgccggtcaatgcagaaagataaccatcgtttgggtcaaaaatcacttctttacctagcccgttgaacaaatctgaaacttcagaatcactccctagccaattctcaatgataccatagtggtgcaagtagctaacatcttcagaagagtttattaggttatccataaagattatgtaggatgtaattttcttgctcgacttgatatgacactgttcgaaagctatgagatttaagaagagagacttggtacctacaagaaacacgagagaccatggtgcttttgtaagtttaaagagttatatggggttctattgatgtatttggattgtgtaaaaggaaaattaaacagggaaaaactcaagatactagactatgtgagtgcaagagataccgttttcaggagctagacatcaaattatgacttgtaactaacgtattttttgcctacccatataattaggaggtaggagtcaaattctaagatcttaatgataattgataagaaaggaaactagttaaacctttgtgaagaacgaatataaagttgagaagaaaaacttgttaactcaccgtcatggattagtagttttggtatctttagatatccatttttgaattcgatatcccaaaaatggccggtttcctttctcatgaactcaacacctgcgtttcttagttcagtcacgcaatgtatcagttgttgaggttgcttgttcaccatgctcatatcctcatccgatgtcccactagattggaggagacctcgacggagtacgtctaaacagtgcaacccgccttcttcagttagcacctccctcgttggcagtagtggttggaagaatggttggaagagttgaacatttactttgtccaatacatcgggccgttgtagctgtaataacccctttagaacagaccaaggaagctgattttctagcattaccatgtcacgtcgaatcgattgcatcaatcctcgcatcccgaaaaccgggtcattgggtgcatatctattcagcacacaagaacagtgtcaatagtttttttgtttcttttcttttcaacgttgattaatcacattaataactagtctatttagcaaaacataaatagtaaactgtctatcggtaaaacttataaatagtaaacggttccttgactcgatagtttggactttagataacaaagctgaaatcagaccggtttattaatatctaagataactggctaaaaccagaaaatatagtcaagtttacccgatttcctggaatccttcacttgttcccttgaagatctcgataataaaaacgccatcaagaacaagcatttctatgaactcattcctattcatattaatgggaccttggtagcaagcacgagctttctcctcgagctctttcatggcgtcaatatacatttcgatgtcgtgtttggcgcgtgccatgaccatattgaccgcacgccacttgtgacgctccatgggcatgagatgtttgtgtccatggtggtacggaccaatagagacgatttgaggcatgtaagactttgtatcgttttcttgtaggtaaggtggaactctgtagatacagagattgtcccaactagttgtagcgttgtctccaagtgttttcatcttgtcatttagagagatcacccatatttctcgaagtttttgctcgttcttgtcttcgatagagacaaccgattctacttgtgtctctcttggcttctcttctatcacttcgatattttcgagctccccgtaagtctccttgtcattccgcaacttttggcgttgacgggctcgcctgataattccataataagtacggactatccgcgaaaaccgtctattcttcttgttgctggaaactgaccgaccatccaaaaccgaaaccataatttctgtaggttgaacctcaggagatcgagagagagagaaatagcgcagttgtcaaatctcaaagcaacgatgtaactgagttgaagtaatctggccacgctatgtttatttctaactatacaaaactcttataaatacaaaatataaaagaagtcttgtcaatagggtattgtacataatacaagtagtttggatgttttaatccatgcatcgtcgagtgggattgaaacattcaaactagtatagaaaatatcataatagtatgtatatatataaacaagtgggacggaaacatactaactaccatcaaatagaacgtatagtacgtactcttataagaagactaatgagattgactaattctccataggaaaaagattaataagctctcgtgatatattcaacgaatgagattgactaattctccactccttaaaaaatactcctatggagaataagataactgcattttccaatattcttcttatgggtggtccaaaatgtgtcccctcatttaatttaatatcataagtctactatgaacatttgtttttgccatgtttagattttttaaaataaataacacttttgaaaaattagtatgtgtgtattaagtaaaaaaaatgcgttattccatatacattttggataaattatttttcgtgataaatttattgcaatccttttacatggattaatccatttcatgaccagcgaaaaaaaaacaaaagagaccattaatgggttaggttattaggttagctttttattgggttggttagtttacaaattttgcacccctaataaaatcaaacttcttaaaattgctttgcaacaacataattattccaaaacccaattattacaatgcaaaatcttggtcaagtacatagaaaatgttgaaaaacaagaaaatacaaacattccaaattgatgggaaaaacccccaactagagtttagaattgggcttataataagcataaacagcataaaaactctgacataatgtgagaagtagcaaaataactgcagcagaaaaagaaaaatatgcccaaggattattgaagtacttgtgtgtcaaggtagccttcaaaacattccacttacgattgtaataacggtttacatcaccagacagtcgagatagatgactatctttgggatcgaaaaccacttcttgacatagccggttgaacaaatccgcaacttccgaatcactcccaagccaatgctcgatgataccacaataatgcaagtagctaacatcttcgctagagtttattagattatccataaaaataatgtaggatgttatgtggttgctcgactcgatatgacactgctcaaatgctataagatttgagaagagagacttagtacctacagaaaaaacatgagaggatttgtaagtttatggaatttaaggattttataggtaaatatcgtttttatacaaacatatatatgtgtaaggaataaaaagtaggaaaggaattaaaagagaacctttgagcttaccatcatggattagtagtttgggtatttctagataaccatttttgaattcaatatcccaaaaccggtcggttttccttttcctgaacttcacaccagcttcccttagttctgtcacgcaatgtaccagttgttgttgtcgcttatccaccactcgcgtattcctagtcaatctctttaggagagatcttgtgttcggtgtaggactagactggagtagacttcgacggaaaacatccaaacagtgcaactcgcccttgtcaccaagtgtgtccaatgatttttccagccagttcatgagttttgactggtccggtttggtcaacgcctctcccgttggcattagcgggtcaaagaacttaacggctacgtgtgccactataccggtttggttttgtgtaccgagctgtaactctaataaccggtcaagaacaaacaggggaagttgattttccagcattatcatatcacgttgaattgaatgcatcaatcctcgcatcgcgaaaaccgggtcgttacgtgcatatctactcatcagtcatcacagtaaaaaaaaatcaacttttcagatacaggccaaaataagaccggtttagcaagtatagtagataaccggaaaaaaccagaaaatttattcacgcttaccctatctcggtaaatccttcaacggttcccctgaagagctcgagaacaaaacagccatcaagaacaagcatttctgtgaactcattcctgctcaaactaatgggaccttcatagcaagcacgagccttctcttcaagctctctcatggcattagtatacatttcaatgcgctgctttaaacgtttcaggaccttattgagcgcacgccacttgtggcgctccataggccgaagacgctttttaccatggtggtacggaccaagcgaaacagtctgagggaaataggacttcttgtcgttctcttgtaggtaatgtggaactctgtagatgcagagctttccccaaattgttgtgtcgtcgtctctatctgcttgctcgagcttgtctcttattgagatcacccaactgtctcctgtggtctcttctggcctctcttctaccacctccttacctgactcggaatgagactgcttgtggttctgcacgttttggtcttgattcggtctggtaacttccggtaaaccgtggagattcggatcttgaaccggttccgagtgttggtttttggtttgaaatttttgtctgagcttgaggctgagcaagtaccaagttaacatgtctttgttgatgataattggttgtccatcggaatgaacattaactaaaaccattggttttgctggttgaagcttttttcaggagattgagagcaaaagctgtaatttcgaaatgttaagtgcaaacgctgtaactaatttaaagctgtgatttggccatacatttatttattttccaatccacataactcttataaaaagacttcgtactcttataaattaaaagactctcataaatgcttgtagaattttctataaatgaaattcaaacacccaacctctcatagtaaagactcataagtgcttagtactagactactattagtagaatatttttattattcattcaatgagtggagactaaagcttccaaactttcataaaaaaaaaagactggagactcatataaaaagattctcatattcttcctgtaattgttctttaacgagattgaaaaatgtgctaatttttatatccaagctgtatttgtgtacactgaaaaaagtcatgagattttttttttactaaatctgatcaaaatacacaaatggtgaatcttttcggaggaatatgtaatcctcatttggtgacattccccctggtatattagcttaatactcccttccttctagcgttaatttgtgtagaaatttagttattgcttttcttgcacttgtttctttagaatcgcctaggatcgatcaagaccgaaaagacgatcagggtcattcaggttaccggtgttgtgcctttcaaagatcctcttacactctaattatataagactcagaacgagcttaagcatggaagcaaccacaagaggtgcgatgtggtcgttcttaagttttaagtgttttagttacttaaaggaaaatttagtattgtccctctctattttagatagggaaaaatctcgagaaaaacctcatctactttttatttgggtatttaatatccatggtttctcagttggaataaaaaaaactcgtttaaatatttttagtctaagtatgtccaaggatttttccagccagttcatgagttttgactgcaagaaaacagttaatctagagttagatatcatgtgatattatttcttcttcctaaataaaatagtaatccataataacgaggacataggtgttaaatcagagtccgaagcaaatagtttacaatagaaatttttgttttgatgaagaagaacaaaatgtcacaaaaaccaagcattacaaactgaaaggaaacaacaacagaatagttatgaagacggattaaaataagcataagcagcaaaataactttgagagaatgtaagaattagtagaataactgcagcaaagaaagacaaatatgcccaagggttatctaagtacttgagtatcaaggtcgttttcaaagaattcaacttcctggagtagttttgtttataacagcgatgaacctcaatcaacaattgagatagataaatatctttggtgtcgaaaaccacttcctgacataactggttgaacatatccgcaacttcagaattacttcctagcgagtgctcaataataccacagtgatgcaaataactaatatcttcaggagaatctattaaattgtccataaatattatgtaggatgttatatcattgctcgactcgatatgacactgctcgaaagcaatgagattcaagaatagagatttggtacctacaaaaaattggacagtgggtggacttgtaagtttgagaagtaactgaactcagttaaaaaataaaacattcattgcttcattgtctaaatatatttttgccgttgctttacttgatgaccacgagataatttgaagataagctatataaccaatatctatgacttataaaactttgtttgatcaccaagacatttatttaatctagtagtttgtgttactgcgttacttaatgagcacgcatttaaatttatataatgtatgttctcgacaaagaaaatgttagagcgcaataaaatctactagtattatttacaaaaggtgaagggagatttaccatcatggataagtagaccgggtatctccaggtaaccattgctgaatttaatatcccaaaaccgatcggttttatttagcttgaacttaaaaccggcatctcttagttcggtcacggtaggtatcactcgttgtaggtgtttgtcagccacgcgtgagtaatttgcctttccggatgatcttgggaagagcagacttcgatggaaaacatcaagacagtgcaactctccattggatacgcctcttggaggcgagttctcggtcaacgtctcggccgttggcattagaggaataaagaaccgaaccactaattccactaaaccagtttggttctgtgtaccgggttgtaactctaataaccggttgagtacgaacaaaggaagttgattttccagcattatcatgtcacgttgaatcgaatgcatcgatcctcgaaccgcgaaaactggatcgttatgatcatatctacgtaacagccaaaaatgaataatcaaaatcagtagttttagataacccgatttaaaatcataccggattagcaagataacttgacaaaaacaagaaattgaatcacgctaacccgagtttcaagaatccttcattgactccttggaggagctcgagaataaaacagccatcaagaagaagcatttctgtgaactcgttactgctcaaaacaatggaaccttcgtagcaagcacgagccttctcctccagctctatcatggcgtcaagaaacacttcaatgccttggttcgtacgttttaataccatattgacggcacgccatttatggcactccatggactgtgtttgctgtctcccatggtgatatggaccaagtgagacagtctgagggaaatacgacttcttgtcgtttccatgtaggtaatgtggaactttgtatatacagagcttgccccagctagttctgtcatcgtttctgtatgcttgctcgagcttgtcttttattgagatcacccactcaagtcgtttggtcccgctcccttcgaccacctcgtttattccaggtttagaacgagtgtcttgctggttctccaagttttggtcttcatagctgatacttttgggtaaaacgacacgttcggattcttcgttttgtctacggacattttcgacgtattctctcaacttgtcataagattttccttttttgacatcatgtccagtaagccaaggaatcgcccgtggtcgtaatggcaatggttcaggtagtactagtggctgttgctttcgtaatcgtagtagttgttgtcgtggtggtggtaggagtcgtagtcgtagtcgtggtcctaaccgtggtggtggaggtggtggtggtggtggtggtggaggtggtggttgtggtggtggtgctcgttgtcgtcgtaattctagacggggtggtagtggtggtggtggtggaatagtaccaaaagtttccattttgttggttgaagctataccaagaggaaatgagtaatgaattcgagtaaacgaagtaacaaataaagaaagctaaaatatatgtagatatatatagaaagcttcaatcttttaactcttttataaaaagactcaccataaatgttgtcatactttatatttaacgagtgagattgaaaaagtcaaacttcgttaaaaaaaatcctgataaattcttgttatacactagtaaaataatatccctcttatacttacaaaaacattatattttctcaaggtataaaaatattgcaagtgtatactaattgtctaaaaccaattttaattgcaattacgaagtcaacatttctttgttgatgaaaactgtatgagcataaattaaaaccaatgttttgggggttcccttgtttttgctggttaaaagctttttccagagattgagagcgagacgtaaattgggaaatgtcaaagcaacgctgtaactaatcttaaagctgtgaactggccatgtgtttgcttattttgaaatctacaaaactcttataaaaagactctaataaatgcttctagtttatactatatccaacgtgtgagatttgaatttgattaattaatttattctttttctgcatttcaactccaaaactctcattaaaaaaggaaaaactatgtactcttaataaatttgtcgactctcatatatagcttgtagtatatatatatatattcaataactacataaaataaaacaaagtcatgagaaaaaaaatgttaccaaagttcaactattaactgatttcatttttcatgtaaaactaacaattattaggagacgaaacaaaacaaaacaaactgtacatccagaatattaaatgcaaatcttttttttaaaagttattgtataacaattttattttataaattatagatgtgagttttatatatgatttctcagacattcgaagaatcaactatgaaactaatattacaaacaaacacaccctttttttctttaaacaaatcgatatgtatcgattaataatacagaagaggagaagcacattactaacgaattaaacttgaagctgaagttggtggattgtgtacagagaaggtgagagatatctgtcttccatcacataccaaagttggtctggactttactcacgagatgctctccatagacagctcttttgaaaacttggcatcctcttctccctccagggtacttctgtttacatatacccaatggctccactaccgcgtcgaaattagtctgttcattcaaattaaaacatgattccaaatccaacagtggaaaaacacaccagagtgttaaaagttttaaacctcatagaaggatgcaacacaaacacagtattgatgagagttattgatcattctatgaagtgtggatttgtatactccgtgtgaaagtatctgcattttatgattccaaaaggtttttcaaaagggtattcaagagcagggcttcccctggaattttgggtgccaaatgcacccaaaaatatttaaggttatttcaaaagattttaaaaattgaggccaactagaaaaaaataaacaaaattgagaccgttttgtaaacaaattttcagaagaatttcaaaaacaatttcaaaaacatgttttttgatgaggttcaggaccggccatgttcaagagaatgcgttaaaattctcactttctttcaaccaaaacaaagagatagagagatgtgagtgcttgaaacagagaatcaagagagattgagagacagagagtacatagggatatagtttgagttcgattaggttactctgtttgtgccccctaataaaaaaccatgtccattattgcttagccaccgaaattaaccttcttaaacttgtttttaacaacaaaatattattccaaaaccaattttggatagaagaaaataggaaatgttgaaaaacaagaaaatgcaaacattccaaattgaatgaaaaaggacaaaagttaagtgtttggctcaaaataagcataaacagtaaagaaactctcacaaaatgtgagaagtagcaaaataactgcaccaaaaaaggaaaaatatgcccaaggacttctaaggttgagctggtacttgtgtaatatgactgcactaaacagactccacttacgactgtaaaaacggtctacaccaagacaaagtggatatagataactatcaatgggatcgaaaaccacgtcttgacataatttgtggaacaaatccacaacttcagagtcactctcaagccaatgctcgatgataccacaatattgcaagtatctaacatcttcgttagaatttattagattctccacgaaaattatgtaggatgttatctgtttggttgagtcgatatggcattgctcaaaagctataagatttgacaagagagacttggtacctacaataaatatgaaagaggttcgtatgtttaattttaataatgtgatggttctgtagataaatttttggttttaaagagaacatatgtgggaaaggaaggaataaaagagtaggaaagaaaataaaataaaagttctaacttaccatcatggggttctctaggaaaaataatgtatacgcctaaatggctaatcattccgaattggtgaaataggcaacaattgatgtcagtctatttactttagcgacttgtgggaaaaatctgaacaaaaccaatacatgtcgctctatttggttttgtacaaaatcattaacatgcagataggtatcacgtttgattcttaggcgacaacaatataagcaaaatatgatttaaaactaataaaaacgaaaatgtgaacttaccgtcatggataagtagtttcggtatctctagacaaccgtttttgaattgaatatcccataaccggtcggattttcttcttttgaattttataccggcttctcttagttctgtcacgcaatgtagcaatttttgttggcgcttgtccgccacgacgggtttccaggaccatctacgcgataaccttggctccggtttcagactaggctggagcacacttcgacggaaaacatccagacagtgcaactcttccttgtccttgtcagcaattgggtgaaagaatttattgttgttttcttgcgaattctcgattttggttgatggcatataagttggcatcaaaggaagttgattttccagcattagcatgtcacgtcgaatcgaatgcatagatcctcgcatcgcgaaaacagggtcgtttcgatcatagctacacaccaagataaaaagaaaaaagttaaaaaagaaataaacgaaagtcaacatttagtttagtcaaccggatctgaaatcagtccggtttagcataaagctaaatcatgcttacccaagtttcgagaatccttcataggctcctctgaagagatcgagaacaaaacagccatcaagaactagcatttgggtgaacttgttactgctcaaaccaataggaccttcgtagcaagcacgagccctctcttcgagctctttcatggcgtcaatatacatttcgatgccttgcttggtacgtttcatgaccatattgaccgcacgccatttgtgatagtccatgggtcggagatgttcgtccccatggtggtacggaccaagagagacagtgtgagggaagtaggaattc

SEQ ID NO: 1072 - DNA, 105644 bp, Arabidopsis thaliana
gaattcgatatcccaaaaatggccggtttcctttctcatgaactcaacacctgcgtttcttagttcagtcacgcaatgtatcagttgttgaggttgcttgttcaccatgctcatatcctcatccgatgtcccactagattggaggagacctcgacggagtacgtctaaacagtgcaacccgccttcttcagttagcacctccctcgttggcagtagtggttggaagaatggttggaagagttgaacatttactttgtccaatacatcgggccgttgtagctgtaataacccctttagaacagaccaaggaagctgattttctagcattaccatgtcacgtcgaatcgattgcatcaatcctcgcatcccgaaaaccgggtcattgggtgcatatctattcagcacacaagaacagtgtcaatagtttttttgtttcttttcttttcaacgttgattaatcacattaataactagtctatttagcaaaacataaatagtaaactgtctatcggtaaaacttataaatagtaaacggttccttgactcgatagtttggactttagataacaaagctgaaatcagaccggtttattaatatctaagataactggctaaaaccagaaaatatagtcaagtttacccgatttcctggaatccttcacttgttcccttgaagatctcgataataaaaacgccatcaagaacaagcatttctatgaactcattcctattcatattaatgggaccttggtagcaagcacgagctttctcctcgagctctttcatggcgtcaatatacatttcgatgtcgtgtttggcgcgtgccatgaccatattgaccgcacgccacttgtgacgctccatgggcatgagatgtttgtgtccatggtggtacggaccaatagagacgatttgaggcatgtaagactttgtatcgttttcttgtaggtaaggtggaactctgtagatacagagattgtcccaactagttgtagcgttgtctccaagtgttttcatcttgtcatttagagagatcacccatatttctcgaagtttttgctcgttcttgtcttcgatagagacaaccgattctacttgtgtctctcttggcttctcttctatcacttcgatattttcgagctccccgtaagtctccttgtcattccgcaacttttggcgttgacgggctcgcctgataattccataataagtacggactatccgcgaaaaccgtctattcttcttgttgctggaaactgaccgaccatccaaaaccgaaaccataatttctgtaggttgaacctcaggagatcgagagagagagaaatagcgcagttgtcaaatctcaaagcaacgatgtaactgagttgaagtaatctggccacgctatgtttatttctaactatacaaaactcttataaatacaaaatataaaagaagtcttgtcaatagggtattgtacataatacaagtagtttggatgttttaatccatgcatcgtcgagtgggattgaaacattcaaactagtatagaaaatatcataatagtatgtatatatataaacaagtgggacggaaacatactaactaccatcaaatagaacgtatagtacgtactcttataagaagactaatgagattgactaattctccataggaaaaagattaataagctctcgtgatatattcaacgaatgagattgactaattctccactccttaaaaaatactcctatggagaataagataactgcattttccaatattcttcttatgggtggtccaaaatgtgtcccctcatttaatttaatatcataagtctactatgaacatttgtttttgccatgtttagattttttaaaataaataacacttttgaaaaattagtatgtgtgtattaagtaaaaaaaatgcgttattccatatacattttggataaattatttttcgtgataaatttattgcaatccttttacatggattaatccatttcatgaccagcgaaaaaaaaacaaaagagaccattaatgggttaggttattaggttagctttttattgggttggttagtttacaaattttgcacccctaataaaatcaaacttcttaaaattgctttgcaacaacataattattccaaaacccaattattacaatgcaaaatcttggtcaagtacatagaaaatgttgaaaaacaagaaaatacaaacattccaaattgatgggaaaaacccccaactagagtttagaattgggcttataataagcataaacagcataaaaactctgacataatgtgagaagtagcaaaataactgcagcagaaaaagaaaaatatgcccaaggattattgaagtacttgtgtgtcaaggtagccttcaaaacattccacttacgattgtaataacggtttacatcaccagacagtcgagatagatgactatctttgggatcgaaaaccacttcttgacatagccggttgaacaaatccgcaacttccgaatcactcccaagccaatgctcgatgataccacaataatgcaagtagctaacatcttcgctagagtttattagattatccataaaaataatgtaggatgttatgtggttgctcgactcgatatgacactgctcaaatgctataagatttgagaagagagacttagtacctacagaaaaaacatgagaggatttgtaagtttatggaatttaaggattttataggtaaatatcgtttttatacaaacatatatatgtgtaaggaataaaaagtaggaaaggaattaaaagagaacctttgagcttaccatcatggattagtagtttgggtatttctagataaccatttttgaattcaatatcccaaaaccggtcggttttccttttcctgaacttcacaccagcttcccttagttctgtcacgcaatgtaccagttgttgttgtcgcttatccaccactcgcgtattcctagtcaatctctttaggagagatcttgtgttcggtgtaggactagactggagtagacttcgacggaaaacatccaaacagtgcaactcgcccttgtcaccaagtgtgtccaatgatttttccagccagttcatgagttttgactggtccggtttggtcaacgcctctcccgttggcattagcgggtcaaagaacttaacggctacgtgtgccactataccggtttggttttgtgtaccgagctgtaactctaataaccggtcaagaacaaacaggggaagttgattttccagcattatcatatcacgttgaattgaatgcatcaatcctcgcatcgcgaaaaccgggtcgttacgtgcatatctactcatcagtcatcacagtaaaaaaaaatcaacttttcagatacaggccaaaataagaccggtttagcaagtatagtagataaccggaaaaaaccagaaaatttattcacgcttaccctatctcggtaaatccttcaacggttcccctgaagagctcgagaacaaaacagccatcaagaacaagcatttctgtgaactcattcctgctcaaactaatgggaccttcatagcaagcacgagccttctcttcaagctctctcatggcattagtatacatttcaatgcgctgctttaaacgtttcaggaccttattgagcgcacgccacttgtggcgctccataggccgaagacgctttttaccatggtggtacggaccaagcgaaacagtctgagggaaataggacttcttgtcgttctcttgtaggtaatgtggaactctgtagatgcagagctttccccaaattgttgtgtcgtcgtctctatctgcttgctcgagcttgtctcttattgagatcacccaactgtctcctgtggtctcttctggcctctcttctaccacctccttacctgactcggaatgagactgcttgtggttctgcacgttttggtcttgattcggtctggtaacttccggtaaaccgtggagattcggatcttgaaccggttccgagtgttggtttttggtttgaaatttttgtctgagcttgaggctgagcaagtaccaagttaacatgtctttgttgatgataattggttgtccatcggaatgaacattaactaaaaccattggttttgctggttgaagcttttttcaggagattgagagcaaaagctgtaatttcgaaatgttaagtgcaaacgctgtaactaatttaaagctgtgatttggccatacatttatttattttccaatccacataactcttataaaaagacttcgtactcttataaattaaaagactctcataaatgcttgtagaattttctataaatgaaattcaaacacccaacctctcatagtaaagactcataagtgcttagtactagactactattagtagaatatttttattattcattcaatgagtggagactaaagcttccaaactttcataaaaaaaaaagactggagactcatataaaaagattctcatattcttcctgtaattgttctttaacgagattgaaaaatgtgctaatttttatatccaagctgtatttgtgtacactgaaaaaagtcatgagattttttttttactaaatctgatcaaaatacacaaatggtgaatcttttcggaggaatatgtaatcctcatttggtgacattccccctggtatattagcttaatactcccttccttctagcgttaatttgtgtagaaatttagttattgcttttcttgcacttgtttctttagaatcgcctaggatcgatcaagaccgaaaagacgatcagggtcattcaggttaccggtgttgtgcctttcaaagatcctcttacactctaattatataagactcagaacgagcttaagcatggaagcaaccacaagaggtgcgatgtggtcgttcttaagttttaagtgttttagttacttaaaggaaaatttagtattgtccctctctattttagatagggaaaaatctcgagaaaaacctcatctactttttatttgggtatttaatatccatggtttctcagttggaataaaaaaaactcgtttaaatatttttagtctaagtatgtccaaggatttttccagccagttcatgagttttgactgcaagaaaacagttaatctagagttagatatcatgtgatattatttcttcttcctaaataaaatagtaatccataataacgaggacataggtgttaaatcagagtccgaagcaaatagtttacaatagaaatttttgttttgatgaagaagaacaaaatgtcacaaaaaccaagcattacaaactgaaaggaaacaacaacagaatagttatgaagacggattaaaataagcataagcagcaaaataactttgagagaatgtaagaattagtagaataactgcagcaaagaaagacaaatatgcccaagggttatctaagtacttgagtatcaaggtcgttttcaaagaattcaacttcctggagtagttttgtttataacagcgatgaacctcaatcaacaattgagatagataaatatctttggtgtcgaaaaccacttcctgacataactggttgaacatatccgcaacttcagaattacttcctagcgagtgctcaataataccacagtgatgcaaataactaatatcttcaggagaatctattaaattgtccataaatattatgtaggatgttatatcattgctcgactcgatatgacactgctcgaaagcaatgagattcaagaatagagatttggtacctacaaaaaattggacagtgggtggacttgtaagtttgagaagtaactgaactcagttaaaaaataaaacattcattgcttcattgtctaaatatatttttgccgttgctttacttgatgaccacgagataatttgaagataagctatataaccaatatctatgacttataaaactttgtttgatcaccaagacatttatttaatctagtagtttgtgttactgcgttacttaatgagcacgcatttaaatttatataatgtatgttctcgacaaagaaaatgttagagcgcaataaaatctactagtattatttacaaaaggtgaagggagatttaccatcatggataagtagaccgggtatctccaggtaaccattgctgaatttaatatcccaaaaccgatcggttttatttagcttgaacttaaaaccggcatctcttagttcggtcacggtaggtatcactcgttgtaggtgtttgtcagccacgcgtgagtaatttgcctttccggatgatcttgggaagagcagacttcgatggaaaacatcaagacagtgcaactctccattggatacgcctcttggaggcgagttctcggtcaacgtctcggccgttggcattagaggaataaagaaccgaaccactaattccactaaaccagtttggttctgtgtaccgggttgtaactctaataaccggttgagtacgaacaaaggaagttgattttccagcattatcatgtcacgttgaatcgaatgcatcgatcctcgaaccgcgaaaactggatcgttatgatcatatctacgtaacagccaaaaatgaataatcaaaatcagtagttttagataacccgatttaaaatcataccggattagcaagataacttgacaaaaacaagaaattgaatcacgctaacccgagtttcaagaatccttcattgactccttggaggagctcgagaataaaacagccatcaagaagaagcatttctgtgaactcgttactgctcaaaacaatggaaccttcgtagcaagcacgagccttctcctccagctctatcatggcgtcaagaaacacttcaatgccttggttcgtacgttttaataccatattgacggcacgccatttatggcactccatggactgtgtttgctgtctcccatggtgatatggaccaagtgagacagtctgagggaaatacgacttcttgtcgtttccatgtaggtaatgtggaactttgtatatacagagcttgccccagctagttctgtcatcgtttctgtatgcttgctcgagcttgtcttttattgagatcacccactcaagtcgtttggtcccgctcccttcgaccacctcgtttattccaggtttagaacgagtgtcttgctggttctccaagttttggtcttcatagctgatacttttgggtaaaacgacacgttcggattcttcgttttgtctacggacattttcgacgtattctctcaacttgtcataagattttccttttttgacatcatgtccagtaagccaaggaatcgcccgtggtcgtaatggcaatggttcaggtagtactagtggctgttgctttcgtaatcgtagtagttgttgtcgtggtggtggtaggagtcgtagtcgtagtcgtggtcctaaccgtggtggtggaggtggtggtggtggtggtggtggaggtggtggttgtggtggtggtgctcgttgtcgtcgtaattctagacggggtggtagtggtggtggtggtggaatagtaccaaaagtttccattttgttggttgaagctataccaagaggaaatgagtaatgaattcgagtaaacgaagtaacaaataaagaaagctaaaatatatgtagatatatatagaaagcttcaatcttttaactcttttataaaaagactcaccataaatgttgtcatactttatatttaacgagtgagattgaaaaagtcaaacttcgttaaaaaaaatcctgataaattcttgttatacactagtaaaataatatccctcttatacttacaaaaacattatattttctcaaggtataaaaatattgcaagtgtatactaattgtctaaaaccaattttaattgcaattacgaagtcaacatttctttgttgatgaaaactgtatgagcataaattaaaaccaatgttttgggggttcccttgtttttgctggttaaaagctttttccagagattgagagcgagacgtaaattgggaaatgtcaaagcaacgctgtaactaatcttaaagctgtgaactggccatgtgtttgcttattttgaaatctacaaaactcttataaaaagactctaataaatgcttctagtttatactatatccaacgtgtgagatttgaatttgattaattaatttattctttttctgcatttcaactccaaaactctcattaaaaaaggaaaaactatgtactcttaataaatttgtcgactctcatatatagcttgtagtatatatatatatattcaataactacataaaataaaacaaagtcatgagaaaaaaaatgttaccaaagttcaactattaactgatttcatttttcatgtaaaactaacaattattaggagacgaaacaaaacaaaacaaactgtacatccagaatattaaatgcaaatcttttttttaaaagttattgtataacaattttattttataaattatagatgtgagttttatatatgatttctcagacattcgaagaatcaactatgaaactaatattacaaacaaacacaccctttttttctttaaacaaatcgatatgtatcgattaataatacagaagaggagaagcacattactaacgaattaaacttgaagctgaagttggtggattgtgtacagagaaggtgagagatatctgtcttccatcacataccaaagttggtctggactttactcacgagatgctctccatagacagctcttttgaaaacttggcatcctcttctccctccagggtacttctgtttacatatacccaatggctccactaccgcgtcgaaattagtctgttcattcaaattaaaacatgattccaaatccaacagtggaaaaacacaccagagtgttaaaagttttaaacctcatagaaggatgcaacacaaacacagtattgatgagagttattgatcattctatgaagtgtggatttgtatactccgtgtgaaagtatctgcattttatgattccaaaaggtttttcaaaagggtattcaagagcagggcttcccctggaattttgggtgccaaatgcacccaaaaatatttaaggttatttcaaaagattttaaaaattgaggccaactagaaaaaaataaacaaaattgagaccgttttgtaaacaaattttcagaagaatttcaaaaacaatttcaaaaacatgttttttgatgaggttcaggaccggccatgttcaagagaatgcgttaaaattctcactttctttcaaccaaaacaaagagatagagagatgtgagtgcttgaaacagagaatcaagagagattgagagacagagagtacatagggatatagtttgagttcgattaggttactctgtttgtgccccctaataaaaaaccatgtccattattgcttagccaccgaaattaaccttcttaaacttgtttttaacaacaaaatattattccaaaaccaattttggatagaagaaaataggaaatgttgaaaaacaagaaaatgcaaacattccaaattgaatgaaaaaggacaaaagttaagtgtttggctcaaaataagcataaacagtaaagaaactctcacaaaatgtgagaagtagcaaaataactgcaccaaaaaaggaaaaatatgcccaaggacttctaaggttgagctggtacttgtgtaatatgactgcactaaacagactccacttacgactgtaaaaacggtctacaccaagacaaagtggatatagataactatcaatgggatcgaaaaccacgtcttgacataatttgtggaacaaatccacaacttcagagtcactctcaagccaatgctcgatgataccacaatattgcaagtatctaacatcttcgttagaatttattagattctccacgaaaattatgtaggatgttatctgtttggttgagtcgatatggcattgctcaaaagctataagatttgacaagagagacttggtacctacaataaatatgaaagaggttcgtatgtttaattttaataatgtgatggttctgtagataaatttttggttttaaagagaacatatgtgggaaaggaaggaataaaagagtaggaaagaaaataaaataaaagttctaacttaccatcatggggttctctaggaaaaataatgtatacgcctaaatggctaatcattccgaattggtgaaataggcaacaattgatgtcagtctatttactttagcgacttgtgggaaaaatctgaacaaaaccaatacatgtcgctctatttggttttgtacaaaatcattaacatgcagataggtatcacgtttgattcttaggcgacaacaatataagcaaaatatgatttaaaactaataaaaacgaaaatgtgaacttaccgtcatggataagtagtttcggtatctctagacaaccgtttttgaattgaatatcccataaccggtcggattttcttcttttgaattttataccggcttctcttagttctgtcacgcaatgtagcaatttttgttggcgcttgtccgccacgacgggtttccaggaccatctacgcgataaccttggctccggtttcagactaggctggagcacacttcgacggaaaacatccagacagtgcaactcttccttgtccttgtcagcaattgggtgaaagaatttattgttgttttcttgcgaattctcgattttggttgatggcatataagttggcatcaaaggaagttgattttccagcattagcatgtcacgtcgaatcgaatgcatagatcctcgcatcgcgaaaacagggtcgtttcgatcatagctacacaccaagataaaaagaaaaaagttaaaaaagaaataaacgaaagtcaacatttagtttagtcaaccggatctgaaatcagtccggtttagcataaagctaaatcatgcttacccaagtttcgagaatccttcataggctcctctgaagagatcgagaacaaaacagccatcaagaactagcatttgggtgaacttgttactgctcaaaccaataggaccttcgtagcaagcacgagccctctcttcgagctctttcatggcgtcaatatacatttcgatgccttgcttggtacgtttcatgaccatattgaccgcacgccatttgtgatagtccatgggtcggagatgttcgtccccatggtggtacggaccaagagagacagtgtgagggaagtaggaattcttgtcgcttttttgaaaggagagtggaactctgtagatacagagcttgtcccagctagttgtggcggcgtctctcattacttgctccatcttgtctttgatccaaatcacccattcttcccgtgtctcttcaggttgttggtttcgggtttggagtttttggcgcatcatgaaggtgaggaagtaccaggtcaacatcggtcgtagttgataatttcttcttgcttttcttcttatgataatatgagggaaaggaagcttcggtccaaatggtagctggggcggcggcggtggtggaggtggtgatcgtcgtttactaggaactgccatttttgttttgttgaagtattttaggagattgagactttgagagtgactggacgcttatattattggacttgtttttctgtaatgacaactaccaatattgacatctaatcatacttatacttaaaatgtgttaaataatcgttaaacgtattggataatgaatgcctaggcgagcgatgtttctttgacttttcttcaactactcttgatagaaacaattactcttattaaaaaaaaaaaaatgttgaggtgctcttatagaaagactacaagaaagaaagtcttaaagaaagactacaagaaaatagtcttataagaaaaaatgttgaggtgtttctttcacttttgtagtttttctataaaagcatctcattgtgccgtgtgccgcgtttcctaaaaaataagaaacatttgtagttaagtattgttagaacatattactattttataaatttgttatcaagttattttgtgtactacactttgcaaaatgttgttgaatggtaatataattatcaaaccacttttaaactattaattctgaaaatcaaataataaatttatattaaaggattagataaattcacttctttctttcgctctaaagtaaccaaagattagatgaaaagaagaacatggttgcttaagaacgaaggtagggcttttgcttcagaacaatgtaagaaaaatagggtttctatattaagttgcagatgatttgaatagaggacaaatccctctatttatacaatatttagacagtttaaggatatgctaaacttttaattatctaaagattgaattttcattccttccatttttcgtgagatcctccttttttaaatggaagtcttctctttttcgatttattcacaatctctctggtttaagtcggtattgtcgaatgtgttaattcatgcaccaacataaaccaccggttccactggtctcattcatagtctaagacttgattattctgagatgttagttatgcttacccaccaaatcaacgtttttagtattgtttttcaacaacattccaaaacccaaaaattacaataccaattttgaaaagaagaaaatagaaaatgatgggaaaaaaaacagaaaaacttaacattccatattagtaaaaactatataacaaaacaaaaaacaaaattaagggtttggcttataataagcataaatagaaaagaaactctcacataatgtgagaagtagcagagcaactgcagcaaaaaatgaaaaatatgcccacggattattaaggttcacctggtacttgtatatcaagattctcttaaaaacattccacctacggttagaaaaacagtctacatcagtagacagtcgagatagatgactattttggagatcaaaaactacttcttgacatagctgcttgaacaaattagattttatacaaacatatgtgagtaatgaataaaaagtaggaaagaaatgaaaactttttagcttaccatcatggattagtagtttgggtatttctagataaccatttttgaattgaatatcccaaaaccggtcagtattccttctcctgaactttacaccagctcctcttagctctgtcacgcaatttaccagttgttgcaatcgcttgtccaccacatacgtattcttagtcaacctcattagtctagatctttgattcggtgtaggattagactggagcagactctgacgaaatacatccagacagtgcaatttgcccttatcgtcaagtatgtccaatgatttttcttgcccgttcatgagttttggttggtcaacttcggtcaacgtctccatgcagagctctccccagatcgttgtgtcgtcgtctctatgtgcttgatcgagcttgtctcttaacgatattaaccaactgtctcctgtggtctcttccgacctctctcctatcacctcgatctcacagaacacggagcaagtctgctcctgactcttatagtcttggtcttgacccggtctggtaatttcctctgtacctccacatctctgaagagtcaatatttcggctaaaccatggaggttttgatctttgactggttcggatagttgattgttggtgaacatgtctttgttgatgagaattggttggtcattggaatgaacattaactaaatccattgttggttgaagctttttcaggaaattgggagagattgtaattgtgagatgtttaatgcaacgctgtaactaatttaaagctgtaacttggccatgtgtttgcttattttttcaatcaacaaaattcttttaaaaagacttcctactcttagataaagactctcataaatgcttgtagtttctttatatatttaacgaatgagatttcagtcatccaaactggaattaattaaaaaaaaggactttgtactcttatacaacgactctaattatatattcttgtggatttgtagtatattcaaatttcaacaagttgcaaaaaaataaaaatactatacaaactcttataccgaggtgcatttatatacactaaaacaaaagtcttaagaaaaaatcttgatccacatttgttctgcttgcttcgttttagaccgtttgatccgctttctccttctgaatccaaagtaaccaactgttcatccaaagagataaatgcaaatcatttcttccaaaattttatttattttataatttttaaactatagatgcaaaattgcaaatcatattttcgtggtagtgtttcggttcaatggttcaggtttagtataccagttccttctctttgattttttttgttggtgtttatcagcttctccttcctagggcttagttttccctttttgggttttaggtagctgtctttgtcactttgtatgagttttgtgtatcctttctgatgtttactgtaaattccagatgacaaaagaagaagaagatgcaaatcatctttttcgaagtttcattattatttttcctagcttttcaaataatcaaacatgaaactaatattatcaacaaactaaattacctttttcattttgttttttgaagcaaatacatgtatatccaatgataacacagaagtaaagaagtaccttactattattacaaatcaaactttaagataagttggtgtattgtgtacaaagaaggagagagagatctgccttccattacatagcaaagttggtctggactttacttacgagatgctctccatacacagctcttttgaaaacttggcatcctcctctccctcccgggtacttctgtttacatatatccaatggctccaccaccgcgtcgaagttagtctgttcattcaagataaaacattattccaaatccaaatgtggaaaacacacaagagtgttgaaagtttatataacctcatagaagaatgcgacacaaacacggtattgaggagagttattgatcactctatgaagtgtggattcgtatactccgtttgaaagtatctgcattttatgattccaaaaggtttctcaaaatggtattcaagagaaaggaagtgagatgggaagaacaaacctttaacatgtcaccgatgttgcaaacaaacgatccagggattggaatggctgatatccactcaccgcccaagtttctcaccttttcaaagttaaaatctgttaaagaggcaagaccacttcttcacataaacattaaatcaaatgaggatcatcataataatattgacctgaagagcagttttgtcatcatcttgattcacaagagttaacaagcctgcagagaaaagtgttaccccattgagacataagcaaaagtttaacttgatttcacttcagggttaaacttaattaccatagtcagtgtgagctccacttgaaacatatcgttgtaagcagaagatcggaaaaggttagttacttgagctgataagtgaaaaaggaggagaagtagcagaaagttaccatccaatatcattttcaggttggccatttgtgaactcagcacctggataaccaataagacgcatcacccaaaaaggatcaccagccatctttccctcgaactcataaggtgatccagcaagagctaaggagattcctctcaaaatctttctagaaagatctgaaaccatatgaaatgaaattacaaactaagaactcttggaaacataacacataagaaacagagaaatggaaaaacacaccacctgtacatagcttaatatactcctccatcaactctttaaactcctgaggattctctggccttcaatgaaaacaccacaaaatatgatagaaatggtcataagactaaacaacataaccggataagacatcgaatataaattaccactggtttggcccttccataactttgcctatatccccatacttcccctgcttaatctctctgtaacactatccataagagaataaaatacatcaagagaattacatggttacattactaatgcctaaaggacacaaaacacttacatcaatggcttcatgaatatctggtattcctttggtcacattttctccaattctctgatatcctctgttcacaataacagaacagtctcaaaactattcgaatttagggggaaaacaattatacacacaaacctgtatccagcagctggagtcattttgattttaagtttctcttcataaggaagcttaaagaactcacgagtgatctctctaaccttgttaataacatcctctgatattccatggcctatctgctcaaaaatcaaatctttttcaaacccacaaaaaaggaacacaacttcgattacaaagctaataaactacactcaaatttgtgtaccacgtagaagaatccggcgtcccgacaagctttatccagttgctggacaacctcggccacaccgacatcctctgccatgtcgggatcatcacacttgaggagtaaacgagagatgtctgcaacatcgtcatgatcgaatttgagtgaagcttgatcagagagtataaggagatttagaagaatttagggtttcgttagtaccgatgactggtaaagacttgaagtccgtcgccatttctctctctatccttgagaatattcttcagatctgtaggtgacggctttcaagattcttcttgttaaactctaaaatatcaaacgatgaacttgctatttttagattcttttgtttttgaccgaaaaaagaaaacttactcaagattctttctttcaagagatttgaatctttcgattgctacagaaaggaggagaagtcaacgataagaaaagtgaaagaggatgaggaagattgttattttgttgttttgggctaagaatactaatgggctgttaagcttagttaggcccaagagagaaaatgtgtaatatgggtttaaatcttagccaagtacttaagatggaatagttaagtgttgttggggttgttaaggtaaggttgtgtaaggttagtggctaaggtaaggttgtgtaagtttgcttgcttgcttgtaacactaaggctaatgtctagaggtaaggtaaaatagttgctaagtttagagtctaataagagaatgggtgtagtgagtagaagaaatctaagtatgcaatgtgtgtgaagttgttttgtacgcaagtatgaatgattaagagggttaaaacatttgaagttgttatatagtcaagatcattgaatctttcgattgctctttttgtatttaatggaaaaataatttagggatcgagatttgaagttttgggttttgaaaaacaattatcaaaatggactaaaaaaaaacgctcgatttttctcttaagtttttcagtttaattttgcttaaaaaggaaacttattaatattaatgtttcaaaattttgtaatgaactttaatttctattgtaacagtgtaactagataaaacccgtgtaaacagaaggtgcaagaaataaatgctattttaatctatgatatgttagttctaaatcgtattcaacacactttttctagttaatttaatattattattttttaattcaatcttacacattctatttcgttaattttaactaaaaaaaagatttattttagaataggtgtatcatgaataacaaaaaatcgtatcttaactatagccaaggaaaacaaaatatatatgaaaaacgaaaatgcttccgatcatcattttatataaaaaactaaataataaataattattcacacacataaaagcattttagttttgagatattttgttttagtgttcagcttgaatgaataaaatattgattttggttcaaaagttcagtttacatttggttatatatatccctagatgtttcatcaaattgattgctttggcctttgagaaaaaaaaaaaaaaaaaaaagagattaaattaaagtcttcaataaatccaagatcgaaaatttacaccagcacaaaaagcaaaacttcaaggaaaaaactttatttcttacaataagcaaatgtacgtatgaagtcttctggcatcacttttaagacaaagacgaaaccgaacgtttcttacgaccattgcaaaactttgtgctgtttttatccatcttatccaacacgtagtgtgcaagcaaatcattagactcaacaagattctctcggcacaagaactcatcaccacaaagcctctcaacgtctctataatagtcatgcacaaacacatgcgtcttcggagtcccgccctttttgctccgagcaagaaccgccgccgtgaaaatcgacgacatcctccccggtccttcgtgagcatcgccacgtggcccgtccacaaagattacatcccaatcaacatcgtagacatgattaggcaaatcattgagacctaatttacaatctgagaagagaagattttgcacaggacgacactcgtttcccgcggcttctttagccgcggtgacgagctctccagcttcgtgagcttttgtcgtgtattgaacgtcgaaaacgtcgatctccgggtggatttcttcgaagtaagccgcgtagtaacgattctcctcgatgaacactgttctaccgttgtggtttaacgacttccaaaggagagtctcgtgtgtgagtccgaaaacgagaagattacacggtggagcgcagcggcggaggacgtcagagattgatttcatctctccgtaagacatgtggaaactatcgttggatcttgacgcgtagtgaagcaaagcgttgattgcactagttggtaagttggagttggagatgggagatgatgctgaaggtgtggatcctccggtgacgactgcagctacggctgcggcgacggaggtgtttttggaagggattgtgtctctagtgtagagaagagtgaggagaaaaactatggtgaagaaagagacgaaagcgagaagccataaacgagtcgtgctcgtttgtttttggatgtaaggatgaagaaggattagttttgtgttcgtgttccctgatccgttcttcattgttcactcttcttcttcttctcgttcctctgttttcttctttagaagagttttagaggaagaaggagattgaaggatggttataagatttctcaaagggataaaaatgagggttgatttaaaaggaagtaagtagtgagctgttttacgaaatgtgagctataagcaaaattttgtgttaacctaatagagcaatgaataaaacattgtgatgtactattttttactaacgttctagaagttaaaatcttggaagttaatttcttttatttttttaaagaagtgtttatttgggaatccattttttcttgaattatttgttatatttatataaacgcaacgtatcaaaatggaatggtggaaactttaaaattcaattttctttaggttcttaattactcgattatgattaagttagtaagctggaaacaacttggtttgacgtccatcgctaattcgctatttatggatttaattgtaattcattatacactagtttttccccaaagagtgtatagctttgtgaaacaaaccaaaagtatagcttgatattttgaaaacagaaattagctgcaatagtttatgtaaaaaagatattaaaatatataaacgatgatgtgtgaggaggttgttgtatgtctaagtaggagagttttggtcattgcgagagacacaagatctaattacagaccaaaagtctctatcccttattgctttggtttagttcttaaggaaacagaccaaaacaacgagatacacacacgcacagattaaacatgaaaacaatttattattttatataaaataacaattaaaaatcatttcgctgtctttgactacccattggattgggacattgataagtatacattatataacttatgttcgtaaattttgaggaaaaacaaactccgaagaatacgtattacaagttgcaggggaattaaaaaaaggagttagttcataatcccttattactttaagacaaaataaaacatatattagtttgtataataattatcaaggggaaaattatactttctaccacaattctaatcaagtgaatccaaatttatttgaataaatactattattggtcatcttttagttacaacttacaacaaatgaaaatctaacaattgcgatgataatcaatctaatttttttttttctttctcttttgttcctaatcactttattgataagctccattttgattctcctcaccatgtttgcctttgggctaaagtgcttaccctactggagtattggtggtcctcatgaaagacgttaataagaacccaattattaaatgtcgcttattctgttgagaaaaaaaaaacaaggtttggcccattcaaaattttgaggtcaaaacccaaaacaccttgccacttgccaagcccaatgctacccctccgataaatgtaatcgcataaatattattttgtatgccgatggttaagagatgatattaatgcgttgagaaagaacaaatgtgatattaatgcgtggagaagaacaaatgtgaacgtacgatgtcattttctttgtaccaatacaaaatttatacaactacgatccaattttgttaggtataatttgcaaaacaagctatgcttctatctcgtgttcgtgtttattttcatcttgtcattgtctacttatagtcttatatgttatattgtctaccacaacaaatcatatcatatgaacacgttacacatggacggtttcgaaatacacattaagggccgatcgtttcttaatcttttgagttcttttatgtatataattcactaaaatcgagttcatttcataatatcataaaaaaatcatccaacacataatatacatacacacgcgtgccacaagattaaacatatttcaaaacttttcagaataataactgacacagctagatgctctgctccgtaacacaaaaacacacacacaaaatgacactcttcttcttctactctcttctcttccttctcctcctcctccgtatctccaccgcctctctcccggcgacgaactacttcgactccttcttaccatccgacgccgtcgcacttctctccttcaaatccaccgctgatctcgacaacaagcttctatactctctcaccgagccttacgactactgtcaatggcgcggcgtcgattgctctcaagatcgcgtcgttcgtcttatcctcgacggtgttggtctccggggaagtttctcaccggagactcttagtcgtcttgatcagcttcgtgttcttagccttgagaataactcaatctcgggttcgattcctgatctatctcctctcgtcaatctcaaaaccctaaccctaagcaagaatggtttctccggtactctttcttcttcaattctctctcttcgtcggttaacagaacttgatctatcgtttaacaacttctccggtgagattccgtcggggatcaatgctctgagtcgactcagttctttaaatctcgagtttaatcgacttaacggaactctcccgccgttaaatctttcttctctgatttcatttaacgtttccagtaacaacctcaccggtttagttccgttaacaaagactctgttacgattcaacgcgtcttcgttttcgtcaaaccctggactctgcggtgagatcattaaccgatcttgcggtttacattcttcttctccgttctttggttcacctaaaccaaacaccacgtcatcaacatcttctgcttcttcgtctgaagcaccggttattcaaagtgaacagaacggtgaagcagcgatgattgttccaccggtggttaaaaaggttaaaaacggttggttagttcttggtttcaccattggtctcgcttctttgatagttctaggtctctgcctcgtcgtgttctcgttgtttataaaaaaccggagagaagactacgatgacgtgataattacgcaacctaagcgagaagaagaaaacaaagaaatcaagatccaatttcaaaccactgcgccgtcgtcgaaaaagcgaatcccaagaaacggagatttgatattctgcggcgaaggaggaggaggaggagaagcaatgtacacagttgaccagttgatgagagcttcagcagagcttttaggaagaggatcagtaggtacaacgtataaagcggtgatggttaatcaaatgatcgtgacggtgaagagatttgctccgtcgaaaacagcgattactagtgatttagagtttgagaatcagatggagatagttggtggacttaagcatccgaatcttgttccggttaaagcttatttccagtcaaatggagagagacttgtcatctatgagtaccaacctaatggaagtctcttcaatcttattcatggtaatgttcttcatcttcttctcctctgtttctttttctcttgggaacgttagggttttagttgaagtcactgagtcacgtaagagttgttgcttttttaggtctagttaattaagtaattattatgttggtctcgatcatattgaggtgatactatgatagagaccattgtctccattataaagctgaaacctttgtctcgttgatgggttttggtgcagcttttattattttgaaggaactctagacttgaccacatagagacaatgacggagtttatgattaaaatatgttttgtctttttctttgttgaacaactgtagatataagacagagaatctgttaggaatctgtgctattttcacgtgaaactctagtcatttgtcaggaatttggtgtgttttgtcttaggacttgagctagagtggcttcttggttgcatattactcgtttatgattggaagtgtatataaacaaacatccattactaaacttatcatctgaatcatcatagtaaaagagtcttttcttttttatcttgtggttattgatatgaatagactaactaatgactctgttttatcccttgatctctcaattacgttttcataaaatccaggttcgagaacatcaaaggcaaagccattacattggacatcatgtttgaagatagcagaagatgtagctcaagcattacattacattcaccaatcatcagccaaattccatggaaaccttaagtccactaacatcctccttggtcacgactttgaagcttgtgtcacagattattgtttaagtgtcttaacagactcatctgttcctcccaatgacccggacatctcttcctataaagcaccagagataaggaaatcaacagatagtcgtcccacgtcgaaatgcgatgtttactcgttcggggtcttcctcttagagctattgaccggtaaaaccgcttcgaggcaaccgattatggagccaaacgatatgttggattgggtaagagcaatgaggcaagaagaagaaaggtcaaaggaagagaatgggctagagatgatgactcaaacggcttgtctttgccgtgtaacatcgccagagcaaaggcccactatgaaagaagtgatcaaaatgattcaagagattaaggggagtgttgtgatgactgaagagaacgaaaaattcctctgatcaagtatgtgtttatgagggttaactggttaagttgggagaaagaaaaagagtattaaaagtgtaaattttcttagcattggaattttcttaatatcgacggattttcgtaataaaagtataacaatattgaatctgttgacagagaaaaaaaaaggctcttgtatatacatacagctttaagcaccttgaaacattgagtgtcggttccacgagtgatcatcctcatcatcatgatgactcttagacatgacgtgcatagtggtctcatcgttctgctttatccactcagagagtttccatggtttctgccatttccatttaaactgaagcagccattgatggtgacttcttttccacttccatagcttgccactctgtcccattttcttcattgctttcatcttcctcgtctcttctaataaagcttctgattctctcaccgagatattgactatacccggcccagtgtatttgagatgctttgttgctcgatgataagtagaagatggagatgatgggtcgtcactagcgttattatctccatagtgctttgatgagcttcttgaacttccctgcaacaagtgaaattttgcatacgtttttaaggagaaattcccaataaagaattttggatcttagtgtggaaatatggattaaatttaaaaaccgagtatgatgatgatgttgaagccagcgcaatggacactgtttgctcccttgtctttttctctttaaggatttctcggttctggacttcggttagttgtaataagcagaggaggtcattgagctgttccttcttctctttgatgtctctgtctttctcccagattttggacctgtttgatgtttaaagcaagaccaaatcaatcttccatttcatcccaaagtttgtatttttactgagtttattcgggtgtaatagttgttaccttgcttcagcagtggaatcaaacacatattgaagcaaatacttggcatcagtcatggactgaatgtggttccaccgaggcttagcatgtaggctatgctctctttcctctgcttctgagagctgagagcccatggctgtgagagcatttgaggaaacatccaacatactctcaagagaagctattctctccaatcttgtgtttggtgataaaaatctgacgcatacacaaaaataaacaggtcataaagtgaaatagtccactcccaaacaacttcatagtttacactactgagtcgtttaaagtatattgttgtacctgaactgtccatttttctcttgatgggaatttgaaggaaactccatctcttgtctcaacgatgttaactctacagccagtgcagctcgtctatatgcaatcagagtggcttattgattagaaagaaatttgcagataacaaacatgactgaaacagatttttgaagacgcacacttgaatttgcttttcatattgaaaacgaacttgatgtacttttgccataacctctagctcgttatccagccatttccgaagagatttttcattcgtctgcaaagagtaagaatttgttacagttgatacttgttgcaaattcataactgaattaggaattcttatcacctgtcgacttggtggttggccattggcaatcactggaaaagaaagcaaaggattatgatcgaaacaagaacaaaataaagtgtgtttcggaaaactagttacctgatatatcatgaggtgaagacttgcgggcttctagcagctctttaagtcttttggtagccattgctgcttcttctgtttttctctgaagaacctgcaagacattaagatgcattttctcttgagactcttatgtttctctcaagcgggaaaaaagacaattatatcataagaatctttaccattttctgacgtcgattgagagcttcgagtttgagtctttcatgctcagtttttcttccttctttcttaagctacccaaaaaacaattaaaaagtgtaacatgagatcagttcaactaaaaaaattcaacggacaataaagaggtgatgaagatagagataaagtacctgcaacaactccttctcttgagaagctttccactgccggaattgttcagcttcttgtttcatcttctgttgtagttgaacctggataaaagaaaaaaaaacagaacaaaagtcaaaatgtagatctagattatgtgatatagtaatatagaaaaatttcgatagcacacgcaaccttttgagccttgatgcattgtatttcagttttcaaacgctttgctgcatcttcacttttttgcttttgttttaagacctcaacttgattttcttgtttcttcttaagatttaaaatctgtgtctcaagtgcttttaatttgtgtgcatggttatctcttgcaacttgtgcttgtctatcagagctagctgcaagttcctcaacttcagccaacaacatatctctctcatcctgtagatgttactcatgactcgggtattagaaacatacataaaatatcaacaagaaaaattagaatgttagtttcacctgtacagttcttttctctttctcaagttccatcatttttttttcgaaatgttgtctgatagtttcagttccaatcccacatactctcatctcggactgcatatattaaatcataagattttcaaaataatccaatcttagtcattaggcacagaaattttcaattgagtattgactatacctctttctcctcaagacgtttacttagttcatttagttccttgcccatgctattctgcctaagtgcatgttcccactcttctgctgcaccaatatcttcagaaattccaccttgaatcaggatatttcaggctaaaagtaagggagaatgcagaatgcatttcatagaataagtttcttgagaagacagtgaccaaaacctgatgttgcttcactcatttcataatctgaatccatgctttcgaaaccccttttaaggccatcatcttttgaaaaaattacaccatcttcctgaggtagaacaactcttgttttcagcagtgaagaaatgtgccaaataaatctattgtggttgcctaatgtatacagaaattacctgtgcatcaatattgcaataatcaagagtcactctcttgctgcgatagatgtgaagttctcgagaaagctcttcattggcagactctagtttcatgattttctctcgcattacctttaaaattgaaatctatactattattgatgagaagtttataaaccttttgaagaatatcagcagaagttatatacctgcacttcctctgatgaggttgccccacgagcacaaagtgtagcttgtagatattgtagctcttgacgcatcttttgcatctcagaacatattaagtctttattggcctgtgcacccaaataaagaagcctttcctgttagtgctccgaagtgaacaatcttagtcctgttttaatctattttttggcctcatgtactttttgtgttagctgatagcctgatagtggagttctgtatgcagaaaaattgaaagctcatctaagatagttccttggtacttacaacaggtttgttctggatattccgagcacgatttgcatacttgagcgtgttaagagtttcctcagcattgatgtcagcaggactgatgcaagctacaagaataacacaaacacagagagaagttgaatctgtgaactgataagagatttccaggggattacctcatacaactaagaagtttacctatcatgactgttttactatttccaccaagagaatcctgcagtaatgtaaaggacatctttaatggaaaatttgtcacatgaatcatatgtatgtatagttaaatgccagtaaagatactacagtgttacaaatcatatgtatagttataatatgtacagtgttacacatatcaggatgtagaagtgcaaagatagaaatgaacctgcaataaccgagtaagtttactatcacggtatggaacatgtgcaccttcttttcgccttttctcatccccaagcgcactgataacattaccaagtgcaagaagtcccctattgatgtgaattcctgtttcagagaagaaagaagaatgtcagttaacgttctcaagaggattaaaaataggatgcttagtttttccaaccttcttttaatcgaacaccgcctgaacctgttcgtttagctctttcagatccagcaagatctaccaagtgaagcttggcacaacaatattcctcacccatatcttcatctacggtgtctttaaccactgagattgaagatatcttgcgcatttgttctaaggtaatcgtgaagatggcatgtgaccgactgtataagaagaatataactacattttactactggctaagcatcattaatggtaactttaaagctatgtcttgcttcttatggagcatgggtatagagatacacacctcgactcattattcatattggtgctcccagttgccctggttagagatccttgctctaggcaggaagccatttcttctttagtagctatgggaacttcagttgcaccggatagtgttataaccccgtttggtgattcacgaatctgcaccggtgacttactaagaacaaccttcccaggggttccattggctagtctgttaaacggcacactactatccagcaaatccagaacttcttcttttaaaatctacagattaagatttcagttaatatccatacaactataaatctagacaaattaatctagcaaccaacctcgatgaaagagacatgtaactggaaccccatttggtgctttactgaatcaattttgttgaacaaagcactcataacttgaggaatcagcccattttttgtaccatctttaataccagtccccatagtgtatgtctttccagatcctgtctgcatcatttatgtaactcaaatagaagaaaacacaagcagctaaaaccaaacttttttttatgtacctgaccataagccaagacagtagcattgtatccatgaaacaaaccatcaacaagaggagcaacacattcttcaaacatcaaagaagatggagaaccattacttccatatacatgatcaaatgtaaatggatgtgttcccatttgcacctatgcaccatcaacaacaaaacaaacaagaaccttctattatcaacccataataatacagacaattgcattatttatttatttatatatgatgtaaaaaataaaaacaattgacactgttttataagaagaaataaaattaaatgagtgtgtcagagttagaacagagatttgatccggatccaggaatagcgtgaacaacgacgaacgcatttaaacaccatcggagaagaaacgtaaacgacggagaggagacgaaactgactccattcagaatgggaaaactgacctgaggagttaccggagaaacagaaacgcattccctacaaccttgagttacttcatctccgatcaaaggacgaacgttaaccgctactttaacacaacaactctccgacgacaacgacgacggaggagaagaagaagaagaggacgataaggaagaatgtgattccatcgaggaatctccttttcttcgacgagtatgagaagaaaagttgaatcagagtctcaatttcgtcttgttcctcgggagaagaaaaagtgaagaagaagctttactctcttcactgatatctctctggtttgggtatacgaggtatctttatatttccttttgtgccctccacgagactctaaatttactttttttgccagccacgtcagcttcttcttcttcttctattgacttattcttatttaatccactggtccgtgtgtattgaaacaagatcggatttattattatacagatctgtctaccacacttttattattcatataaaatacagtaatgttgttggttttatagacgagttaaattaattatggtgcgtgtaaatgagacaactgggtgtgtaaaggtcgataattccaaagttttggtagtttccatcgtctctttaagttaacgacaaaaattattaaattacgaagagtcaagacattcgtttctggtccttcttctgcgcgggaaaatcccaacagtaaaatacagatacagaaattatattaaaaacaaaaatcccaaagtgtagggaccgcagtacgctctatttgggcctttattgagccctacctcacatgtctatctgcattgcagaattcatcacttggtttgtatccgtttcctttatccatttttcgatctttttagaagatatactaagtattttcagtggttttggaccttttggcttttgatcactggacggaaagagagaagtcatgaacataagaaaatagtgaaatcatcaaactattgtaattggtaaaatgagctgcatattattgaatgttagtttttctaataatggtcattgtacgataaagttaactaactctacacatttctgcttaaaaccatgattaatcatgatagctttgaaaaacgtggctatcttttcacgttttatttagtaagatttgtttagattgactcaactcttaacataaataacttaaatgacacacgtttagtttcaaaaactgtagtaacccatatctttggtaaaaagacgaaataaccttaatgattaattgtaatcaaattaaaataaaaaataaaaaataaaacaaatcttttatattttaaagcacaagtcactccaccaataaaattttgacaaatcagcaaaaccaaattatttttcaacagaattataaaaggaaaatttgcagatataacttaaaagcatttataaattaacaaactaaccaataaaaacaacctaacaatataacatatgtaatatatattattacaattttatccccaccactaacaccactaaccaccactacaaccaccgctgccggataaccaccgccgccggccaaccacctccgccgccggccaaccacctccaccgccggacaaccacctccgccgccggacaaccacaaccaccgtcgccggaaaaccgacgccgccggaatcaccaccataacgaccatcgccggcaaccaccgccgttgccggaaaaccgccgccgccaccgccggacaaccaccgtcaccatcgccggacaaccaccgccgccgtcgccggacaaccaccgtcgccggacaaccactgtcaccatcgctggacaaccaccgtcgccgtcgccggataaccgccgccgccggaactaccaccataaccaccatcgccggacaaccacctctaccggaatcaccaccgccggaatcactaccgccgccgtcgtcggaatcaccatcgccgccgtcgccggaaccaccaccgccatcttcgctggaaccaccaccaccaccaccttagatcattttacctaccccttaagttacttacttaataattacatatatagtgctatattcttaatttttctctcaaaaagtattattcatgcaaatcacccattataaaatcaaaaaagaaatcgtggataaaaaagaaaaccaaaacctatattacataattaaaacaaaaacgaaaatccagttaacttgagaacaaactttttttaaaataataattttgaacaaaatttagataaagaagaatcttcttcacatatttcgtttttgattttaaaaatattaaagaaaaacaatttaattttgatattgcatattataaattgacttgttttagcttaccaataatattttgacatgtatcaattcacaaataattgatttgatggtaggaatagaagaagaaaaaaaacggttatgaaaacccttggagaatttatcatgactaataaaattcattaaaattcaaatatgacaatattatgtaaaaatctgccgacattaataaaagtctgtcgtgacgttatgaaaatttctttttcaaaaaaaaaaaaaaatctagtcaaaccggatttaacatacaatcagaccggaaataatttaattgagggctagctaataaatctcatataacaaaaaatttcgaaattttaaaaataaatctgtcaaaaaaagtctgttattactaaaaaagttattctagtcataaacaaatcggccataacattgacatgagtaaatctgttatgctttgacactgaaaaacaaaactgtcatcactaaaaacaaatctgttatcactatgtgactgtgtagtaattttattttttaacaaaaatctgttgtaaaacaccaaatttgttaacaagttaattaaatctgtgattacacaaaacaactttgtcatgcctatataacatttttcgaggttaacaaatctgttataacacaacagatttttgggtgcaaatagaaaatctgttgccaccataaagaaaaatctgtggtccggaaaacaaatcagtgacagatttggtttcaacattcttacttttgaaatttaaataaaatctgtggagactatatgaaacaaatcagtcacggttaaaaaatctgcgaaaaaaaaaaatctggcgtaacataacacagtaaagtctgtggtacaaaacaagtctgttgtaaaaaatctgtggttgaccaacaaatctgtgatcgataacaaatccgtcgcaacaagagccacagatttaccaaaaacgacgatggcattttcgtaaataaatgtggttttattgccttgctggaattaaatagtaatggcatttctgtaatattgtttttctctgtaaaggaaaacaaggataatttaggtataattattactcaaataactcatatttttagcattccttttgggtcattatgtataaaatatgggttactctagtaaatttcccttttatttatcccctcgctaaaaccatttccaatggttgtttttatttattcttgtaaatatagaagaaaaaatagagatctgatctctattttagaaataaaaatagagatgggttagagtgaaatagatgaaaaatagattataaagattaaaaaaaagatgagttggagatgccctaagttaaacttttaactaccaaggctaccataggtgaattttagccgaagaatatccatttaaaaaaaagtagaattgaaattttattttaattggaagttccttgaggttaaagaaataaaattcctccgttaaattaaatagaaaatatagaaaatcaaatttctctgattttaaaaaaattaaaaaaaaacaaaaaaaatcaaaaacaaccctgaaattttgaaaagcccagcataaaggcccagtataaacaaacgaagacccaaatctttaacaaagggcaaacgagacggcctcccatatcggaaaaaaaaatcatattgtatatagaataaagcaaatcaacagagttagatataaacaatttttaatctttctccagcctctacttttcaatttgtctccctctaaatctatgcaatttacggtcaaaatttgagagtgcaacaaaacaaaaagagtaattttttcttgtacacaaataacgttaaattgttcggttaggtttctggtttttgagtttttctattcatctagtcatccaccgtcaaaataaaaaacggcgacaaaacagagcatgagcatcttttcctgtaaacgttaaccaaacaagtagtactactactattgttaacacgacaaaaacacaaccattggtcaatcctttgtaattattataacataatggaaatgagccgccctcgtgtataataatccgaacgtaacacacaagtcccggaatggaatccacaacaataaaaggcaataccgaaactacccttgatattatctttgtagagaagcttccaaagatggacaaaaggtttacgtgaatagtagagagggacaagttgggcaatatgggaatacgtatcatcatttacgtaaacacgtaaaagtcaattagtaacggtatccagccaccgactacataccgaccatgagtcccattatatgtcctcaatcctcatcaatctccttgtttatatatatagacgcgtatacgtaggcatatatgtcatgtaatacgttatacacatctatcgaataaacatattatacgtaaaaatcgaccattccatgttttttggttatagtttaaataaaaacataacttttatgatgttatcgtttactcacaaacaaacaaaatcaaactctcaataatacgatgattattccatcattatacaaagtcatatacgttatcttgttatattttgatttgctcttcattggtaaatatctgaaaaaaatatcgggtgaataaactatattatttttattatcattttattattcaaataaatttaaattaactaattagattatgtcaaaatatgtttgtcagaatatctcagaggttttaggcagagaaacgttctctttttccttccttttctattttttattattattttaattataaaaaacaatgagagataccattaatgaatccaaaaaaaaatctatctatatatgtatttataaatacttgaaaatattggatcctatattcaattatattgttctaaaaaaggacgagtatggtatctccactccgcgacttttctctagcttatcacaaacgtaattttctcatcctctatatctttaacccaattttagttttatactatagtctatatagtttcatgttttttttatatatagtttcacgtttttaataataactaaattttaatccgcggtacaccgcgagaacaatttatttttaaaagttagtatacataaaagtttgcaaattgtatctatctataaatatttttattttatagtttacaattgttattaagtaacgtcctgccaaacccgtcccgccaacccgtcccataaaaaaatcatttattttattaatgttaatcttatttatgatatgtttatgaattattgtttaaatattttgtaattttgtaataattaaatgttatcaaatatctctgcggtttgatgattataattgaattgttatagtcatggagaaaaatatatcaaaaatgataattttgtagtaaataaatgatattaaatattttggaagttttattttagtaactaatcgtgtagttaatgtggagagatttaaggaagattgttaaatgtcaaatatttaattcgaagattttttttctaattatcaaaaacaaacattaaaatccagtgatagttattgtaaataagtcctaactatatgatttatttcacaaaatggctgcaaaaatttcaagtttccaactataattcgaagtcggcatggacttttggaattttctcctctacctacaactgcaacctcggtctctttctctcttcacatatataagagagtcccttgatcaagaaaccagataatttccccaaacacaattctaaagtcctcctctcggaaagtaagagactcaacttccgagccgccatggacgccggagtagcagtaaaagctgacgtggcagtcaaaatgaagagagaaagaccattcaaagggatcagaatgagaaaatgggggaaatgggttgcggagattcgagaacccaacaagcgttcaagactttggctcggctcttactctactcccgaagcggcggcgcgtgcatacgacacggctgtcttttacctcagaggaccaactgctacgctcaacttcccggagcttctgccgtgtacctccgccgaggatatgtcagcggcaacgatcaggaaaaaggcgacggaggtgggagctcaagtagatgcgataggggcgacggtggtgcagaacaacaaacgccgccgcgtttttagtcaaaagcgtgactttggcggcgggttattagagcttgttgacttgaacaagttacctgacccggaaaatctcgatgatgatttggtgggaaaatagactgaaaaataataataaaatatcttacaatggtggctgtagctatcgtacgcggaatgcttgggcttgtgttatatgactacgtggttacggaaagattcctctgtttcgtcattgtattaaaatttaatcccacaagtcaaacatactgtacattattcttaatttagtattttcttattaatatctatcatttgtttggtgaacaccagaatattagactattaatgtaacgagtttttaatatttcgatcataataacaccaagctagttaaaggttaatatcttgttacgaagtcttgagtaagttcaattgtcatatatatgtaacggaagaggttcgttcgggtcccaagtgaagtggatcaaaggtgacttcacatgagaacaccaaaaatggcaggaggagaggtagttttagtttgatatttttttctttaaagatttttgaaatcttgttccttagtcctagttattttaacgagaagcctctccgatgaattcatagtaattttgatcgtgagtttttgtacatatatattcatagtaaattttaatgtatttagaagctaagtttttttttatcattacgatattacgaaatatatgtcgtaaagtgatagattgacaatgaaagaatgaagacaaaatatttaaatccttacggacataattggataggattttccttctgctttttggcatgtggtgggcagtgggcactactattttagattggtcgtttttccttcacaacttcacttggaacaccaaaaatggcaggaggaggggtagttttagtctcctcgagcattgttcggccagtaaacagcagccaatctggtcgaactaagatccatcttactccatttgatctaagtcttcttcaattcgattatcctcaaagaggtcttctcttctccaaacccgactcagatttccatctcatcatctctcgactaaaagactctctctcactcgccttggagatctacttccctttcgcgggtcgtctcgtcaaaacagagaatcttgaagacgatacggtgtcatttttcatagactgtgatggctctggcgctagatttctccacaccgaagcaaaatctgtctccgtgagtgatattcttcagcctgatggttctgttcctgatttcttgaagtacttctttcccgccgacgatttcaagagctgtgatggtgtctcgttgcccttgcttgttatacaagttaccgagatgaaggacggagttttcatcagtttctgttacaaccacatggtggcagacggtgtttccatgtggagttttttcgatacttggtccaagatttgctcaacaggttcatgtttcaattacaagcctcttgttctcaaagggtggttccttgaggggatcgattacccaatccatgttccagtttcagaggcagagaggtcaccaccaagccgtgaaccttcttccgtgcccattacgaaagaatggatttttcacttcacaaagaagaatatttcagatctcaaagctaaagccaacagcgagattgcctccagtagtgacctagaagtttcatctcttcaagcggtttcggcacatatgtggcgatcaatcatcagacacagtggtgtgagccgagaacaaaagacacattgcagactagtggtggacttgaggcaaagagtaaatccaccgcttgagaaagattgttttgggaatatggtctatctttcatcagccataaccaccgtggaagagctcttggatcgtggtttgggtgaggctgctttgcaaataagaaaattagttagctcgcaaacgaatgaaacttgtaaaagttttgcagaagattgggttagaaatattaagaacctaaattcaggcattggcagtaaagtaggtaatactatagttatcgcaagctctccgcggttcgaggtgtacaacaaagatttcggttggggcaaacctattgcaattcgagctggaccatccaatagtatcaatggcaagctttcagtttttcagggaatcagtgaaggaagtattgatgttcaagcaatcctatggggtgatgtaatagtgaaactactagctgatttggaatttttagagcatgtaactattgcatgattgtttcagttgggaaataaaaatgataacaaggacattgtctttggcttcgagtgactgtctattttctctttgaaatgtattctattgatccccaagcacaaataaagtgtatagagctgaaacaaaacaaaactgtgataagtaagctttaggagagacacatctttgagttcagcgaccaaaagaaaatacctcattcactcattgggcacttcaaatcagaaacataaaatgggccattatcatgtcatgtctggtcagagcacttatttgctgcctttcaataattgccatttttaaacacgttttttatgttacaatacgcaaaaaggacaacgacaacaaacaatttttgaacggtctttaagtcgtcgtacacaattctttaaaataaatagaatcttgtaagttgttggctgtagaaaaatttccttatcttataatgatggtaaatatatggtctatgttaaatgatggtacacagagatggtgtcacattacattaatattgttttcaacttccttatcttatataacagtcttgagctttggctttaaaatacagaacaaaaatggccgacgtaacttttatttcctcaagcattgttcgacctcaaatcataaaccaagaaggtcgtgaaaagatccatctaactccatttgatcttaatcttctctatgttgattatactcaaagaggtcttctcttccccaaacccgacccggaaacccatttcatctctcgattaagaacctctctttcttctgctctagatatttacttccccttcgctggtcgtcttaacaaagttgaaaatcatgaagacgaaacggtgtcgttttacatcaattgtgacggctctggtgctaaattcatccatgccgtatccgattctgtttcggtaagcgatcttcttcgacctgatggctctgttcctgactttttcaggattttctatcccatgaacggtgtcaaaagcatcgacggcctctcggagcccttgcttgctttacaagttaccgagatgagagatggagttttcatcggttttggttacaatcacatggtcgcagacggtgcttccatctggaatttcttcaggacttggtcaaagatttgctctaatggtcaacgggagaatcttcaacctcttgctctcaaaggattgttcgtggacgggatggatttcccgatacatattccggtttcagacacagagacgtcaccaccaagccgtgagctttctccgacattcaaagagagagtttttcacttcacaaagaggaatatctcagatctcaaagctaaagtcaacggagaaattggcttgcgtgaccataaagtctcgtccttacaagcggtctcggctcacatgtggcgatcaatcattagacacagtggtctaaaccaagaagaaaagacgcgttgctttgtagcagtggatctaaggcagagactaaaccctccgcttgacaaagagtgttttggtcatgtgatctataactcggtagttacaaccacagtgggggagttgcatgatcagggtctagggtgggcttttttgcaaataaataatatgttgagatctttgacgaatgaagactatagaatttatgctgagaattgggttagaaatatgaagattcaaaaatcaggtcttggaagtaaaatgactagggactctgtaattgtgtcaagctctcctcggtttgaagtgtacgataacgatttcggttggggcaaaccgatagcggttcgagctggaccgagtaacagtattagtggcaaactcgtgttttttcgtgggattgaagaaggctgtattgatgttcatgcgtttctattgcccgacgtacttgtgaaactactggctgacgtggaatttctggagaagtgtggctagtgtatgatttgattggttgagttattaaattagtgtttttgttgagttattgaattagtgcttttgttattgtctgctaggttatgatatccttcaattattgaatttattaatgttgctaacagttctgtgtttacaaacgacggaccatacacatgcttgtttagtggaaaaaagaagacaaagacaattattgaattttatgtttgttatttactttgttgtcacttgtcagctagtagtttttttacgtaaactagtgcttaattttaaagtttgttatggggcggtgcgtaagattatctttgtcttaatttacctaattttaaattacgtaagattggtttatccacatttatgtagatacaatttataaatgtaacacgcacatgttaaaagagaaaaagaaaaggaaaatcatcactcattggtgagtatacaaaggccaaagcacattagaatatgtgagtaaggtgcctcgattagaaaaattggaatcttcattgtaaggaaaatagaaaagagaaaatgactattgtttttgtctggctcacataggttttatatatggcagatgtgattcagaattcccactagagagaagaaaaaatggcagatgtgaccgtaatttcttcaagcattgttcaaccccgaagcacaaaccaatcgggtcggacaaagatccatctcactccatttgatcttaaccttctctatgttgattatcctcaaagaggtcttctcttccgcaaacccgagcctgaaacccgtttcatctctcggttaaagacatctctttcgactgctctagagatctacttcccctttgctggtcgtcttgtgaaagtggagaatcttgaaaacgacacggtgtcgttttacattgattgcgaggacgacaattaggtgccaagtttgtctacgcagaatccaaatctttatcggtgagtgatatccttcaacctcacggctctgttcctgatttcatgagtcatttcttcccatctatagacgttaaaagtatctacggtctctcggagcccttgcttgctttgcaagtcaccgagttgaaggatggtgtcttcatcagttttggttacaatcacatggttgccgatggagcttcgatttggaatttcttcaatacttggtccaagatttgctcaaatgaatacgatcatcagaagaatctcaagcctcttgttctcagaggatggttcctcgacaagatcgattaccggatccatattccggcttctgaggcggatgccccgacaagtgatgagatttctcagatgcccacttcgaaagagagagtttttcacttcacaaagaagaatatttcagagctcaaaactaaagccaacggtgaaaccggctcaagtgacctaatcatctcgtctttacaagcgctttccgcacatttatggaggtcaattatcagacacagtggtatgaaacgagaagaagaaacgcattgcaaagtggctgtggatttgaggcagaggctaaaccctccgcttgacaaagagtgttttgggaacgtgaacaatctcggggtagctactgtcacggttggggaacttttggatcatgagattggttgggctgctttgcaaataagtaaaatggtgaggtctcaaactgatgagaagtataaaacttttgctgagaattgggttaacaatgtaaagatctcaaaaacaggtgatggaagtagaatggtttgtgattctgtggttgtctcaagctctccttggtttgatgtgtatgggaatgattttggttggggaaccgattgcagctagaggtggaccggggaacagtataagtggtaagcttgtgcttttccaagggattgaagaaggaagtattgatgttcatgcaaccttatggtgtgatgtacttgtgaagttattggctgatgttgaatttatggagaatatgtaactgttacatgattgtttggctgagaaataaaacatgtacagtatttggctaaaaccaagcttagatgctactgcttgtaagttgtgatttattaggcctagaaaaataatattgattttggagctttgcataatcttatggattctgaaatttttatcttaattctattttccttaactttctttttttctttccatttttggttaccctaatcgacaatatttcagagtgggttgaggaaaattaattttatttcccaaatccaacgaaagttttccaatttttttttgtttcttaacaaaaaaaagagtctcctctaatttatgtgttataaaaggtaaaacttcttattctttatatttacgtttccatttcttttcaaacatttcaatattgacggctaaaacatcaccctcgttttatattagcctactgtaatatcattgagttttgatggattatggatgtatttgcaaggttgtttgagaaaaaactgatgtgttaattaggaaatcatataaggtttgtttatgtgattgtcttttgagttgagcatgaatcatcttcttcgacgatcacaagtcggtagcttgttgaggatttttccttgtaggttttccatattgcgcttccccaaaactgtttctttgccgtttggagagcaagagtgaggaagatttgctccgggagcaggagcgcaaaagaaggatagaaaaactacggaaatttatgcggccccggacagaactaagaagcatttatcagcgcgagaaggacggtgaaaagatggaatccgaaggagtaccgattcacaagatgttagcttcttacatatatgtatttgacctaaatggaattgaaaagtatttgaacaagttagaggagaaaagaccaaagggatttgctttagatatgctgcgtaagtcagagccgttactggttactaatgagtattacaatatcctcggaccatttagagtctttcggattctcagggaaatgtataagcgtttcggagaaaaggaagaccttacgccgtttgtggaacttagctaaggacatgaaagtgtctaaggacatcaatgaatatagttgcatgattctggcgttgtggttgaaagatgatatcgaaggggctcacgaacttcttgaagagtgggataccggagagcatcatctttccaaagtcaagctaaacgatattctgggttttgtttactgcagaaaacttgtaatacaaggcaccgagttgatggtgaattatatgttcgaagaacataaggaagaggaggagaagaagaagacggcaatggaggtgaggcgtaacggatgggaccccaagaaaaatcttgcattgtctgcgtacgcatgtgttcaatatgtggagggccagagagacattgagagtacagttgatgttttgagattgttggggaagcgtgagccacaagatgctattatggatgaagaccgattgagtaagaaaatggtagaggcaatgagaggaggaggatacgttggtgatgtttgaacaagatgatgataattatagtgaagatcaggtatataaacaaataccaaaacgaatatcaattgattagagatatacattttttaattttgggcgattatgttttcgtttgctacaactacacacgtttgcgctaattgttagaccagcctaactcaacttcgccacataaatgaattttaaaatatataaggcgaaatgtttttagtagaaaatgtttgtatacgagtttgaaaattcatatgattgtttaatgcttaacttatggttgaatatgtcataggactcatatctatggataattgctataattacagttgggtagtggatgatgttgattgtaaaggcttctcttcttcaaaaacatgggaagcttttgaggccgagagaggaggaaaaagactagtctgcttctataggatttacaggagtagtccctaccacctaaacagattgtatcatcatcagaatttgccttatgctctgcacaaattgaaacaaagggatcacttgctgatttgttgtgattacttctctctaaatggtgattggtattctcaagattaagcctcaaccagcaactgctctgctgttggcctgaacttctgtcctggattcgatgaagctctccaattgctccatcaatcattaggaaaattgctgttcaagcttcagtttttcacatttgaaaacaaagaaacaacgtggtccacaaccactcaatctggctcatcgattatcttcaagaacatctacagcgaagtggataataccattacatcgacagcgaagtggataataccattacatctcgaagacacattggagaaatttaatgatcctttgaatacaatagcctcgctaaacctaatatccaaactcactcccatagaataaggtgaataattacatactatagaagtctaggacataattgggatagaaatgtaaattcccaaactttggtgttttgaaattaaaaatggttagtatactgtatacgtagtgattttgtctgtcatgagatctccttgaccctattgtctgatatacttgttgtaaatcactagttgatgttgaatatgtggatgcaaaatcactagttaatataatattttgataccgtatcaaactaagcgacaagagtatcatcaattcgtcaaatgcacactaacctatacatataatatccaaacctactcccacaacataattggtttttaaacaatccccattaactacttcaagacgtcttaactaacccgaaagctttgtaaccaatgatcaatccccattggttataaatttgtaaccaatgatctattttggcattacaaagcttttcagtattcttgtgatcttgtcttgacgaaaaaatggacgatgtgaccgtgatttcttcgagcattgttcaacccggaaacgccaggcattcgggtcgggaaaagatccatctcactccatccgatcttagccttctctatcttaattaccctcaaagaagtctcctcttccccaaaccctacccggaaacccggttcatctctcggttaaagtcctctctctctacgtctctagagatctacttccccttagctggtcgtcttgtcaaagtcaacaaccatgaagacaatacggtgtcgttttacatcgactgtgacgacggccgtggtgtcaaatttgtccatgctatagccgaatctgtctcggtaagcgatatccttcaacctcatggctctgttcctgactttttcaggcttttctttcccatgaacggtgttagaagcatcgacgggctctcagagcccttacttgctttacaagtcaccgagataaaagatggaatcgtcattagtttcggttacaaccacttggtggctgatggttcttctatgtggaactttatccacgtttggtcaaagctttgcttgaatggtcagtgggagattcatcagcctctagtcctcagaggatggttcctcgacaacattgatttccctattcatattccggcttcagagatagagacagagagggcaagaaatcgtgaagtttcaactaaggagagagtttttcacttcacaaaagagaaactttcagatctcaaagctaaagctaacgacgaaataggctcaagcgacataaaaatatcatctcttcaagcagttttggctcatctatggcgatcaatagttagacacagtggtctaaaccaagaagaagagagtcgctgcggagtagcagcagattttaggcagaggctaaaccctccgcttgataaagactgttttggtaatgtagccaatcttgggttaactacagccacagtgggggatttgctcgatcgtggactgggatgggctgctttgcaaataaataaaactgtgaggttgcacacgaatgaaaactttagaactttttctgagaattgggttagaaatggtaagatcccaagaattgatgttagaagtagaatgggtgatcatggttttatggtcagtaactctccttggttccaagtgtacgataatgatttcggtttaggtaaaccgatggctgttcgagctggaccggctaatggcattggtggcaagcttgtagtttttcgagggatcgaagaaggaagtatcgatgtccatgcgatattgaccttatcgttatggtctgatgtgttactgaacttatttgatgatgttgaatctttggagaatgtaattacatgaatgtgtagtaaacttcttggatgatgttaaatatcatagttaagattttctatcttaattaagtgtctattctgtgcactaagagcaccaccatcgatgacacatgcacttcagagtctagccaataaaaatattagtttttaatacagtttcatcatttaattaatcgtttagttattgaaaaaacatcaaccaatcaaggagtgccaaatgtagacatgtgtttctggaaatgtctttagagcatccacatttattggtttttaagaaggaatcctttaaattgtttattagttaattttgatagttttgtagtttagagtttttgtagagtttttgtaatttttattgcccaatgatgaaatccttaagtgggtttcttaaaaaagtatttttagaaaagaaaattgttaatattcacactagtcatgatatattctgaatagcttttaagaaattggattttgagaaagaaaagaacaatatttttgcattgtgaatgtgaagtagaaacaattaatagtaaaagttgtgaatggagatttttactcaagaagactactacttcatgcaacttatcaacgacctaccacggcatcaccgccatttgcacatactcatgaaacatcacactcctacacaagtcatatgagtttgatacaaatgttgtcatggtccaattagtcctcttatgtgcactagttagctaacttggactgcattccatcataagatgtgcaataaggtactccaatttcttattatcagaagctagtgagctctcagtccgcttggccaacaaagggtcaaacaaaaagctttgaagagtttccaaacagtaagctacactgcataactgaagctacatggcctagatacagagtgtgtcatatgtctttcggagtttgtatccggagagcgagtcaagcttcttccaagttgcaccatggattccatgtccggtgtatagaaaaatggctcagttcacactcatcttgtcccacctgcaggcactgcctcattcagacttgcaagaagatagttggctgcagtgagacagtatcatcacctaatcaaccacaacaaaacatgcatatagcaccgctaggaccggaatcattataacatgttgaatagacaacaacaatatgaagcaaagtcatatgcaaacgaatcacagccaaaacaaattcgggaccatatatgaatttcaacaatatgcaagtacacaaaacgaattttgattctacataaagcaagagactttgagacctagccctagaacccaaaaccagctcactactttagattttgtatcaaatttcaaaactcactccacagtacttgacttcaacgactccccttcaacacagatacaaagaaatcatgataaagacacaaaagatctaacctttttaagggcaagagcgagagaaatcatgatagaaaattctctgtttggaatttagagagaagccaagacactcttatatgagtatggttcgaagaatggaattggtgaaccaagtcgtcgatgatttggctcttctctcccgatttcatgctcgatacgtcggagatcaaatcgattcgaatcgccggccgtcggacaaaacaaagaagtgaaaaacgagaggaaaaaggaaaacatgagtgttgtaattttttttgtttttcgacgacttacagtcagtcgaccacgtcggcgtctctaaacccatccaaaaaaactaatattgggatcgatcctaactatttagttgggttttcatttagttttggacttttaattagctagaaactcattaaaaactgccgatggacttgctcttagtgtatgtggagagacatcatctttctccgataaactttatttttattctttttttattcttattataattaaagacatcctcattatttgtccaatgaaaatgctctaaccgaattagaataactatgaatttgataaatttttatctcttgattagattcctttatgttatgtctttccctatctgactcacaatactcaacaactatctgactcacaatactcaacaactgcgcatatgaaaagcttattagaatagaaactcttaactgcgagagaatatatagagcttcaaaatgtacatagacttgcaccgacctaagtcaaatacacaatcacttttgaattgaaatgggacaaacacaagatgacgcaaacacaaaatcatatatatcagtttgaagccattttgtgacacaagtccatactcagagatgaagattttctaatgacaactacttgtattggttcttaacttttaaaccaaaaagtacttttttcattgggtcacattccataagatattgttgttacaaggtttgatggctaataaataacatattaacaatcatcgagtgggctgtgtcaataaataaagctatcgaaacataacgggcctcttaaaaccaaatgggcctaaattcaattaacagcgacgagggatccaaaatgctatcgtgttgagcagagtatatggtgcaagagaagcttgttttacttgaagcaaagtattcaagtaagctgtcgtgtggtggccacgaactatcctctgtcaataacattctttaatcttactctcaacacaccaattttgctcttctctttccttttctaaaccacttttttgatggattgattatgatcatatctcttgtattaacgagctactaaatcctcaaaatttaataacacaacaaaagcaagtcaaggaacactagaatgaattgtattaacaaatcaattacacctaaagaatacgaacaagaatcgtagaatgggtctaactaggtgctaaaaaaaagccctagccttccaaacacactgtttttcctctgttttcatataactttcatcaccggactgtaagccaactcccaccgacagaccaatcagggatcgaaccactaaccaaactcccaagtctctccaccggagaatcaaacgaggggtttgaatccaatgtaaaagaatcccaatcatcaaactcaaaaggacactttggagacatcaatactttatcctcatccttaaccttcacaacgaagttttctcggtgatcatcttcaagatcaatggttacaaacgaatggttcaaaagcatctcagccgtccatcttttcgctggatctttaacaaaacacttcgacaaaaaatccttgccttcttcggacaacatctctggaatcttcggtaactcatcaccaacacctatacgtatcaaaagcgacatgaagtgtgatccttctttaacactccatgccgttttgccactaaacatctcaactacagcacatcctaaagcccacacgtcagccgctgatccatactcgttatcattaacacattccggtgccatgtataacggcgtccctctaatctccacactttttcttaacgccgttaaatctccgtcaactctcatcgccaaaccgaaatcggcaattttaacagagccgtcgttaaataacagaatattcgcgagttttatatcgcagtgtgcaaaccctttagcgtggatgtgacgtaaccctcgaagcactgatcctgtgtggcgacgcacggtggactccggtaaaccctcaccgccaagtttcttcatgtaactcgctaagcttcctctcgaagcgtactctaataacaagttatgcatctcttctccgttctccaccgttgaatcctcgccgtaacaccgtatgatctcaggacaatcaccgagtgaatccaacaccgatttctcgttggagagtgaagcggcgccataagcatccgtcgacttcacagcgataagtgcaggaaagtcgccggagtttctagactttgtcgctgtactgacagtagagaaggttccgaacccaattgtttctcctcgaacccactccattgaaattgaaacaaaagcttttaagagagattacgaagaacaaagatttgtgaagaagggtttcgtttttatagatttagggtaaaagaaagtttcctttttttttgttttggattaaccaaatcagaattggaatgggaattgtaagtatttaggaaatctgaagatacagagcatgtagctcgtgacggttaattgtgccttatggtggaacttcttcattatatactatcaagtttttattatttttaattgtgatatttgttttccttagtcttgaatttttggggtaattaatgcacgtgatgaaagcggatatttgatatttttctcgttgggctgctaaaaacgaaatttagtaacaaaatatttattaacttgggaaaatcaatattatcgcatgactttggttttggttactacgagattttacagaatctttaggttaattactcccatatcagtgtatcatttaccaatatttaaattttaaggagtactacttattgacaaaaagaaaaacacatttactttttctttctttctttctaaatggtgttaggatttgaaatcaagaaatttgatggtcaatctttaacggaagcttgaccttaagtttattaaccaatctacgacgattagtattagttaaccaaattatgcttaagacatccattagactattagagtattaccaatgaggttggtcttctttcaaggacgttgatacttgataagataaaattataaaaattgcaagttgaggtttgtggtgttgtttggtgattccaagaatcaattccttctcaatttagtaacgttattgcattttctcccagtgttttcttaaacgaatatataaagactaaataaaacacacacaattttgttaaatacatcattttttaactttatataactattttttaactagcattaataattatttttctcaacaactactagcatatgattagttatagatcaatgatgtaaaacgataatataatattgattatatgtaattgtttcttgtatatataatttatgtaaaatcagttcaaagttaatgtcttttcgggatatccactaaaacaataactaagaagattattactaaaaaagcagtataattttttttttgtataaactaataaataaaaatagatagttaaatagcagctgcaatttgcatgtttattttcaaatactaatattgatagacgaaaaaatgctgaatacaatgaagttgtcacatgtgaattgtactatagtttgtattttattgtttgcttacaaattccaatagcaattcaacagattttgatgcttcaacatatgactttatccgacaattcttccaatcattattcttcttgctaatattttattagtcacgactttacgatacattttacttttatcgttaaaaaaatgcttgatttagaagttttcacaacaacaacaacttgcttggccgtccgttaatttgtaggtcgtaatggcatgattgcatgagaatcatataaaaataatactctatcatgattttacatatactttcaatctttcatatatccctttgctttatggtttctacatttttagtatctacagagcaatatatgtactgttagaaatatcttatcccaactatagttttgttacaatgactcacatatgggtgtaagtgacgtttttgatattgctctatagataaacgtttacacacaattttgttttgttgattaattagtttctactttcttctatagaattggcaatataacaataaaatttaaccaagaaattaaaacaaagttcttttcttgttattgatcagaaggttgcaagattgtcatgaaataaattgcggcgcacctcaactatataaaagttagggtgaatagtaaatgaataaatgagtggtcaagaacggcaaagaagtgcttcagagtgaagtttagtttcttttctttctttattgtcggaatcagacctgaagtcttcgataccaaacagagagagtaataacaaactttcgcaagttgcggctcttaaattttcataaaatctatactaataataatatttaaaacaaatatcatgattttttgctgattataataattttaaaaagaagatatataacggacattaacggaatctgacggtgacgaacgcacaaaactcgaaacgtagagtaacgcgagctttgaggtcagagaagttagtattatccttaaattccttagccgtcactccgtcaccgtcacatgttcgcatgttctttccaccaatttagttatttatttgttcctagattttcttgcatatttattagtatttttattcttctaacaaatatcttcctcgataatatatatatatagagttttatatttctctgtataaatggataaagaaagatcttgcgacttgcggagctcttttattctttttttggtttgggtaccatgaaccaatcacatactccgaattttcttttctttttgttctttcggctgcttttatcgtagttgatacttttttcctatctgcttagaattatctctgttgtaacaaagaagaattctatgattcttctgtatcctacacattatagtcttcaaccgtcgcttgctattaacgcatgattattgttatgtcagttttcacttaacatattatatattcagttctgatattcaaatggtatcatcctacttgcgtttcggaaaatatatacagtctaaggccctgttcgtttcatcagtaagatggatcatttggatggagatgagttttgatgttcgtttggtgccaaaaacggttcattcagatgatccatccaaatgaatcatctggatgagtttgaaaatttaggctaaattttgaaactcatttggctgaactaaattggatcatttggatggagatgattcaatctaaaataacaaatgacaaaaataccctaattatttcaattgattatttatatgtatttttagataaaataaataaatagatttaaatcttattttacaattattttttaaaaaataaaaaattaaattttctgctaaaaccgtaaaattcgtttttcagccaaacccgtacaattacgttttcccgccaaaaccgcaaaatcattttttctccgcaaaaatcgtaaaattctattttcccgccaaaaccgcaaaatcacggtttcccggcaaacccgtaaaaccgtgatttcctgccaaaacaaaaaaatcacgtttttccgccaaaaccgtaaaatcgtgttttccgccaaaaccgcaaaaatcacgttttcccgccaaaaccgtaaaatcacgttttcccgccaaaaccgtaaaatcacgttttcccgccaaaaccataaaatcatgttttcccgccaaaaccgcaaaaatcacgttttcccgccaaaaacgtaaaattttgttttccgccaaaactgtaaaatcgagttttcccgtcaaatcataaaatcacgtttcccgccaaaaccgtaaaataaatttataaatgtaaaaaactattatttgaaatttatttacttttaaatatattttagattaagaattagatgaaagcatggatattttaggtatttgtattattgcaaatcatttggatggagatagagataagtaaacgaacaacatctcattcggatggtccagtcaaatgaaccgactaaaaataaaacgaacaagagtcgaatgaatcatctagatggacatgttgaatggatcagttggatggatctctcaaatggagaaacgaaccggacctaaaaaggttgaaactctatggtatacatagttttaaaataacctagttgaacataatggaaattgtctagcaaatgggacaaagtggtgatcctccttccttggtatgggatatctactcctactacacaacttgattgttctattaattaataagacacatatatatatatatatatatatatatatatatatatatatatatatctctgacaaaatacatacaaatagtaaatcaagaaatgcgaaattttaagataacaccggaaaaaaagaagaagtttcaatcgttatatatgaagcatgtcttttgctttggctcagccatcgaccctataagtgtatttaagtttttcctctgctattttgaattttttcattttgttgtcataagttaaagcaaaactcaaactagatctcttgtaaatgttctttttgggttggttgataaaatttaacttaaaaaatgtttctatcttattcccttagctaattctattcttgttttaatcttaaattattctctaattagctacttaataagcagtgtaagtcactccaaaacgtgtaaagctttctctttcagacgtgataatcgagacttgtatttcgcatttcttttccgacgccgataaagttgtggctcgccggcgtcggacttttggttctgctatttgcttccttacctttctcttatgttttctgctaccggttaccgtcgctttgcgcttttccggcctcctcacggatcctcttttgacagagtttgatgtcgtaagtctcgcctttgggtggttccgaagagctgattccaatgactcttctcttgctgtctctctggtcgtggttggtttgaagtttgttccggttcttcactgaagatctattcacatctcttccgcccctatcctcaaatatttaccagatcctcccgccttttctctctccatcctcgtttcatccgaatttccgatgtttcagagtttgctgttagcgttttcggactcctctgctcctctctcctccgccagccgccgtgaagttgctcgtgtgtatgagctaggtcaaattctgggttacaggatgcaaaggttgttcttggttttggcttggcccaacaacaaccttttctgttggggcagttctagcctaattttctttatgggctcaattgacaattaggcctctgtgagtttttatttggtttgccctaatttttctaatttctctttgtcgcttctttcacctcatctcctgcatcaagacatcgtgcttcctcagtctccttttccatcctaccaagacaaggagatgtacattcctcctactcgaagtgagagccctccttcatcgttatcccttcccaagttgttgagaagatgttcacctttatcccttcccattttgttgagaggatgttcttcggagagatctttctcttgtgtcttagttggcttagcattagccaaatctttgattggaattgttgtcctagttggagcgtcaatcccgtacaatagatcacgcttagtgttctttgtttccaatgacatcgtttcactcgatatcttttatggttttgagtgttaggattgttcttttattctcttgttcttatgtttattgtttgaccttaagagcaacttcattgcacaatagaaagaggatatctttaataatattaaaacattaaatttacaaaatattaatattcaaatatgaaggatctttaaattggagatatcatatcctctcaaaaatgtctattcttagacatttaagatattgtgtctttattttaaagacatccaaaaattaaaataatattttttggaatatattatattttaagtgtaagaagacactctccttatttgttcaatgtagatgctctaatggcagtaatttctgcaatttctttcttttggctgatgtttattccagctcttgtaatcaagttatcttttgatggatagttttataaaagattggtcacaaaaaaaaaatagtgtaagtctataaatacatattagtggaatatgtttttattgattagagatttagagtattaacatatacttcttgttatgccaaagaatcctaaagttatattagaattagattcaactacaacatgattgcgttttctgttttttttttttttcgtcaacaacattgcgttaaactttaaagagaatttatttgaatatttagatacgtatataggtgacagcacccgccgttggttctgacaaaacggtaaatcaaatgctcataagcttgacatctaaagaaaaaagggagctaaaaaaattgatccaacttgacgtataagtggaatcgattttttgaaagcatacatggggttggggtccctgtccctctaaagataagcataattcaacattttcgaatattccttagaatacgaattgtgacttataatctttaaacgtcattatactagtgctaattatcctctgcatgcatgacgtccccaaatcagacaaacattaattcgaaccttattttgattgaataacattcaatttcattagtatattttgggaaacaatgcatgcacacccacttccttgaccgagctgataaattcagaattaggtaagccaaacccaaaatgggctgccgaaacaaagtgcatgaacatcaatttaaacatgtttttctttgttaaagttgagtcaaaggctattctaaaaatattacatttttttttttggaagttccaaataaaaaggaagccgtcactatactattcacgacaagaagatttacatcattcctgaaattatcaatcaaacgaatagctaaaaatgtaaaaattgtattgggtttttggagtggactattcaggaatttcatctcataatgggtttttatataagataaatagttacaacccatttttaagaggcccaagggacgtttattttaaaaagctactgatccctttacaaatttacgaacaaataaagcatatcttcgaaattaccaatctgtatcacacaaaaaaacaacaacactgagatatggaaattttcgagattaatctaacggtgaagtccttatgtgaaattacgaaactgccttattcatgttcatcttcatctttctgaagtaccccttttgctcccagaacaatgtccgccgtcgtgctccgaccaaaacatgtagtctaagtctaatactagtttgtatcattatctgttacaacaaacatatctgtgtacggtaaagggcttatctttgtgaaatggatctttatttgggctttaccttgtgacacaataatatgtagccttggtttgtgatataaattattttttaaagttgggatgtcagctgggtttctccatcttctgtaatgaatgtagttgattcaagttccgagaaatttatgaagaagcaaaaaaaagaaagcaaaaaaaaaacatttaagtacgagatagattgatatacactcattcaaaagagaaaaagttatttatacagcaagatagtagtagtaatacaatctgcctttctagtttgttaactaaaaagaagaacaatagaaaacatataattttacatatataactcaccaatattaaaatcaatatatatggtaatttattttctaaacaatttttgttttatttcataagagtctgttttcgtttaatttaataagaggcttagacttttgtatttatatattaattattacatgcattgaaattttgcagaatcttacactctaaaagtatgatatatatttttatttttcaataagtgttaaaatgctaaacaacaccacagatgttcgtgttatcgatttgtctccaaaacttcctgttatctataaagttggctcacaaaatcatacacctatgcatcaagaacgtaccacaggtacgaaatgccataaattataaacttttgacgcttacattggaaacaagacagaaaacaatactattattcaactcacaaaaccttaactagatgtctgaaagctaaaacatgttgcattgatcagtgacaagagactatttcatttagtaatgataaattgataaactatgcttattctttagtctttacaaccaagttgtctgacttttaaattgttaattaaccatcccaaacattatcgaaacccggaaagataaaaacatttaaaaaaaatgctctcatagtttcatgatactaaattcaactccctcgataatattttttcccgtcatattaataaacatatgatatatatttaaaaatcaacatcatcatcatctaagaatctgtgcatttccaagcatctggtgatgatcagaccgcataatgccacacccttttcctccatatcctccaccaacagtacccgcaagtgctcctccggccaccgccgtcattcctccgccgttaaccaccgcatgttcctccagcgactgcacttgcttcttgagaaacttaacgtaatggatagcctcatcgagcatcgacgccgtatccatcttagtcccaccgggaacaagccgctgaagaatccgaatccgctcgcttatcctctcccttcgatgccgagctgccacgctctgtggatccttagagatcctcacgttctttctctttggtggctttacggattccggatcaatatgtataggctgcatcacggctattcgaaagatcatctctctcatcgccgccatgttggcgttgtcgctgcagcctcctctcttctccgggagagatgatgacggggagggggcgtaccggaaatttaaaccgggttggtggtgaggcatggtttggtcaaatgggagatgagaatgagtggggttgaagaagaacgggtgggtgttggattcagaaagcatcataatgttatggggattagggttagggtttgagttagagaagtgttcaggaagcttctccatctgctgcatcatcatgttcattagaatgtcggagttatccatcctccttttttgtggaatttatagggtttgttttttctttgagagatatggagaagctggtgagataaggtatggaggaagaagaagatggactgacaaagcttgaaatttagggctttgtgtgtctgaatcacagaagagatgatggtggaagacagagggagagttatgtgcgaaatgtaaactgttactaccaatcagagattcagcaatataaaaggaagtgatggatttatatagcactttgtgacccattcttattattttactcctttttattacatatataatttataacaattaggattgttttccttcttctatttttcacactcctaaaactttgtaacacacacgtatatgtatttagtaaatatatgtatgtatacattaacgtacactagctagcagttgaaaatttgttcattgctttgacatggatgtttcaaccttccatatgcattggacagttatatttatgttgcacgtattttttttaactataaataaaattatactatttattttatgacaaaaaatataaatttatttactttaaactttcaataccagttttgcataaattagttggtgtacttatatatacttttgtctggaatcattgcaactcgcaagagattggaatcactagtcacttggtgtcactaaaattagctgatgaatggaaaattcgttttgagtcatatttcatgaaggatattatcctttgtctggatcaaccgttcacgtgtcacaatcggtgggattttggacccacgagttgtgaactaaggcgcttctggacaaatgaaggtgcatgaaccgctctcaccatttgaggcagcaaccatgaattttcctatttctacaattttaatttgttttcaaaatataaaaataaatcttttatataagttcgaatgagtgtaatgggaaagactgaaagagagagtagttgtgtagttttttttttttggtatctaaattttatactactgtttttttttgtttataattgttaattaccccacatccacatgaaatatgtcagaatccagggaacccatctgtttcgccgggatctgttcaggcgacggcgaaacaatattaccttgaattcaagttttcttattttaacttttaacctggatggatccaatatgttatgcatgagaatattaatgagatgcactgtcttcgttagtaagtagtaaataagattgatgttataacttctttgaacatgcttgaagaaaacgtactacgttattatttttttgcatgatttttttgtttttgtttaaatgagtaatatagtgaatttctcgagtttcacaaatacaaaccatcatgttaacgtatttagtttatatgaatttgttttgcaatgtatatactaagggagtgtatattatggaagaatattatcttatatataatggactcaatataatcgaacctcacttggcgtcgagcgttggtatatggcacgcttatcaaagccgatcggaaaggacttattgcgatcttcattaaattatttttctctttattttaagaactttacgtgaacatagagtagtactgtttattgacaaaaaacaaataaagaacaaaagaaagaaattcttataacattagttaacaaaggaattgcacttcaacaaccaaattaataataaatgactctttccttaaaaatgcatacgtcaaacgtcaaaaacctcacaatcttcaatcaagatcaatgcttggcttcatttgtgcaaaatcatcgggttttttcttttcattcatagaaatcatctcttttgacgtcacaaaagtaattgcttacttgttaattaaaattattatgagttcgtcttctaccctataattagcctaaaatagacagacacagtaagttgctttggacttggttttaccctcttatgttgacactgaaacatgtaagaaagctaacgaaacgatgacgtttcgctgctctctctttttcaatcagcttcgtaagtaacaaaaatagatgctattttccccttttcacctttttacttacacaaagtcactgtaagaattaaacactcctccttcccaccgaatctaaatttcttaaccaagattccaagtcttgttcgtacaatttttttttttgtctctcgagaacttcctttttcgattttttttctttaattattgaactgtttaatcaaagtcgcccatgtcattcactacgttattgattgaacaaatgccgttaaaatcgacagcaaatttaaaaatgtactaataaagaataagaactcagaatggaaaacattagctaagattgtttactgaaatttgcgatgcaactctaaaacgccaatgacgatttgtttagttggaagaatctttttgtaaaaaagtttgaaaaatctttatgtatttaacatatcttgatcagatagtactctcatcaattcaccgaataaaaaatgcaaagatcatatatgatgtaattttatatgaaactcaccacaaacaaacttataaattaaatagacttccataaaatctagagtttagtagtgattggactactgacttttttcgtcggatgtatttattaaaaaaaaaaaagttgtcatcgtagtatttggttgaggatgggcagtgtattaaaataacaaacactgggatattggaagcatatatcaaaaaattctaaaaggaattatattttaataattaaataaacaaaaattggggtaggttgcctcccaaggcaaggtagtgatacagctgtgttcatgtcccaagcatcatctatgccctttgctccatattaacaccacaatttctatcccctaatgattaatcacgttttccgacaaatttttaaactactccttaattaaaatattcataattgaaaaaatgaaaaatatatatcgatttatactcgattaatatcctgttttttactcgatcatgagttgatgacaatatccttaatgttaggtttatactttatagataacattcttataatttcttgaacaagtgctctgtattcttctgacacatttttatcttcttttttcgtttctttagttattatattgttcatatcatatatgaaaaaaaaaaaaaagataaatctgaattcatttgctttctttattgctcttttttttcaattatgtatttccaatctctctttttattcggataaattctcatgttctctgtgacaggataaagttcatgcacccctctttaattattgctactatcgtagtatattatatttcactttctggagcaattttcttacagaaatggcactttctttaactttctagacaaacactcaccagatttatcaatagattcaatacagaagttcatacaaaacgagtaccaaactaaattgtaatcaagaacaaactaaaaaaattaaaataaaaataaggaaagcgtatataatatgcatggagaggcaaacaaaagtcaaaacctagaagataggagcctttggattgggagaaaaccaattataacaattttaatgtatggacgaattaagtagaaaaagaggattgtgataaagatttgtttctaaataaagtataaaaacatttttaccaaataaggaagaaaagaaagaaagaaagctcatgtaaaatgcatggagattggagaggcaaacaaaagtcaaaagtgaatcaaaacctagaatataaaatgtaacatatggaagtgcttcaataaaaaaataaaaaaaaaaaagtgcctcaatcgggagaaattaaaattttaacatatggaagaattaagacaaacaaaatggataattttaaaaataaaatttcctaataaggaaatgttttggaatgaagaagattagatcttagatccatttaattggatctcctctcttttctttgtttgtttcttgttttttagtagaattttggtatttggtacattctttgactcttgtttttaaacacccatccatgtcccttgtgctatattaaatgtactcaatttacatattttccggtgcacctcacaagacatatgtaaaatgtaagataatatatttgttttcattattgaacgaaatcatgaaaacaaatatataaaatgtaccgcacaagtcacaagacgagacatatgtaaaaatgtactcagtttatataaattatatctatgaaccgacgtgcaacatcgtaacaaatcagctaaagtgttaatacactaaatgggcctgaaaacttatatgacccattcataacacgggcctctatacctttgaagttcataagcaaatggttcttcgagtcgaaattgcattcctgtacatcgttttgcgttcatcaaataactgaaaacctcagtatataaatccttgaaaggtgatgtcgaggtgaggagtctgactaatactcatcttcatatttcattaaaattagtaacacaaaaatttgtcagtaataaaagggtctgaaatttttatttatttttggggggaaacaaagagattccaagttttttcattttactacgtaaattttacggcgtagaagtcaatggtatatgtgtataagtataacaatatagaaagtacttgcacgacttttggtttttgaattcttcattaaaaaaaccatcatggatccaaatgtcctggttaggttttggaccaaacttgtggttgccctacagaggaaggtagtagtcaaaagtttgtactttgtacagtatttaattttccccaatctcaaagaagagtgaaaaaatctgcgtagctatagattgcgatgtatatacgagccgaaagaaaaaagaactataccaactatcttttatctttttccaacttggtttgagaatctatgaaaactatcagactactaattcaaaattaatatatcttcaaataaaatttataaacaaagttaaaagtcaaacccccaactaataaattgttcacacttaacaaacgcacacgtaacataataagcggaccgaaccaactccttttgacacggacactcaccgctcgtctgcttcacggtccaccacatgtatctaatcgacggtccagatttgatattactagtcatgttagaattaagaagagacggatgaggtggaacgtgacatatggtgggatttgcacgtgatcgcaggagcaacggtctgatcagatggtttcttttagtggtgctagtgaccgttttgaagaaattattgtggaccgacattataatatttaagtgtatgatactatacagtatagtctatactatagtatcatataacctctcatgttgtcacccaaaagaaaaaatctctcttatctagctcttcgtatgtaaatacatcacaaccacagttatacgttaatgcattccggttctacaatattgcttgggataggtcttgtttatttatttatttaattttgaatttggtttaggttgctcaaatgtaaaaagtacattaattataccgaatatggaaactagattcagttcttcataatttttgggcgtggtttagatgaagattatatcagatcagatactggattgaagtctttatcttgacgtattctatgtttttttctgatcgaatatgtgttttttatcctctttacggtcatgtttggagttgtacaaaaaggtttggtatacaataatagtaccagaaatcttaggaatattatattatttggatataatgattgcaacaacagtccatttactggtaaaggttggttatgatgatcactgatcacaacgtaagcaaacattttatttcagagtgtacctagctgtagactgtctgatacatctcatctaacttcattattttctggattattaagtgtttggtatatagctagtaagtacacatctttaaatttagctgaatatcttaataattttaccaataattgtcctaattaattccaaaacagtattttgtttacatgtttttggtttaaacataacatttgttcaaaaacatgttaaaccatatgcaacaactaacaaacaaaatagcgatttcttttccatttctcttttcttttaatccagctgaaaatcacataaataccattcgctctataattcatatacatgattaaactaacattagatagtgagattttgagccgaggacttcactaataaaaagttaacatctccaactttattttcaatatttttatttagaaactctattttgttaaagtctgtgcacactctaaatcttaagagcagctctatcgatatatttttggaagtttttcttgattaaaatagaaaaaaacttaattatatatatatatatatatatatatatatattttaaagaattttttatcatatttcaccgatagaaatggcttaaagactagaccacaattgatgtagtagtatttacatattgtttagtatgaaaaccatcattaccatcttattctcatattttcaaaattactctatgaatattgtgttataacatctatatctaagttgctcattttgtgcaaatattcaagtccttaacattgttttctcatcaataattttcttcttgttaggaaaaaaaacgaagatgaaagcaaaaaaatacgaaaactgactgttgttgtttatatcgtggtttaaagtaatcatttcatagtattattaacaaaaagtaatcatttcacaagtgttttttacgtcgttcgatatggtgcaaactacaatggtaataaaagacagcagcgttacgttaagaaaacgacgtcggtttggcatcattcgcggaccccaataacgttgctattccgcgttttgtttgggaaaagttgtcacacgtgcgtttgtgcttctttttgaagattttagagatattccacaatcgaaccttatcccaaaagtaaatactctaaaaacaccccaagaaatgaaattgttcaaattaacccaacctaaatcacactgtacataattggatttatttattactatttagtgttcttttttctaacagtacaacgctctccaatttttaaaatttcttgtttcttctaataacgaatgcaagattacacatatttagactttttgaaaacgttaaaatctaatggtgtgttgtttttaataaacgtattgtttgaggtctaattaaaagtgaaaagaatctcgatcggggaataataatcatgaccgagaaaccgactcagcaagtttcccgattcgttggacaagttcaggagatagcttcttcaccggtttcttctccttctccggtcgaaaatcaaaaccaagtgcatccgatacttcttcggagctccatccagcttttcggagcgactccgagaaccgacccgctttcaaaagcaatgcatcaagaacggcttgattatccaaaattaccatttcaccctcaaaaaaaccagatgctgacacgtgtacaatatcatcaacgtcggattcgctccacccgcctcctcttaaaaccgacccgatccggttcacgtaatcgtcgacccatttcggtgtctcggatcttggtaaatctaaatatctctccggcgatgaagagtgtgacgacgacatagaagaagcagagtttctcctccgacgatcaaccgccgcgtcactccaaaactcaacccatctcggtgtactcgacccgtgaacccgacccgaatctaaactcattctcgaaaaatttgatgaagaagacgacgacgacccggctgatttctcactcaccgaacgctgcttcgttaaaacaaccggacacgtgtcagaccctctaaacacagactcacgctcgaagaaatcagaaagatccgacccgcaacagaaaatccgggtctcgtcaatataaaaaaccgggttacccgctaaagacgggttacaaggaatatagcaatgatcaaagattggtatcatcaaaggagctcttttgagagcatttctcgcgacccgtaaagctttttccgggtcggatggtcttaaaccccaagatttgctccagagagtgtttctcgcgatctgaaacgacacggcggcgataggaagatcgatcatagctctgagatgaagacgagctccgggagaacgccagtctggaaatccggcgccgactggtaaaccggcggtgagaacagcacggaggtccggtggaaaagcgaatgcaaactctgcttctgctctagcgaattcggagtcggttagacccggttggacttggatccttgaagtgtgtaagtgtgagattacttgatcggcgagagaagagaaagagacgagactgtttctaaccgttggtgttgttggtgcggcggcgcgagcagagagacgacggagaccagcggcgtgagctggtctgagaccggtcattctccgatcaacgtcgaccattataattttttggggggaaagaagaaaactttggagtaagagattgtggaaaagagtgaagctttatgagttatggggtttcaaatatgtctgatagcgaactggaaaaagatgataggcgagagagagagagaagctttgtttgatgaaaatatggagctttgttttatttatagcaagttttattggtgggtcctactttttgtcttttttttttatttggtttttatgggtttttattttgtgagatattgaaatggtggtggtgagaatctgtagtgacttcatcgactagactaatttgatgattaaagtgtttactatattttttcttcttcatttgagattctttaattttgttttgttacatttaatcagcatcagatacctttctgatcggtttagacttttgttttagttttctttcacgtacggctctgattttcgtggaataacgtaggacccatccttaatgaaatcagattatcactaatcaaacattagagagagtcggttcataacattttcctcttatattgaataatcaacgtttttgctacaaaataaggaatagttgttggtagtaaagaattctggtagcataatcctttaccaagaaaaaaaaaatggtagtagcatacgtattatattatttttaatatattttatacaactacaaggtctgatgtttcaaaatacaaattgaatcgagagggaattagatatagtagtagtgctgaacttttttaaaaattttagtcggttacgttgtaagagactaataatcaggtttatagtcgacttcatcggattagaggtttgttcgggattaagaagcattgtagataataaacagttgacacaagtgattagacgtaagccacaatatcattacccactccgccacgctgcatcaaatcatgctcctcattttattagagacaaaataaatattaacaactgtttgattttgatttggaatgatccacttaaatcataattttgcagtggaattactagtataaatctagcatatatgaatcatataccataaaaatccctatttgaaagttttaagcaaaaggaaaaacagtagcttacgcgtgaaatgtagttgtaaagttgaaaattccaccgcttgtagtttttacttatctatctatgtagttgtgatttaatttaatgtgatagtgaatctatgaccgttgaagcataatctttgggggtaagcaataaaaacgatcacgcgactctatgccacactactcgggaatctcacatgtcaataccaatatcgcatggtttctttctttagagaaaaatgtttcgagtgttaaatcgaaaaagcaccatttttaaatactataacttgattcgattacattttcaatggcttctttgttggaataatttaatattacatttatatgaacacactaacgtcgtcgaaactacctattattaaaagctttaatttcaaactaaacggtctttatgtcagcttaaccacatggtatcgatcggattaattttaatcacatgttaggtatattgttagtttttttcatagtacattatactttttccaatcctagcgcgcgatatttttagtatacgattttacgaataaattagtcaaaatgtatatggtagtgggtcaacggcatagactatgcatatcgtacgtgaatctggcgtaattaatggagtatcaaaggagtttattatgctttttaagagattaacttgtaacttacagttatatttgatgttctcacgctcgcagatcgaataatacaaaatctatttgacataattaagcaacttcaagcccgtttcaagaaaggaacttcaatatgtattacgctaattatttgtattttaatttgaacaaataaaatatctagcatccacaccatcacaaccttgttctaataattaccagtatagtctatgcaaatttcattatgatttgtttacaacttttgttttcaattctatcactttattgcggtttcgttaacaattttaataaataatcaagctaaactagctaagaaacttctataccactccacttgctctgtctagttataattgtgtccgacccatttccaatgtttatctatttatatacttctcaagtctcaaccgttggtggtgtcataccattcacatacatgatccaaccatgcatatactaacaatttccctaaagcattgttaatctactactgaatcgacccctttttcctatttatttatttaatggaatccttcaacgtacagtagtttttaggaatatggatttaaaccttagatctcgtaatcgtttaaaaaaatggagcagaaaagaagctggatcagatctgtaggtactcattatatttattaaaattgaccaaattttcgtcgatacatgaactatatactatatacgatgtgaaaggttggacttaggtatgggtaagagttaatgaaatgttcacataaggtgaagagtatttgttgtctgggtgtgaagctttaggaacatttacaagttagatgtttaattgttagctgagttttgtgacatttgtagggtccattttgtcccaaccacatatgatttttgtaagagatatatggaaggtgccattttttgcaagtagttcattaaatatttaggaatttgtatgttgtgtgatcgattgattgacatactgtgcagattctccgtttcatccaaaattttgttgcctatgcagattaatatgtagtttactgtttgatactatgatgtttgatcggtccgatttggtctacaatttcttactccaccatatataacatttctatttagaaggcttatattttagtattttacattaatcaacttctatatctataattgctttggactatgaaccatgttaaatagtctcttcttcatcgccagtattcgaacatgaaaacttcccaaccctcacattttgagtggtcgagtgatatactatatgaagaaagtttgtaaatgttaaattgttaacttcaaagctaagatcatttacatccatttcgtaaatcatattttagatttactttttacttttgtactttataggcatcttacaatttacaaatatatactcatttacttataagacattgaaataagacgtgatatatttatttaaatcccttgttgactatcccaaaccaagtttaaaagatttatcaaacgtattatttgcacgacaaatgataaggtcaaacaccttggactacacgtgatgttccttatatatttgacatatatgtcgacaaaatttatggcaatagccttgaatttgaagtgtcgttacaaaaagtcattatcgtagacaattttggtccgtttgtgtggctttcgactctatcgaccgttgctatgtccccactcaatcacaacaatcgatcggtcaatttggtccaacagctttggtttggttcaatgtcttcgtaacaaaaatgtcaaaatctcttgttgtcatgggttggttttcgtaattggtcgttttacttgttgggtgatgatgttaagaaaaattaggacgcttacgcttgttttataatatttgtacgttcaataattgaaaagaaaccatcaaataataaatataatattcttatttcaataataccactaacgaaatcaaaaccaaaataataactttactagctagcagtatctaggattttttctcaataattttaagtttaaaccaattcacatttatctttgtaacaattaacaaatatagtaaagtttttataacatgctaataaaaatgggtgaaccaaaaaatagttatataaaattatgtgtaaacatgttaattaatatatattttaaaacatcaattttgataattaagtattttttttggttaaaacaatgatgattttatcgcatttgaaggtgatccactggaatataatatatcaaactacacaaagatggcctttattatctcgatgataaactagttatgaattttataatatatcataactaatacaattattatagtttttagtgaaacaaattcaaagtgggtaaaaagctcccccatgtgcttaataccttattagttattaccttctacaataacctattttacgaataattaagagaacatgtagaccatatcaaatatgcataatgcacatatatcaagttgccattaaatcttttttgaccgatattcacaacaaacacactagtactataccactcctgttcttataaaatagaaaaacaatctagcactgatagtagcccaaattcaattataagtctagtgagaatagataaaaaaaaaacgcataaaatatacgtccatttactaatcgaatgaatgtaaacactttactaacaaccgagataatgtatatctgaccaaaaatcagttgtttgtatggttgctaagtaagaattcataacaaccgagataaacaactctatcaaatgtacttcgtttcatcaaattactaatcgaaacttcgaaacctattataataaaaaagacgattctagttaaagtatgagaaaccttttttaagacataaagtatgataaccttttttccttaattcgcgacctccttttcataaaccattcgccttttgataaatatattatccataaaagtaagcactcgtgtggtcgatatctcatgtctgttctttacaaatggattcttgttaggttttagggtggctataaagctataccatcgtagaagcgtgcgtgcgatggcgaaggataaagtgagtttcgatcattgtattcttcattattttgaatttgattaattttgttttttgtatgttccataagattcaccaaattaaagtgattttgcaggtctgcgtatttctttcactgtttttattaagcagattaaatatttagtccatatttctaaaattctgtttatgtatagaaattgtaaacttttgggacatgccatgatacgtttaatagatcaagtttaattatattgtggaatacgtcaagagcttacataaaggattgttttagtagtataccatatatgtggtaatatcgcaggtccgatccgaatggtaacagtaacgtaaatagtgtaaaatgggaaagagaacataacaaggtcttgctagtgaattagaatatacaatttacgttgaacaaacggtacacataaatgaaacaaaagttgaatagtgatcatatcagaatatcagatcaataatgtataaacaatatcaaattttaactattttaatgatcgaaacaattcttataacaaacttaattcgtatgactgttttcgatcttttgatgatatatattttcaaaggaagttgtcattgtcaacttgcaattcaacagtttctaattttgggtgctgttgaaacccaactaccacattttgatgtatttaaaacattatactatgcatctttctgatacaaaaatgtatatcattaatatgtattagaattcttagaacatgcctatatatccaatatagctcatcaaacactaacgagtataaagaccatccactccaccaccacattaagtttttgacttaatgatcatcggctatgttgttgtggtccaacataaagagtctgccgagtttggtttcactgtctaaattggaaccgtttttggttcaacaactagttcacgcagtaaagtatcacttaaatacagttagttcaaccggccataaaaaagtttgttctcgtacatatggatattattgatttacacattgagaatatctacccatctattattaacaattaagcttgacctagagaaattctgatgtagatttttctgattatcttctcatggttaggaaccaaaccttaccttgtttctctactcgaatcaatctctttattagcttatgtatggtttagtgttctctaaccaaaccaagaaaaggattggtttagtgttaacatactgtattactaagtacatagttattgggctataagaagctaactgggccacaaatccagaatcccaatataagtcaatgtacatcgtttgctaaaatctaaaaacggtatctttaatctcagaaaggacattatacaaagatgatgatgttacacataaggtcgtttatctacatcaacttcaacccactagttcttcatattacataaagtctcataaaagcgatttcgtatcgaacttttactcataaaattcccttattctatgattaaaaaggaagaaattccaaagttttatagtatttttatgcaatgccaacttgtgttgcttcgtaattccaggtacattacataatttaataaaattaaaatgaaccaatcaaaaacaaatccaggtcatcatcatgacttgggccggcccaatatccctgagtcggcaacactctctctctctcttccattcctttataactaatcttcaactaacttttctcttccccctaacttttttcacccaaatatttcgacttaattaccaaaaaaccagccattgatcgtaaaacctttccaccaccgcacaccccctcgccgggggtagtgcgtcgcatacacgcgccaccgttaccttctacttctctcttgaagcaacactcgtggtctcctgatctaatccgcgaggaagcttggtcaaaacgtcaagatatctcccgccaccgtcatctccgccgtggtaagagcttgaccgacgaagatctcgacgagcttaaagcaagtttcgaactcggattcggtttcggatctcccgaaaacgctgatccaagactttccaacacgcttcccgcgttagaactttacttcgccgttcaaaaaagctacaacgacgccgtttctaacaaatcaacaacgtcgtcgtcttcactctccgacggcgataccagtcctcaccacaccgtataccaaaccagtatgtataaacatacacacacacacatatatacacatacacgattataaatttataatgatcaaatttcatttgaataggtgatgatccgcaaacggtgaagacgaagctgaagcaatgggcgagagtggtggcgtgcaccgtgaaccaatcgccgccgagatgataattttaacgactgttaaacgttgtggggataaaggttaatccggaacagggtatgtaaattgagacgccaaacagtcggtggagtccagtcagcgttgtaatattacacacacaatagtaaaatactaatatatgttggacccaacttgtttataagttatattgtttattgtataatgcatgatttgatttgatttatcttcttttagtatgtgatatataattttatatatgcaacagaacacaatttgcaaaagtatattctcagattctattgtctgacttttgtccatgggagagtggtgttggcttctcttatattcgttgctaagcttgataaaggattatgcaaattcacgtgaatttgcatatagtgattaattcagattaactgatctctttcagatcaaaatctttgtagcgtaacttatatatattataacttttgaaaagaagaaaaaaattatggccgaagaaacgatcgaaatagtgagaaaatagagaaagtgtagggaacgatgagggagtaagtaacacatctgtgttttgtctgattgtctgattaagaactacacatagcagatctgtgttttgttatgggccttcactattaggcccatctgacccatatcgttaccgctttttagtatggaaaagcaacaacaatgtaaaggaaagcagaaacgttagatttctttagacgcgcaaactgaaagagctttgatcgatcgatttggaggattcgtagaagatatggttcgttcttacctttgattctgtctttattttttttatgtttagagattagcaatttctaaggatctctagataacaattttgcatgatggatttttttttttaagatctgatttgtatttagcgaatgttagaatgaagaaattagggttccatgattgaagaagattttagacgaaaccctttagtgttagagctgagattttgaattttggatgttattattgcagtcgagtatatacagaactgtttcgagaaaagagaaaccgagacgtcatcatggattgacgacacagaagaagcaagagattaaggaagcttttgagctatttgacactgatggttctggtaccattgatgctaaagagcttaatgttgctatgaggtaatatcgagagctttatatctttctgtctttgttttatggttttggaattgattcttgatattatcatttgtgatagggcgcttggttttgaaatgacggaagaggtattattatttctttcgttttttcggttttttccgctaagattcgttgtttatatctatggttctgataccttgatgtatttggtattgaagcaaatcaacaaaatgatagctgatgtggataaagatggaagtggagctatagattttgatgagtttgttcatatgatgactgctaagattggtgaaagagacacaaaagaagagctcactaaagcattccagatcattgatcttgacaaaaatgtatttactcataacttagttagttacttcatttgatcttaatttttctagaagctaaactatttttcttccaaattttcaggggaagatatctccggatgatatcaaacgcatggcaaaggacttgggtgagaatttcactgatgctgagatacgagagatggttgaagaagcagaccgagaccgtaagtgtcctaaaccttttttctcattctcttgtggcacaatgcttggtttgactaaagatatatgatacattactgaaaactgcaggtgatggtgaagttaacatggatgaattcatgaggatgatgaggagaactgcttatggtggtaactagaaaggttgttgctgttcttaacgatatttgatgagctctattatagttctttaactgaggcttaattatctgtaatattattactgaagatacatatatcacagttttaatctatagctcatcttaatggcaagtcttggtctgtctttgtatcattataagatgtataaattggcaaaatattcgtagtcttagtgaaaaactttaggagctcgcattggttacttcataagtcgtcaagatttggacctctgcgcacatcatcatctagaaaaagatattagatttgtcttgtcataataccctgttgcattaaagttgtcgattcatcattttttctttcacaaaaagtggtaccattttatgtcaaccataagttgtaaagttacacaactgtggaaacttcacttacataacatatccgacctttgaaagcttacatcaatggattccaaaaagaaaaaaagatccattgatcataacaaagcattttccttaggcaaagtttccaagttagcttaaaactttaaaagttgtcgattcattgcacaagggttttgaaacaaaaaagtaaagcataaaaaattaattcaataagagtgtgtactgatttgtagaagctataaagataatgttgacaacagatacattggggccgtgaattgggtattctacaccgaaaacctcacgacaatatttttaccaaccatgacgaaattaagcattaccaaagtccccatataatgaatccccaaacgagtaaagagaacaaaatctaattatctaacgaggataaaaagaagaaaaaaaggaagctaactgatatatgggaaaattgaaaggaaaaaaagtccaaatcttcttatgaagccaaagctggttgggttattgggatgagtttatatctgaacggacctggatggtgaagaatcatcaaattgagggggaagtggtggtggtagtagaggaagcagaggcacagctgttaccagtctgcttagccacatagatttgcttgacctttgggttattcggaaagcctctctctctggccatgggttggtttctgccatggtagcccgatctccggttttgatggtgctggtgttggtggtggtggctgggcccaccaacatgctgagactgcgtgttcttctcctgagaagattgttgttgttgttgttgtggtggcttgaagccaggaccatttggattctgagtgttgttgctgttgggatcagataacgtggaggtgggctttgctggtggagcaccagtggtggaactgtaagcgtttgaggagtccaccattgcgtctacaactgtggatgcttgaacgttgggatatctgttaggaggaggaggaggaagcatgttgttgttaaactgaggtgatggaagattggagccatctgttccttcctgctgtttctgcatttgcatcgttggaggacccgaaaatggcatgtaaggccaccgtgctcgaataggcatctcctgagaagaagactgacccacaccataaaataaatattaagtcgatggattcttctactagttagcattattggaaatcataatgatgggatccaatacctggaaaggagatggatcaaacattggcataggaaggtgctgaagagacgcaggtacaatgttacattgcatggaagccacattaggattgtttacatcaccatctcctccaaccggagaagaagatacgtttgggttgtgtttccaatctggttgctttccagatgggatgtaagttgttcccatgaaactcaaccctccaaactgtccaacaggtgcaaagtggttataaacaaacatgtgaggaggtccctgaacgccaggaatagcaccgggtggggttagaaaaggacccgtgaaaccggcaggaggggcatagaaggaatctactccagaatgaccctgctgctgccaggtcgtaggtggaccagatactgttactggacctttctgggactgtgattgggttgctcctgcgtcatggtgcgggccaaaagcaaaaatgggtcctcttaacatgggattcacatcatagaaagggtaatgaggagggcctggagggaagtgagtgatcatttggtttgagttgtgtggacttggtaattgtggccacagagagattggggtgtccactgaaagatctgctggtagagaaacaatgagagattcctcagcttttgatcgactagtctgcccaccaacagtacctgccaaagcaaaagaaattacttcagacaacaaacaaccatttgggaatgcataaaccctacagaaagcaaatataccacttgctgccccatcatctaactctgttcctccataaattttggtttcaacaggtaatacagagccagtactcaaggcattcccactggtttcatcattagttatggctgccacagcaatagctgaagcagcagcttctgcttctgcttcacaaatctctatgccagtggatgatggatttcgatgtttgttatctttttcaaaatataaagagctatccttctctgtacgcccaccacagggagggataacagtggaagatgtaactgcacctaaaagagaaagaaagatccatcatttaaatgcaacgacgagccagttcaaagtaataatcaaggtatctagtcaaccagctcaccaaattgaattttgccctcagcaagcaatgaatttattggacttgtgctgcttgaaaaagtattgttctttggcacaacagacgttgatgtcgaatttgactcgctaattcggttggcaccattctcaacagaaacacatgaaagatgagatacgggtttcatggcttcatcaagctgactctgggttagggccataacctacaaggtaatatgaaaaggcttcagatatttgcataggcgtgattcataactagtagagcatgagtcataaactattttgattattatccactatgactttctctgtcctcaattcttactgctttctgttttcagtaaaccattctatcaattcatataaagtgactatgagatgcggcttaaaacacaaccgttttagatgacattggaaaggtaagcaagaatcttgcagatacattttttggattgtccgttttcgatttttgtagaaacttgaaccaagtcaaaaaaaccatgaacaatatatatactcaccggctgataggtgagttggttaccccaagtccccacaggtgtatgactgttatcgagaaccttatttttgttgctgaatacaaaacctgacgctggattctgatcatttttgggtataactggaagagcactactttcctgagtggacctgcaaaatgaaatagaaggtaagaacataagcagaggggagctatctctacaaacacacttaaagcatttcaattgatcaaataatggaatgtacttgttgctcccagatttttcatcaacatgggaatctattttaggtgaaggtgtgccaattggggctaacgtctgtctgttggagactggattaaactgcttattgttcgcagctcggctagctggtgggcttctgttggacctggctgcagtagtattgttctggaaagttgaacgaggttttcggaatgcctacaagaaaacaaattcacttttagtgagaattacctcagaataggtaacaattcacaagtagaagaacactagagttttagattgcatcagaaccttggctgcctgagacttctctttaatttccttttctctctgttcacggcgatcattaagcatttgcctttttgatcttacctcaataaaatcatcatcgtcactaggagcttcaataccttgttgctcaaagacacgaacaattccaatctgcaaaggtgcatcaatttccttttcagataccatattccttttaaggtttgcttgtccagaatttggactgagtggattcttcacgacagcatctttcccaagtctattctcaaatgaacccccactaactgttttctgcatagcattcaaaccggacgctgagctgtctaaggcttgtttctgggacttgttggacacaacatattttctactcccaatttttgtagaagtttgtgcccttccatttccatttcgattttcatcggaagatggccagtttgattcccgaactctaaattcaaccctctgacgacgatatcttctattaccaccagaatctacccgagaaacctcagcagtaccagatgagcgcaagccagaatttcttactgcacttgtgtcagtttggacttggtatcctgattgtctttcagcaaaatttgattttccatgactcatctttcgagaaggtaattgcgaattaccagacaactctggttgcttttgaggtgacacagcagcctcaatgctcgctctcgctggaggtagattagcattcttcagtgtgccctcatcagaaacatttgtcggtcttctaagaacactaagctgagggtgtgagacagaggttgctgcgtttctagcgagcaggttagccgaatttccttgaccaagctgaacagtcaccaaggatccaggattctgattcaaagcataagttgataaaccattcgcttggacaactgaatgatgtggcggtggcagcaccccttgggatattggggatgtatacggtagttgaccaaactgaatgagaggaggctggggctgttgcatatgggtaagcgaggagccaaattggggatgaagaggaagaggcatttggatggaaccaatctgtatggcagggaaaggagaaggtatcagcgaaggaccagaaaacaaaccaaactgaaacttgacaggctcctccatctgtgctgaagtagtagatacaggaggaatagctgtctgaagagatgatggatgcagagcagcgctgtgaagtggtatgacaggatgagtagaaacggtagagttacttgtggagtctactttactggccacctcaaatgactggcgaccaatatttgggtgaactgtcaagttctgcatcgtggtttcagcaccctggaaggtcctagacgcattatgcatgcccaagggatcagaaacgacagcaggttgggcggcttgttcaccacggcttgtctcaatagaaggtctttcatcatctaaagaatcgacagtatgctgatgaagtggaaatgtagattcggagttccgttgacatttttcaaagtcatcgctgggtatttcaacctccactccttcattaaagcctaagactagattagagtctttatcatcgagatgcatttcttctaactcttgggcgagatctatgttctcatcaaccccgtgtattttatcctcctcctggtatccatcttcatcttcgtcgtattcttcttgttcctgcaaccgttcattactgtcaagagtccactcttcattatcccagcaagacacagagcctgtcgccatcatcaaactatcctttccaatatcactagaaataattggtgctccccccttctctagtaaaccagcatcttctcccattctggaagtaggtaggacagttgaatctgctgattcatccaagtcatcatgagagagatgaacaggggaatcaggtgggctagtaacggaaagtgaagattgagagtcacatcttccagtcagcttggtatcgaaccggcgatgttcatcgataccacttccaggcagcacatgatgatcctcaatataattggctagaacagtcgaattagtcctacctttatggctgtagttaatccctccaatagacgttgagggaccaggatgctcaacctcgcttctaaaggaagtcttttgcctagactcctggggagggggaagaacacgtggctgccttactgaatatcttggtcttccaaaagggtaatagtcatccccctcgggattctgatacaacttttcaggataaggagaatatggaccatgacgaggacggccctggctttgcccccatccaggatcaccatattgctctccaaaattttcacgagattcagattccattccatagttcctaccatgcgtccttccatctccaggaattctccaactctgatcaattgaatgctccgggaatcctggtttgaagtaggaaggggcactgagatatccagctgtcccaaagaattcttcctgtgggctatgtggaacattctccaaattttgtggaataaaccttgaattgcttccactctcaatatcttcctttctccacgtaggcttttgtctatcagggaacccaaaagaaccatccctagaaaattgagacgtggcattgctctcaaatgatctcatgggtactgatagatctaaagttgatgacgtagtaattctatccaccattctttcgctgtcttcccaatcaacaacatctgcagagtctttttctttaacaatatctaagaatttatcctctgaaatagttgaagagctgctgcaacctttggcagcttcagcctgtctcctggaaatcttttcttccaactctagaagcttttgcttagcagcttgcttcctcctttcttcttccatgaacaacctatgtttctcctcttcttttgacttcctcaactcttctgccctccttgtagcctctagtctctcctgctcgtttctgaaagcagcttctctggcctcttcttctaatcttctctgccgctcatcttgttcacgagccagccgtagtctctcttcttcttctgttcgagctagttctatcaccctttcctgttcctcaataatccgccggcgttcctcttcctgcatcttttgaactctctcaagttcagcctcaaatgactccctgacaggatcatgaaactctgtttgctttaaagcctctttcttcttcttagtaacaccaagtactgggaatggatcatgaacatcaaaaccagagtcaccaaagtctttcataaaaggatcttccacatgaggtttgtcactcttgaagaaggagcgtttatccctgcaagaagttcatatagagataattaattaaaagaaatttgtcaccagatgcagagccatactggaagagttagtcccatacctattctgatgttcaattccatacccatcccgattataagttcccctgttgctggaactatccatattattattccatggctgtcttcctccatgctgatatggagcctctctagctccactattattccaaacattttcccttgatgatgacaagacgtagttacttttcttagcagcttctctgcccctactagagggccttgctccataattattatgatttgcaccttcattttggagtggtgaggagactctccaagcgttggcctcccttcctcctccactgacaggtcttacttgagtcaaagaggactttgcaatttcattttcacgctgtcctggtttgtcaaaaacattagaagcagcatgcttctggggcaggacatgaggcctcagatcaaaacccctatcccaaaatggttcattctttgaatagccatgatccctgtcccgatctcttaagccatgactagtatcacgttcatcatcagcccaatcagatcgtggggccaaacgaacaagaggcagtggccctgcaaaatactcctttttcctcacatgttcagatgaatgtaatccatcagagaaactaggactctcgctgagctcattaccaagccggctacgcccagactggttttggggtctcatatctacaagtgaactgctcataccagagacacctctcggctcttttgaaaaatcctcacctgcagcttgcttctgcttctgattcagaccctctttctgtttctgcccagacacagaagctgaaggcaaagaagcctttagggacggaaaatcttcacccctcaaagttgccactttctctacatgatgaaaagcccgttccataggctcagctgcaccaacccgagaagcaagagacgtattcaacccattactccccctagtaacaccttcaccagtatggttaccaatatcaccatcagtagctgtagcagcaggcttactccacccaataccagatgaagcaggtctagttccactcccagcgatccctccaccggaatgaaaactcgaaccagacgaatcaactcgctcatgctccttacggagggaaggaaggttcaaggggggtggaacagatagtttctgcccagcattttgcgagcttcttggccgtgaaaggacaaccatacttctcctcctccaacaccaccaccgcatatccaccacctcctctcccccgcccataacctccagattgattatactgatgatgagattgatatccataagacttattcagattcacagacgcgtacttgtttccatctccatgattagccatttcccgcttccgccggtcactgaacatccccaacgcatcaaaccttaaacctagatctgattcttctcccagtcaaatttgttcgcagtgtattgcctcagatctactagagtgacgaattgatcaaaaactggaaaatcaatccaagaatctcccctgaatcaaaaacaccaaaattaaacaatcaattctcagattcgatccttgataaaaccagcgtcgaacaaacgcagagcttaagtgatggaaaaatcgacgagttagggtttcgttttcgcttttaaatcagctcgaaacggcgtgtaggaaggggcgcaaaattacctacggcggtggtgggcgtatgatatcgacgacggtggctaacgtgcgctgatgtcagacgacgaagcgcgagggaacgaatcgtcgggaaaaaaggaaagccctacccctactcactgcctctttgtcggagataaaaccaaaacaaaaaaaaaatatacaaattcaaaaaaaaaaaaaaaaaaagctgaggcacgagagataaaccaggacaagttttactctttttatgtttttgaccccgtattaatcaatcatctctttattaccccataattctcaatttgatacatatagtactctgctttcaattacgctactttcgattattagaaacatgtaaaacttcgaaattagaaacaaaaagatattagtttcttacaattaaaacaaaaatacaaaataaaaccctaaccctatactctccggttgatgatgaaatcctcgtgaatctctagtctatactcgtccattgatgatgtaaaccttcgtacgtagtcctcgtgaatgatctcttctcttccgttagtgaacttttctttggaggatacttttccagtgatcaatgacggcgttagactcagacctgattttagggttaccgttcttagagagaaagagaagaacgcgtaaaccgtcggttttgctaataagacgagcgttgagaggtaaggttcgcatatgtctaaggatctcaacgcattgtatggcttccggagagactatgtaaaaccctttgtctcttgcaacatgagcggctcttatggcggtgctaattagttcttcaagatgcttcgttcttatcgttcttcctttcttgcttcttctcttcacatgatcgttcacacatggtggtgggagatcatcagaaaaatccattgtgtgtttgagagaaaaacaacgcagagaaaacgtacttaagaaactagggctagaagaaactcgagagaaaacagagggatattgatgaataatgtgggtgatgagactactcgtctattatatatagagagatgtttccaaattttgagatgggattgtatttcggaaaaaaggaaattacaattttgattattattatttttgatcaatataatgtacgtcggtttatttgagatcgccacatatatatttcctttttcttataataaatacttgataaatctgtcaagagattacaacacttgaatctcgatgagaagaagaaggggaagaagacggagaagaagcttcacctagtccttgatttggaccacacgcttatccattcgactcttgtttcgtaaatttctaaaaaggagaagtatctactcgaacaagtcgattcaaggctagatttatggagattcaacaaaggccattccaatgagtatatcattaaacttcgaccttttcttcatgaatttctattaggagccaacgagcatttcactatgcatgtttacacaatggggttattcacttacgcacagaccgtgttgaagttgattgatccggacaaagtttactttggagatcgagtcataaccagtaaagaaagtcctagtaagaagacacttgagcttgttgtggctgataagcaaagtgtcgtaattgtggatgatactagtgatgtttggcctcatgacaagagcaacttgttgcagatcaccaagtatgagtagtttttcagagatggtgatgacaatacaaagtcgaaatcttacgcagaaaagaagacggacgagtgtccagacaacggatcattggcgaatgttctcaaatttctcctacagattctaaaaagattccaagaggagttggattcacaagacttgaggctgttgatacatggtccttgcagacaaggctgcttctgactgaatgtacgtattcagtccaaaacgttacttttcttcaaggtatttgtaatgaatcacttgagtaattttagttgattggttctcataattttgatgatcaatgttcaacgtctctcattccatttttattcctcttattggtcacgccaagttgagtagaatcttgtttacaaaactgttctgaacttctgatcaacaaattacatgtctttgcttgggggacaagtttaataaccccattaaaactatattggccgatatatcacacctcggatgcagaagacttcgaaatcggtctcatagtcctatgttgatgaatcgtgattgatgcagagaagaggaaaacaaacgtaaaggagctttattgcttttattttatgtaatggttctattatagaagaatatatatacagaggaagtgattattgttcactgcttttatcgagaaaacttaacaaaaacccactcacaatccggcgagcaattggattaggaatttgtcggcacaaacgtccgtcgatgtaagctacgatacctgaagcaacgaagttcccaataccagctttccacatgaacttcattttcttcttcttattgtcactaactactggtaccattgcagtattggaaccactgtcacttgtctcggcctctgcttcttctttctttggccttagacttgtaatggccttagtggcgtgctgtttcaatatgcgaattgcaaaactgacgaatagatgttcacacaatgtcaacaccgttggtccgatcttccattcctgtgatcatattgagagagatattcacatgactgagggtgtttatgtttatgcagagaaaagggattggaattaaaccttgtctccatggagacggcgacgaggacgagagcttgagggatctcctttgagtaaacccctgctttcgagaaaatctttaacacggtctatcatctcatctatgagagaattgcttggtgggaggtttttcaggaaaacctataagtgaaatatgttcggtcagtaacggaaatatgttggtattaatcatctcttggaaacataatgaatcggtttacgttttcttttattggaatggcaaagcaaaactaagttcgagaaatattatttacctgatcgtcaatgactttgactctgagatactcttgcctatacattgtatccaacatagcttgaaggtatccttcgatgtataactgcaaaggagtgaatttgagcatacacgtagatggacattagaaaaagctctacgcatagagttttctcagttctcttttatactctataaaaatgaaaatatttaaattgaaagtagaagacaaggcataaaatatcacctcatcaataccggggttacgatcaagcttaattgttctatcagggccaccttccatcaaagctgttcctatcacagacggttccattgccagtttaaggattccatggtggaaaccgctaacctgagagaagagagggagattataagaaagacgatagtggtaattaaattcaacctaccggataataagtagatgagtcctcaccagtccatcaacacctttcatttctgcacccctcagaacagaatcggagatttcagtgagagcaacaaagacgacattggatcctgctgttcttagctgcaacatggtatttgcataagaggttgaatggaaaaagctagaaaattcatcagccatatactatatgatacttacagttttcccaagatcaccaaagtaacgtcttgtccctgacaatcctttgttgtcaataagtttgctgaggagtttgaaggtgcctacaacagatagaagcaaattatatttccaccttaattgagatttaatacatatggaagccaaaatttaaggtaatgataccacgaatgctcattgcttacccactgtcaaaccagggacgttcaccaagccacgagaaggatcaaaaaaggcatcaagagaggacgatgaaaaatcatcaaacatggatgcgaaagctggaggaagcaacggactgccctttgctatgtagattgctctcattgcatacctagggagcacttatgcaagttaataatatctaaaaacagagggcagctaacttcggagcttttagcatagaaacaaaagatgataccatgagtaatgttttacacatcggagaagtagttcgcgaacagttattaaagcatgagtgaccaatacaccatttagctctacaaccatattttttatatgtggaacctacagaaaacgaagtaccagacaagcattagctcatataatatgatgtgcatgtgaatatacgcaaaacagcaaaattaagaagataaaatgaaatttctgatgcccataccttaaccacactatgcagtaatgacctcagagtttcttgagctgagttatagctcgaatatgaactcccaggaacaaaattagcagtaatctaattgaaaaggaaaagagaaacagaggtagaatttaaaacacaacatagagtagaaactgaaaaaggaggcaaatagagcaactgttagagcaaacctttattgggtggatttcaaaatgatcaaaataatattgactactttgcgtgtttgtactgagagatgatctccaaaatgccacaactctcattaaagtctcttcgtctaggttcaaattgactggctgcaatgtaaaacgtaagaatatcatatccagcaggcatatatgacaatacaatcaatacttaaagagccagaagttgactctggctattaaaattcccgtcactaatttagacagtgtgaagagaaaagggtaaggaaaatttcaagaagagtgacacagtaaccgcctatacctgcaaaactatcgaggagtgcttgacttgtgtgacgctggaaccacttgatactagaatgaatacacatttgaatagacaaccatttgcgtcacttgaacttgattgatgctgacgaagcatggctgcaaagggtgcccctgcccatttgtgatccacatttagagcctgcagtatccaaagacaaaattcatgtcttatttctgcaaccctgaaaaccaagccaatctattgcacctcataagattatacctctatacataattggttaaatttttgctggtcagtgaacatggaatgaagaccaacattctcaagtctcgccaccaggatcggagaataagacacgacagttttctcctctgcattctacataaacatttgaacacaaaatcaaatctagaaggcaaaggaaaattttaggttgtcgcaaacaaatgcaggaaaacaggtatggtggtacaatacagacttacttgcttcactttttcaagtaagtgaactcctaaatgggttactcggaattgaattttcgaacgagattggaatgctgagtctcctttaaggctttctgaaacttcacaaatgcgaatgactcgagtcaggccatctgcatagacttcatatccgacctttaccatagggattctactcaattccttgtcagccgttttatgatctttggccttctttttcatcattaagtgtgaggctatgcttctgtgctgagttgccttgaaaaggggtttccatggacggaccttatctaagctgacttcacgcagaggtatcatgcctgcaaaattaaatttccagctttttggtcaataaaataactatgagtgctcagtagattggaaacatgatttaaactgctgaatattcttcttcctagtaaacctaggacgttatgaaggttgataatttctaagcaggaacaatgttggaagccaactattaccatctactataactacaagcttgtgaggaagtgtcatatcatcccatgcataatcagccccacttccaggtccaagtacttcaatctctgatgaatcctacaattaacaaataacgagcagtgaaatgatgcacataattcataaacacatatgtagcgaagacagtaagtaggagctgaccaaccttttggtagtacgtgagagatgcagaatgcaagaaattctcaatgcgatatggtggtggggtatttggtggtttttggaagtgcacagcaagagttgaaccttcttcagtaacattaacagatgcaaattcaattgcgcctctgcctgcttcacctgactgctttctgaacttaatgaaaaaacacccaattgaagtgatgcataatgggcctgaccaactccagtttgctttgttcaaccggaactgaatgaatatcaatgaatttgcactgtcacttccgtgctttttgataaagttttcgaacagatggagttctttcttctgaatggtttcttcctgcaaccgcaaggctgctctctgcttgcttttgatggtgattatgcccacagagtcatccttcccaataaaacagaaaagtgatagaaagaaaagtaaataaatcatgtttatgagaggaaagcaaataaataaaggacacaaaacgaacctgaaaatagtgctgacggatgttgatagtctcttctgattcattgattacaagatgtctcggaacaaaagtcacaatccgtgatggaactagcattttacttgagattgatctaactgacaaaccaaaccttgttacataccgaaacccagactcatcttttgttcccaaactaatttcggtaagtcctgataaagcatccaaatccaacactgcttcagtagccccatgaccatcagccaatatgacaccaaccttgcgagatctggccaaacaagatgctgaataatttctgaaaagatattgggtgaaaataactatgtactgagcacggatagcataccttaaaaaccacgacccctctgtctttgggggtaaatacaatccaaactcaggtgggacaatgtgatcaagtttttccatatcctctctacattgtttactgtaaatgtaaatagccatcaccaatttaaaggatattttgatttcttgtcaaatacctggatagaggcttctgatcagggggaaagaaaaacaaggtgcagtctgagtcgtttttaagaatgtacgatgtgaaaacagctgcctgtaccaaccagaaagatatttgttaagagaaagcaaccaagaaggaaacagatgataagataaaatcacgacctccagtatgcctcttttccctaaagacaatctcaaggaagcacagtattttccgccggaaaaatcaagatcaacatccaaacattgtgcatcattcttctgtttctgtaacttcttgacccactgaccactattgactggtttgcagctcgcttgggaagtagtgagagtaactctaaagtatatcatgtctggattaacatagaagtcaattgtttttccgctctgtatagttgcatgtttgccaatgctgtgtctctccatcgaggtgttctgatctgcgaacgagataaaaatgttaggggcagaatacaggtcacccaaaaagcacatacttttctgcagttaccagtttctgtcaataaaatggctgcttcggaggaaaggaaattcgacacctgcacagtgggcaaaagaaaaatttccttttgctctcgcaatgcaatacatgctttctgtttctcaagtacatcagaggatgcatcaggccgtatgatcgatacttcccttcgaatgctatggatcagaaaatgcaccttcccaacacactgactttcagatgtaacagagcaatatgtagtagtcaaggagaccttcactgattcgatagataaagcctttttaactccataacttaatttatcaaaaattcctgttaggcgtaccgccttgcctccttcaagctcttctgaccattcacttcccagagacttctcaccctcaaacaaagtttcgaaagattcaggtctgaaagagagtgaaaaattacctgccatttaatgtgcaaaatcaatcagattaccattaacaacaataactgtggttgattatcctgtacgctaagagaaactagacttctgatattacctctagaactaatgtaaataaatataggaacttacaatcatttaatacacagaaagacaaactgatggaaacctagttgcatactttattgtgatgaggggccatataaaacttgctcgaatgtttcaagttatatatattgtagcaggaaaccaaaatactaccagtgaaacctaccaacagctaacgatgtcaatgccttcttcatatctcctgatgagcttatggcattaaatgctgcgactgaatcatcaattgaaccaccaggcttcagaggcacagaagcaaattcgtctctcttctgtttagatcgttgaaaacgtatctctatgggaagactggtctcgttatgaatccttgtcaaaggagaaactgagatcgataaaccatcctacagggttaataaatgcaaaagttaaggaaaagttgcatcttcaagcccatcggttgatatttagtgatctttagaaaaacttgagaatcgactatgacatacctcaagtcccttcttaatatccacaacaacaaacggtccaggatgactccttgaatctacagaagatataaaaatttcagcagtagctcccacatatgcttactcaaggggaaaacgcatgaacagatagaaggtgtggaaaacatcaaagtacctaggagtgatattatccttgttctccaagctagtgttctagcttctaacaaagaaacgttaatagaagaagttatgaactttccagaagatagctggactgcagccactggagaagcttcttgttgatgattcattgaatgcctttgaaagaaattacacattataaggatatcccacccactttttcatgcaaaagaactagacagtagtgaacaagtttctccactctcagttagttcagaggattattattttttagtacttctcttttgcaccttatgggtaaaagaagtatgcaatctactaatccgatgggaaataaaattgtttcagcaatctaatcaagagagtgccaaagactgtcagcattcacctcgaagcataattaaacacatgctcttcttgttgcggaatcaaacaaggtataagggactaagaagttaccggagaaaaatcgcagcagtttgcttcctgccaactgtggcagtctgtttctcattgaaacggcaaataaggtcaaggccagagagattttctatctgaaaaaagaagaactttttcatgtttctctatagaacaggtgtatatcaaaagtatgaaaattataaaagttgaacagaaatcaaggaaacgataaccttgcaacaattggaaagaatagcggaggttttcacagaaaatggaccagcaaactccagttttccaagcaaaaaaaggagcatatccaacgacagctcggttagaaacacctccaactgcacatacgagggaaaaatatgtaacgagttattatatatccccaatacttcatggaaaatgaagtaaaaatctttaagtacctttccaattctgcagtaaatatgggtaggtactttgtgcatagtattgttaagatcccgagtctgaaaagttgaacggtagaaagcactaacttcaactggatgaataaattcccgcctatttcaacagagaaaggaagaaaaaataaacagttgcttgacggaattctataaaggctagaaaaatgcatgatcagggaagccatacgcatattaagaacccagggaaagaaaactactaaccattggtttgtctgagcatcaaagtacagcactaatatgtttgatgtgctcataatcctgactttagaagatagcatttgtacagttagctgtgtgatattgactgaaccacgaaaaaggggaaatctgtcccttgtttctgaaagttcatggacgatggtcagagatacgccatcaattgttacagtaatagaagggggagaagagtccaccatcacagaatgcgtttcagactcatggatctcagagggtaccacaggtgtaagactacgagtcgccaaactttcatgaaacactttaaacttgaatggatttcctggcttccggacaaattctggaaaaccatcaataaatgcaacagctgaatcactcttcttgttgacgaggtaaaatgtatctttgaccagtttacggtaggtctcccagtcaatatcacccttataattttcggattcgccagaagatgcccgaaagagtgttggtgcattgtcgtaaagtccagagacgtttacaatatctgaacttgaatgatagtttaaccttaggggctctcctttattgtttttggcatacaaagatgtcaaggaaaaccataaggtggatgaattccatccttgatggcggtggtagctgacctgtacatgaattcaaattttaggggacaccatctcactaaaaagcagggtgaagaaaaaagatagctgacccgactttattttgaaacccaaagaatactaattactttctctctcttcctattgttataatattgtactgtacataccctgaaaagagctctttctccgacaagagaataatgaagggtaccagtcacaacacatttgttccccccatcttccactgtgacgaacatatgttggtttatatcttgaatagcaacaatcgctcctacacatatatcaatttttcattagaagaagaacccacaaaagaatggctaaaatattaatatacctacttaccatcaggaactacagactcaaaacttctttcagattcactgttgaacgaagaaggcctttctaaagaagcatgtgcgctatctcctccaggtatcgcagcaaataatgaaagcatagaaagtaccatctgacataaaaacacataacaggccagcaatcatgactattaacaactataggaatgtgtacatataacgagaatttcaaaacatgataaatatattatataccacaaagactgatacctgcaattctgacagagaaatagttatatcaaatcccagaacagaacaagcgccagcccatgcctggctaaactggtgaccggtattttctcgcttcttaacagatgcagagacacgtaggtcttccaaaatatagttgttataacgagagtgaaattcttcctgtaaattgctgtttgcagaaaattctcttagagaattaaaatctcctgaaacacttgtgctatcacctgaactgattacatcgctttgctgaaatgatgtttcaagaggagtaccaggcagaaaagaagaagattcgctactaaatgctggagaagaaaattgagtaatatttatgtccctttccacgctctcaagaatctttgaaagaactgacaggcgagaaacctcacaaagaaacttctgttctccgcctgccgagtcaagggaactgtggagagtgatctccaggacaatttcccttatagctcctgcaaatcatgcaattataatttcttctcgaaatgccaattatctacatatgtagaaaaaacgttgtacaagtaaataaagatagtacgacttaccatattcatcatcacacacaaaacccagtgcaaactgggcgacatctatagaaaatgcttctacagggtacccgttttcttgttgagaaggaatactaatttcagtgacgcttgaatcagcttcgaatttctcaagaactggtgcagaattctgaatcactgacaccttacttgaaattaaataaaggtacgtggagtaaccatgaattaaccctatcaaggcctttggttcaaggacaaaaagaacaccctgccagcaacatcgcaagttacttcatgcacgataaagagctagtcattatgattataaagctagtcgtgtttataatttacctcgacgctacaggagattgactgaaatcttctcccaatagaaaccgatgttacaaacttacttgaccgacgaacgtccaccaagacattttttgttgagcctttagctacaagtaagtcagtcaatgctaaattgatgtgcatccaacggattgagttggatggtaaaaggtctgaagcagagtccaacgtctttacttctctctgaacctgaacattgtttgtagaaggttcatttgctgttgatgcgtcccctagagctgatgggcttgagcaatccatagacacactcaataggcagctagaaaggcatgcttcaaacaagatatcatgtgacctgaacagcaaagattctgtgataaagttgccagaactcttccatatattaccctcaaatttgaagagaactgattggagtttacacaaatcaacattgattaaacacttatgttcttcaacagatagttcaatgcatgcttcctggacagaagaccagatttttgtatcatctagctccacaagcctctcaaatttgtcgtctactgcaggaacatcaaatatcacatctatatccttcagcttaatgcttgctttaactacaaaaagagttttgcaaggattcctttcgatctcatgttccacattcactgcatcagacctgagaaattcttgtcccgatgaatgacccccagagcttaagccactcaaaccacgggaaagcccagaaactaaacttagaagcatctggtacaaaataacaaaacttacttgaatgcttttttcataacctaaaaggtcaattaggattttgatgctattcatatgttagactcagatcttaaactaaaggagcccaagcaaaggttcatttagatagagtaactcataagtatttgagcattatgtccaactataaggaagtctagaaggatcttttctaacaccacgccggaaatcattaagaaattccgcaatcataaatagaaatcctttagccatcttgataatatcagttagcaacaagtctatatccagatatcaatcattcggctagaaaagcacattactatagactatagaggatttttaatcaagtattccactggcaaagattaacgccatgacagtatgacactatgcaagcaaggacaaaaaaggcaaacgtttaaaaagagacatgtaaatcatgctgcatctgaaactttagaatagcttatgaaacacacatattaactcatgcagccagcaaaaaagtgagaaaacacatagaaactattttttccacataatgcaaatttatagacatgaaaagcgacaattgccaagaaagcctctcttacctgaaagtaagcatttaggtcatccggttttgttacaatagtcagacccagcacaaacacatccaaaccaattgagaaatccattatagcttcgctaaaggaataaacattctctctgcaataaatcgcagttctctcagtattgtattgaattgcataaaatgtaagtggtacaatagtaagtctcctttctatgatatagtgtcaccggagttaggaaacatcttatggatatacactaactagttcaacgaagtacctaagctcagtcctataatttgggaaggatatgcagctgagaatcaattttcagcgataaattatgggggcgaacagttcgcatatgacattagaaccaaaacatgtatcaagcagcgagacaaagacaatgtttagcttagtataacacatgtagcaatataaggcaataaattccataccttaaggaggaaaagcagatagttacgggtctcactacaaaaacttgactccagttctttactgccattttgcagaaagaacaatcaaaaccagaaaaccttaggtgtgaggacagggaattccatccttgagaaacatatttttcataacttggaatcaccgtatcacttagccccagctcctgaagcaaaggcctatctgttcttatgttatcaggcccttgaaacatccttgatgacaccacgtcagatttataagtcggccagataacaaactcaaaatcatggaaatcaaataatagaatatctttcttcccaattaaagtattcacttcttcagccttctcaactaacaatttgatctgggggccaccaagaagtatgccaacctgaatctgtctctctggatgaactctatgcaaagacagttcaatactgcgcctgtagatcccatattcgtcataactagccatttcaggatcaaccccgcctgttaccaaagaacttgaatgcacctctccagtataatcgtctacaagtaacttctgagcccattctatctgccaaattagcaaagccaatgaaaacaacgatgaatattcaaaaacaatatccaactttcccaacaccatgctgcatttccagaactcggaatcttggttaccaacaacctcatatgccatacagcttttaatatcaaccagtaaacaaggcttatcagaaattgtaaaagtacttttatctaacttcatgcaattgctgttccagttcaaccacatttctctcaaaagattttgtagatgcagcataccttcatgttgatcactgccatgattgttaactgttttggaaatttgctgtgctgggtccatgtctagaatagttttcacatcttcacgcatgtgcttcttatttccttcagaagaactactgggatcttttgtagatttcatgaaacgactggtattcttaaaactagaagactcaaccttcagtttcccacaggaagcagacagatactgagtaagacagccaacagtatacaacaccaaaaactcatcaaccgaaaggcaaagcatgacaatgtttgagtccacgtgtccagtactgtctttcgatgtcataaaacttgaaattattttctctggataacatgtgacagaaagtttcccaagatttacaactgcatgaaactcaagagatacacactcggaatcatcttcattattcctatcggtttgtagttcttgggtcaacagtttgtttaaccacagaaagcaagctatagaccagaatgttctacttataagtctccagatataagctaaaacccaggtggtcttagacaaatacttgaagtggccgtaaagggaagattcgtcataatcatcatcagcatcctgagaattcagacaagctctgtatctggctactctccgtgcccgtgcaatagcttcggcagggagctctttctcaatattacatatcatctcccatttacgtcttgcagttacaaaatgccttttgttttctgaaaatttccaaagtaatgatttctctggcattttcctggagtacccagctaaagatagcaaatactcgtacgcatttacgtatcgcagccagaggataacaacactaactaaattctggaatgaaacactgtgaggtgaaatcatcaagccagttctgcgagcagcaactttccaaagataacgtccattcctgacataattgctatctttggatgataaattcgccaatcccattaaaaccggaagatcagtgggtctaaacgagaagctcaactctggaacgcggacgaccagatcaacaagttgaagattatgcagcgtaatcaacatgactaggctgtcaaatccacaaaggtcaactatttcattatccctcttatatccaatgttaaaaccaaagcaactcagcgtaaacgaactacgcctcaaagggaataaaactgcagcagccgaactcctaactaaactaagatttccaaaattctcagaatcactcctcagctcattgatttccataagacaactcaagtcacttgaacccggtaaacaaacttgtacattaataccatgtatctgaatacggaaatgcctgagaataagattcgagaatgaagtcttgagcttacttatctgggaagtgctacgaccaagcatcttttccaaaatgtcatgtaagacgcatccctgcaacacatagttacaattacgatcaatcaacaaatcaatcccattcacacagtagcaacattgatttaagtaccttgggatcaatagaagatagaactttctttatctcattagcaacagtatcacttgatgctcgcttccttctcgagcttccttcgtccgtccctctaaaaaaaacaacgcagaatctgataaaccctaacggaacaatggacttcacaaaacaacaattgagcaatgggaataagttacctagctgacaatttgacattgacaccgcgaatttcgaatttaatcgccggagctgaccaaacggaaaagctaacaactaattggtcgacagtaaatttctcaaattgaaaattcgattcatcgaaaagctgattaagctgagaaacatcgaatcgaaaactccgtaaagtgatgagagtatcagtaaaccctaattcgacttgaagatcaggttcatcgcgagaaaaagggagtaacagagtacgaagtctccgtcgaacccaattgcgaaggaacgtcatgcgaatttagtgtttgttgtgattgaaatcgaacgattcggccattaaacgagttgataagagcgggaaagcaagaggacaaagacgaagtcacggagaacgaaaccttatggacacgtgtcagtctcttacgtcggtaactcagttgtagacttgtgtaggcgatgaagaagttacttatctgccgttttcttcctagctaacgagactacctgtagtttttgtagaggatattgtcaaaagaaaaagaaaaaaaaaattaacgtcggtaacttaatttgaacttattagatgagtatgttttttggttaggacatactcctacttatgtttatgtttcttaacttcaattccagcaatgttttagtttctgtttcagtattgtaatagctctagttgccttagagtaaccactttggttacttttgtggatgtctttagatacccatttttaaatataaaagaataaaaaaataagagagagaagtaaagatgtctttaaattgtctttctagagacatttgagacatctatttttgagatgtctttacttttactattattttatgtgaaagacatctatgaaaaattgttagatattcttatgtgtttaagtggaaagtccactgatcaactttttgtaagaacttaatgttatcaatgaaagacaaagtggaaaagaaaaaaaaaagaacttattaccagtttgcacaaaatctctcaaacatctaaaaagattaaccaaaacgatagccaaatcagtgttctattgggaataagttgagaaaacctgttaatatataaatcaatttacatgttataaattcaaatttttaacatataaatcaacaaattaaattggagaagtgtcttttgtcaaatggcaacggtttatctgcaaattttttccaccaaaattatactccaacaagtcatatgttactccacataataaagattgaggtatgggttgggtttttttctatccaataattatatatatataaaaaaaaagtcaacaattaaatattccgaaccaattatagtttcatggtccatcttggctatacccaggcatcgaagaagaagctcagccattaattttcgctattcattctgtttttagttgttcttgctttattgttatgcttcttccagcctctaatgttatgatggttaaaaattaaaaatcacaatacatgtttattctactatcagattttgaacgttatatatgtataagagtagatataaaaattgttgttttttttccttcctttttaacttttaatataaaatggcaacgaaacaaaagaagaaaatgtatgaagtatgaactatcaagcaacggaaagatggttttcgttttaatttacttacgagtttaggaccattaaattatttaatcaaacctaataataagttgtacttgtaccgaaataaacggttccaatttcgaataaactataaatggaaagtaaaaattccataaattccatatagacaccatcgtctccaacctttttcttcttctccgtaacctaaaactctgtctaattataaatccaaccaaaacaaaaaaaaagtccatcatcttcttcttatgtcttcaatgcataagaaaggtacaagcagagacgtaaatagccaagcatttacaaaactaacgaaagtagaaactattccagatccagacatttacgacataacctacgtagatatctctccctccgaaggctcctcttcaccattatccaaatcaccatggtccgttcaagtcgatccatccgccgtagattctccgtatcattcggtgaaagttacgacggatacaaccaaagaaaaatcaaccaaccactctcctaatattctcttggggtcacttgttcgcgaagaaggtcatatctattcattagctacatcaggagatttactctacacaggatctgattccaagaacattagggtttggaaaaaccatgttgagttctcgagttttaaatcgaatagtggattggttaaagccattgttcttgctggagataaaatctttaccggtcatcaagatggtaagatccgtgtgtggaaagctgcatctaaagaatcaaacgttcatcgtcgtgtaggtacaatgcctaaccttctcgattatataagaaactccattgttccttcttcttacttcaacttcacgcgacgtaatcgtagcagtgctgcgttagggtttcgtcatttagacgcgatttcttgtcttgcgttaagcgaagataaacggttgttgtactctggttcttgggataaaacgtttaaggtttggagagtttcggatttgcggtgtgtggaatctgtgaacgctcatgaagatgcggtaaacgctgtcgtttccggttttgacggtttggtttttaccggttcagctgatggaacggttaaggtttggagaagagaagatcaagcgaaggatacgaaacatttcttctctgagacgttattgaaacaagactgtgccgttacggcgatcgctgtagatcaaagcgcgacgttagtttattgtggttcgtctgacggaaccgttaatttttgggaacgtgagaataatatgaaaaacggcggcgttttgaaaggtcataaactcgccgtgctttgtcttgtcgcggcggggaatttgatgtttagtggttctgctgatttagggatacgtgtgtggaggagaccagaaggtggaggtgagcatgtttgtctttcggttttgaccggacatgctggtccggtgaagtgtttggcggtggagagagatcaagaatcggtttccggtgagagacggtggattgtgtatagtgggagtttagatagatcggtgaagatgtggcgtgtgtcggagagttcaccgccgatggtgaatcaagagtttaagttgccggatcagtttggtggtggtggtggtggtggtccggcggagttaacggtggctcctagcttctcggctcaagggaggattagtccacaaaaatagttgtttgttttttgtatgtaaccaacatcgaactattcaaacgtgtatgtaattgtaatttcttctgttaaaagagattttgatccaacaagattcaagcatttttcatttcgtggagttccggttcaccttaaccgggaatctgacaaaacattacttacttccatcaaaactgtaaaatttcagtcagtgaaatgattattcaaatattcatgttcagaaactctaatgatcataagacaagaatgatctcataatctgaatttttcaattgcatgtattagctagagaacaaaaaatcggtactgatttgaaggcctaaaaagtctatgttgtttagaacgttcaaatatcttaccatgggaatgaaagtggacacgagtcatgtgatcatccttttggcaccattgttttgtcttctaatcgaacacgtagtgtcattttcatatcttcaatcgtatattttgttactactagtcaagtttcttcttatataagaaaatgggacatgatggattatgatttaagtgttccaacggtaggtaatgaagttaattcgactttttttaatcattttaataatgagatgtttggtgcgtcatacataaaacacaacatcaggtctcatcattaggcccttttttagtaatattcaatgttttcttttacattttcatatcacggatccaagtaattaagaaaacaaaaaacaaaaaacgaacctaatttatatacacatttcaacatattaatagttggtagtagtaggagataaattgatatctagttaaataatcttataagttttgagataattggtcggcgttacgactgtattatatacttctttttacccggttagtattttcctaatgagaaaaaataaataaatcgattcatgaaataaaataattttgaaggatgatgacatgatgtaatagagttaagagtagataccatgaaacaagggtattttattttcaaactttctaaaccataaagcacaacacaacagtattggtgtcctaactttatctgtcttctaataaatattaaatagaagaaataaaatcgaaacatgttgaccataaaaaaggttttgtttgttaaacaacccggtttcaaatctaacacatgaggttgcttctcatacgttcttaactagtagcagcagagttatctatataaactcttctttgtcatagaacaataaaaaccaaaaatcaattttcagaaaccatttcgtgacaatgaagaaatctattttctttgtcccagttttggtattattcttctttggatcaagattttctagagtagctagcgcaggagaccaaagagccttagccgcttcattcgtcttcggcgattcgctagtagacgcaggaaataacaactacttacaaacgttgtctagagccaacagtcctcctaatggcatcgatttcaaaccatctcgtggaaatccaaccggccggtttactaatggccgtaccatagctgacatcgttggtaattttattataaagttgcatccaatatataaatcaaattttcattttctaacgatcatgcgctaatgtttttatttttttattttgttgtctataggagaaaagttagggcagcaaagttatgcagttccatatttagcaccaaatgcaagtggtgaagcactattaaatggtgtgaactatgcatcaggtggtggtggaattc

SEQ ID NO: 1073 - DNA, 83513 bp, Arabidopsis thaliana
aagcttgtcgtcgttactggactcacggtggtactctccgtgacgttcctgtcggtggtggtactcgtaaaagcgcgaaacgttcccgcacttgctcgaactcttcttcctcctctgtttctggtgtcgtctctaactctaacggtgttccgttacaaacgacgcctgttctcttccctcagtcgtcaatctctaacggcgttactcacacagtaactgaaagcgacggaaagggaagtgctttatctctctgtggaagtttcacctccactctgttgaaccataacgctgctgcgacggctacgcatggatccggttcggttattggtatcggaggttttggaatcggactcgggtcgggttttgatgacgtcagctttggactcggaagagcgatgtggccgttttcaactgttggtactgcgacaacgacgaatgttgggagtaacggtggtcatcacgctgttccaatgccagccacgtggcagttcgagggtttagagagcaacgctggtggtggatttgtctccggtgagtactttgcgtggccggatctttccatcacaactccgggaaactcactcaaatgagaaaagcttctgtcttcatcaaagggcttcaaagtctcttcctttttttagtctctattggtgatgttgatctcttagtttgtgtcttgtcaatttagaaacttgtcttcggaaactagaaaacagagaaagtttgtgtttttttggctctatgttcttaactttggtactttcttctgctctgtttcgtttaattgatttcgaatggaaatgactaaacttgtttagaacaaacttttaatttgaacagacaagtttattgaatgatgatttgcacaacatatttctctttaatctatttaattcatcttgagcttgacttacaacttctgggttcgactggtctcctgaggagaaaacttgtgtattgttgttgttcacttcaatccagctcaatcctggatctttagatgaagctaatcctctaatcttccttctcatctctgcaacatcctcccatctcccatttactgcatataaatttgatagtagaatgtgtgttgcagtgtcttctggatcaagtttcagtatttgctcagctgcatatagtcctatctgcaagtttcttgtgttaacacatgcgcttagcagagttctccagagctctgcttggttgttcccgggaggagattgttctatcagttccagtgcctcgtctactaacccagcttttgatactaaattcaccatgcaagagtagtgcttaaaccctgctttgatgccctgttccttcatttggttccataggaacttaccttgcaacgttgatcccctgtggctacaggctgctaataaagacaagtatgtaacagcatctggcatgaatccgttttctagtatttgctcgaagaagctcagagctttttctaccattccatgctgactataagcacctagcatcgaattccaacatttcaaatctggatttgaagcaagagagaatattgtttctgcagtttcgtatttaccgtttttcccatacatgtctactagcgctccacatactgacataacacaatcgaatcccgtccttatggcaagacaatggaaaacttcaccttgtcttagcattgccatatctgaacatgctcctatgacactactcagggaaaaaccatcacttctattcttttctctgtacatttcaatgaagaattggaccgctaattcgctgtttcctaatctagaatgccctacgatcatctcagtccagagaacaacatccctttccttcatcacatcaaacaccttctgtgcagattcagcttccctgttcttgaagtacatcgacaatagtgttgttccaacaaaaacactcctttcatatcctaatttcgttacttgtccgtgaagaagcttcccatgaacaaatctttctggttccgctgtcgcagatatagcagcagagaaagtatattcatccggccgaggtgtggacatcctcagcaaccttctatacataagcatcgcttgctctccaaagccgttttctgagcaccctgaaataatcgagttccatgaaaccaaatttgggttatgaatcctcccaaacacataaaatgcttccctcatgtctccacaactgcaatacatgtcaagaagagcattatctagaggtaaatcagctaaactatcagagactattatccgggcatggattagtttccccagtgaatagcttcccaatttactacaaccattcaacacaatcgaatacgtgaactgcgttggatcaacaccagacatcaacatgtttcgaaagaacataagcccatcttctatcttatcatttttcaaactcccaactatcattgtgttccaagcaaccgcatctctattatttacacagtcaaatattctcctcgcagattctaagtccccgcaactagagtacatccccaaaaccgatgtctggacaactacattatctgaataaccaagctttataatctgcgagtttaatgatgaccccattaaaacatcctcaagcacagcacatacttgcactaagctagtgaaagttgaactattgggcttcacgtactcaaacgccatatgggttgttagaggaaacgcataacttgcaaaatctgggttccgggaatacgccgaataaagcgcattataagaaactacgtttctgtgaggcattttgtcgaacactttccgtgcttgttccagtgaaccacacctcacatacattgagatgagattgttatttgcgtacggagactcggtagcggcgccagcgccggcggtgaggacgagagcgtggatctgacgcgcccgttttagtaccgtgatcgagacgcatttccgtgtaagttctacaacggaagaagctatttcgttcagtggcataaaaaagctaaagaaagcttcaggttttccaaaagaaaattgaaatagttgcccttttaagaagattgtcctcgcagattctaagtcccctcaactggagtacatctacatcatctgaaaagatccaagctttataatctgcgaatgcagtgatgatcccatggaaacatactcaaatacagcactaagctagtgaaagttgaactaatgggattcacgtactcagacgccacatggattattagactaaacgcatatcttgcagaatctgggttccgggaatactccgaatagagttacaatgtttctctgaggcattttgtcgaacactttccgtgcttgttccagcgaactacacctcacgtacatcgatatgagattgttatttgcgtacggatactcggcagcggcgtctacggtgaggaggagagcgtggagctaacgcgcctgttttagtgccaaaagttgtacaacggaagaagctacttcgttcagcttgttcgcagggcggcaattcacattctctctataaagcgaagtttcgaaacgatgcgtttcatttgaactcaccttttaaacgccgtgtttgactttaaagtttaatctaacctgtctctacaaacaatacgctgcgtttcatcgaacctctcgtcataacaaaaacgctacgttttaataagagtttattgatccccggcgagagtgaactgtcgtcgttgtaaaatggctaccggaaacttggcttctcgtcttcatctcttgatcgatctttgtgttcgccaattccctgtaagtattattcttcagctcttgttctccgtttcgttatgagttattgtaactatgtgtaattgtataaacgcaattggttctcggagtcatgtaggaaagagaagaagtaactttgccgacgaaggaaacggaaaaagatctgcttctttctctatctcaggttcatcattgtcgatgatttttttgcttcctgtgtgttaatcctcgaagctccggtcctcttaaattggatagttttttttttttttacaggtgttgagagaaattcaatcttggaggagcgaaatttcatgtgataaggcggtggtgagttcattgctttaagaattcctaatattttaagattgtataggttggttgatgagtattggagctatttgattagctaagattttcaataggaatcgcgagaggagactgttgttgatcatgatgaatctgctgatgctttatatggtccagactctatagagtatttatgcttagaaagacttgtggcggatcttgtaagtttctcattctgctgttaggtagagttgtctatgatccttagcttgatctggtttctctggcaggtttgtttgttgggtatggagaatgtgcatgttaaacatttggctggcaacatacttgtggaagtatccggttgtcttgttgaatctgtatgttacatctgcctcactcgggattttagaatgttgtattcttccagctctcatactcactcatttgtttttcctagggaagtcaatgggatgagttcattcgtttgctttgtgaatgtttgcggttagcagttatctacagtttcccaattcctgctgtaggatctgaaactggatttggaagtctagatcaatgtttcttcggttctgatgttcttaaatgtaagctggaaaaggctaactggtccacggtgtcggatatctttcgagttcttcgtaatatattgaagcgcttgagccaagaagacaatgaggaaatttttgatgtatacttggaatctgtcaactctacacttgcaaaagttccttggtgccgattggatactattttttctcatcagcatggtagtggtgaaagaaatttccaaggtcagagtggaaacagtgaggaagcaactgtatttcttgggagctttgtccagtttctctgttccatggttcagcaggttcatgttgtagaagattctgatgattttgaaccttcatatttgatcctccaaaaaaccatcaagcttattccggatctcctccgttggtgccaaccaaagttgaaaagtcaaagtggctcttgcatgtcaagatacctagggcacaagttactggtacgtatttccatctgtttctaatcttacaagttcagagaaccactttgctttgtttcttgatatatctcggataataacttcatcctacacgactgtctccccctttttgtaggtgttgatgatcaggcttactgataagtccaaaatcaaatgtaccattcttctttcatggctgcaatatttgcaacgggattctcaaggctttcttcaacacaccctaacaaagtttaaacccgttcaagataattgtttggagggttcgccattctttgtgagtttgtctgatagggaggtcaatgagatgcattctaatcatttgcaaagactctctgtgtttctgttcctacggtgctccttcactttgatttactcaagtagacataacgacaagctatgtgagtttgattgtagaaagaaagggatggcagagatgtttaaatggattgaacgacagattccaggcaatatgttttctgatcacagaatttatagcaagaagaatgttgaattttctgcatccttcgttcggctgttcatgcatgaggtttgggttatcattctgtatttgccattcgtatttggtgttttagtttaacaccatacactagagctctgttataacttttctatgttaaactgtaggatgatctattatttaaagtcctcctgcaattgctgtctgtaccattgcatagacaggaattgtaagtagggtaaaacacttgcctttctgcaaacagttatctagatttctgtgagttcttatgggcatttttttacttacaggcctaacgtggaagggggttcgcttgaagatgaggaacaaattactctcttccgtttatcaaccttgttcaatcctgtaagattattctgtatatttctttcagaggtaattttcatataacattctcataatctcttgtgctattttccatttaggcttggtaatatgttcatcattcacctctgtcttctgttttcagctgcattatgatcatcaagtacttcttgattaccttatatctaaagatattggggctagctgcgcagagtacctgctgaggttaatccttttctcttaagaatttgcatatcaactgctccatcttgagtaataagattggatatgatctgttagtttgtgtgagaccagccatgttagctcgtactctagtctttgaatgatttctctagtttacaaattacgttatgaattttccaaacaaatacttataggttgattcccatatgacatccgctgttttttcctggtagatgcttgcgtgcagtatgtgattcatggactctatttgtggaattcccatttgaaggaagtacagatgctccatctccgaagagaagaaaagttttgcctgagacttctgaggttgaacaaaactggagattacatgcccaggcttttgaagacgccaaagattgtctgctttcgttacaaaattcagttgttaagctacatcagaagaaactgtttccatacaacccagaggctcttctacgacggtcagtcttattttcgcaacttgtaaactcacctacgcatataaatcagctaaataaaccttcttctattgtgaggcagtttgtcaaggtttcatgagctctgtctatcccatgagtaatatatctggaccaaaggtaaatcagttgcaaatatggattcaaaagaactgttatatgaaaattgtcatatgcttatggtttagcaaaatgttgtgatccttagtttgtgggttgcggtaattaggaagtcagattcaacaaattatacttctctgttagctgctagataagtctctaacctctcaatttggtgcttctcaggtgagattctctgagacagaacagaaggatcagatgccaacacaaagaagtctcctttccagatcaaatttcaaactaatcggctcaccagtagaagtgtatgtaagtttgagaatctcatgtctaatcgaattttcttggggtacttctgacacaagtgtagctgacatgagctgtgtttctgcagagagatcctacattctttggttggtgcagctgctatgaaacagagagcattatgttcttgcctccacaatccaaatctgaatggtataagatactctctagtcaagctaatgtgaaactgccccagccaattagagtaagcaatgaagtgtagaatatcaagaatcacaaatattgaaactctcttattcatatcatagatgtaactgagcccaaatcatacacaggtgtcatcattttacatttagttatatttcgctgctatttcttgtagcagttgagaaagttcatgaggcttagtgagcatagccatgtgaccagcttcttcaatccgcttaacttcgtgaggctcgtagttactaatcatccacttctgaatctcctctggaaccacattgtcgccttcacagacaataaacactctcttcccagatccatacctctcctttgttatcagatcttcacctcccatttccttagtgtataaccagcttggtttcatcaacgccatggctaattctagatcctgcaatcagattaccaatcagtgaccacctgatctcagacaaactatgccataatcataactgtagtggactcacctctaactggcaattactatatgccttctccttcaagaaactagtaccgaacaaaactgaacttggtgggtgttctaatccttcctcgaatgtaaactcacagtccatagcgaaaccctctggtagtctcgtaaaatactgcaaacaaacagaaagtgacaagagattataagataagttcttaagaatggtaccaaacaaaataagataagaagagactaatttctttttccggcgacctcttgaatcaaaaccgccggaggagagtcatggtgcggcatgtaagcagagaggaagattccgacagagactttggtcggaaacctttccatagcaagagaagttccaatgccaccatagctatgaccaacaagaaccactttctcgttttcagggagagactccatgaaactcatcaaaggctctagatacgccgacaccaaacgaacctcatggagctgcctcgtgtcgacaccggagccaccaaggtcgatagctgtcacacggtgaccatcgagcttgagctttgcagctagtttgaaccagcaccatgctccatgacatgagccgtggacaaagacgaagtgatggagttgttgttgctgcatgtggtgtgtttgcatttggtattgcttttggtatgtcatgttatcttttgtccattcgtttgttatatatatacacatcagggcacatagttttctggttctgcttataactcttggtttaccaattcgaccttatttggacggttaggatacgtgtttcatactttatctgtttatgattccaagaaggcaataataattacagtataagattaaggaaaaaatctaaaaaatctaaaaatggggtgaatctcttactccctctgtttctatatgtagttttaggattttgtttttttgcaaaataagtgttagttttatttttctatgcaaaaattaaatgtacttaatagttttagaccaattatgttttacatcatattttcttattggttgatttagttgtagttaatgatattttattaaaaatagatgtaataattgaaaattttgtgttttcttaatttgtgtaaaaaatctgtaaactataaataatgtgaagcagagggaatagtatttaaaaattacacaattatacaatctcttattatgttttaaatattgggttatagattatagtatactgcgaaaggtttatgattacaatttttggttatactcacaccttaccatgtaaaagcaaaaaaaagtattggacagttaaagttatttttattctacggttttttttgcttcgaataattacaatttatgaaaacattaaacattctaaagccatttaaaatggaccatattcttagtctaactgtctatatgatcccatattattatttcgtgatacgaaatatatcatacttttttttttttaagaatgatgtttacctcttgtttgaggtttgtctttatgtacgattcataaaatcgtcggcaaaaataaaattttcaattagtgggttaattattcttaattagtggagtaattgatattatgaagtagaaaagagattgcgcaacaagaataaaatattagtcggttaattaagggtttcacgcaaaaaaaaagtaatgactttttgttaatcaatggaaagaaaaaaattggacggttaaagttaagaacgtgtgaaaacaatatgcaaaggcattgtggaatcagaagtccatagtgacaattgacaaatatgaaactgttcaactttttttttctttctatctatctctttaaatcttgtcagtgcaagtcagatcagttaattatgacatttactcggccattgcaactttttcgagtcagtatttggttatctaaacgttacaagagaaatgacaacaagagaaatataacgtttgattggatacagtgtacaaaatagactaaattaaccgttctattttagaacagtcaataaatcatcacagatgatgattttttatgtaaaaaagtctgtagttagtcagcccaataccgtttttttttcatctacactataataaattataggttacgaatgctaaataaaaagcggttcgaaccgcaaacggattcgtccgctctaatcgccataaccatttgaatccataaggtattataataaaaattaggtgagatgcatatttttttgtgtgtttaagctttctgtctgagatattgtttttcttcaaatattggtaatggctcaagaattctcaaacaaatttcttattttaacaatgtagtatataataatatctcaataaacacttatttgaatctagggatataaactggatatatttggtgcttttcataattgtgctcttcataccaaaaaaaaaaaaaagatggtgctctttatttatacaaatctaaaatcgaaaaaatttctaacaattttagtcagtctaggttcatatttttatacatatttaaaacaatatctttaaagataaatagattgagaagaatataacacatgtcttaagcttatttgacccaatatactgtatatgcaattattttcctttctacaatatccttttagtggtattattaaaagatcatttttgggggttattttgcttaattaagaatgaataaattttgaacttggaaggaaatccaactacgcaagtacaacccaatgccaaaataagctctcaaagagaaagtgaagaagaagaacaaatattacatgctgtggtttcgggtcgggaggaattacgaatttcggcttcggccaaaaacctcctggtatttaaaaaaaaaaagaaaaaaaaagaagaaataattcattacggaaaagtataaatgacaacctaataatggaaatagtccaaaagcttgagagcactaaaagagaaaagagaaggaaacaaagagttgaaatagacgagagaattaaatatctatttagcaatttacagtaacatgtccttcatatagaaagacaatagatctatcaataacgaatgacctcagaagaagactgttacgatcatcaagaggcactttcaacagtaaatgcaactaaaagaacgtgtgtgcaaaatgagttaaaccctgatcactgtgagataagtcatgagcggtttgaagcatcttgttggtcacgtttatctcaaagatcctttcgaagatttcccataaaaaaaaaaacaaaaaaaaacattagaattatacagagatgattagtatgacccttacacaatgatgacacgagaaacggcccaaaaaattgtcatagttttgatcgggaaacccataatttctaatattgggttaacttagctctaatattatattgaaaaatgcatgggtttaccatttaaacctagttgacaatgagtaaaaaatctcatgttgttataaacggataatctatcttttcgattttattttatataagatttagccattaagagactttttctccaacttataagattttttcaccaagccttttgttcgtatatatatatatatatgttggttcgttgttaaacaagatataagaagaataagaagtctttcgttattattctctacatcttcttctcgtgaattctttctcatacacatatattaaaataataatattgagcagtgttatattttatgacacatgttgccttatatattagagtaaaaatacccaatctatctatgtgagacattttaatatagactgatctagctggggaaagtgattttagaggacatatatgacaccatcgttgattggaagaacaatacatgaacattttcttgttcataaatcattatgaatttatgattttgggataagacctcttgaaaagattgtagaagcaaggtcctaccacaacctctttcctcatcagatgcttctacaatcaatgatagagaagatgagaacaagataaatatcactttccacaatgaatagcacatgtttacctcaagggtctacatctactttagaatggtgggactttcccaatttgggattttgcagcctgtgtcacagtaagatttgatgaaccataccgttcaaaatagtgttcctgatccatgatcgttgctttgcgttttcacttaatagacaaaaacaatcaccatgtatcaagatttgatccttcctaacttgattaagttgcataacagcacaacctaaggcccatttaataatttttaaaagcccaaaaggaatgtttccctgaatttccgaccacgcgcttaaaaaagaactcgatttccctgaattttggagatttctggtggtgtattacacgcgctataggtgcgtctgtgtgttggacacatgatatttcttttttgttcaacgggatacatgagaatatatactaacattagttcacaacaacttgaagaaagttatcttaactacacaaagtcaaaagattctataattacaaaattagagcaatttgaaaaagttaattcaagtatgtgtatttacttagaaataaaattatttgttaacaaagaccatttccacatagagtcatacgataattaacctccggcaagaagttaaagccaaccacgtccttaaattccttctataatatcgattagtctccatttaatcaaagctttaaagcttttctgaagaaaatgcctcttgttgagcttcttacaagtgctgctcttggattgtccctccaactccttcacgacgccatcataagagccaaggagagatccttaatcacaagatgtatattggaccgtctcgatgctacactccataagataactccatttgtcattaagatcgataccctcaccgaagaagtcgatgaacctttcagaaaagtcatcgaagagcttaaacgtcttctcgagaaagccattcgtctcgttgatgcttatgcggagcttaaactccgaaacttactcaggaaatataggtttgtgaatgtcgttaatcatttccatatgtaaatgtaatgtagtgttaaattataccaaccaaagtatatactttaacaaaaaaatatcctaccaaaatcttttatttttcatgcaatttttttgttgttgttgtgaatctttctttaggtacaagagaagaatcaaggagttggactcttctttgagatggatgatagatgtggatgttcaagtcaatcaatggctggatatcaaaaaacttatgggtaagatgtctgaaatgaacactaaactcgatgatattacgcgtcaaccaatggatatcatcgaagcaactggtcgatcttctgaagaagatggatgcacaaagccaacgattgatatacactttcgatggaaaaaccagaccaaagagcacgagatccggttcatcttcaaatgatttgttaatgtaacgatcgtgtcctagaccacaaaatgttttttgagaaaaaaaaaactcaacaaatgtgatatagtttttggagtgttggaattattgtaggtgaatgtgtgatgtaagtattaatttaccaacattttatcttattacttttgttaagcattttatattgttattactggaaattgtataactaatatattaattagttcacaaccttatgttattataaacttctgagaacattccaatggttgacaagacaaataactcttgtgccttttatatacaatatctcttattagattgaacatcacgtaacgtatgttcatacacaaatgatttgacaacatttgatatgtcttcataaattgattgcgagacaattgactatgagataaaaatcatccaaaatccaaactaactctgcatggatacatatcaatttgcacacttagtttcttattcgtatgagatacaaatgtgcatgatgcatcataagtactctattatagttaaaatttggttaagaaccaactattatctatctgaatctctattatattatattactagaagttgtcccggatgcatggattatatattcggttttaattttgaatatagaataatatttatattaaattagatataaactttatttataattgttaatatatcgctcaaaataattaataattaataatagtaattttgatatttacaaagtatgatgtgtttagaaagacacattagttgattaaaaattatgcacacaattgctttttttgttttgtgaaaacagtatgttttactattaaaaaaacttaaaatattaagtatttgtttttgtgaaaatgcaaatgcatgtattaccaattgtcttggaaaaaaaaaatagatgaaccttcttcgtaggaaaaaagtcagttcagaggaaaaaaaatcatataaaatatgagaaatgtacaaaaaaggacaaattatatatataatttatctataattattaatatataactcgaaagtaattaaaaatattaattttgatgtttacaaattatgatgtctttaaaaaagacactttagttaattaagagttttcaatgcactatactttattttctgtttttttccgtgaaaaatgtatgttttaattattttttaaacttaaaatattctttttttttgtgaaaatgtaaatacatgtattaccaatttttttgaaagttgaagtaataaatgaaccttcttcacattaaaaaaattaaagcatatgatttaagatgtctcttggaaaacctttttacttgactaaaacccttttattcaaattatttgtaatatttacgtttatttacgtttatcaatttttcatttccatcttatgaataatcactctctcattttccactatattcatgtatatatatatatatatcttatgttgttatatcggtaaaacacaattttatataataaaaagatagaggtaagttgattctttcgaagaaccggaagcgaagcactatgctgaggtgggagaacgggaaaagaaaagtcctaaaagtaaattggggttctctttgcccaatgagatgagccaaccccgagatgttttacgcccaacccacaaggttctgagatagagattaacttgagtcttggttaagaatgttatgatctacgatttcacactacacatgattccatgtatagtgtcattcgacattgtgatggaagacatagcttatgatcatcggttttgaacatgacgctaaaaatttgattaagatatctaattattaaaaattaaacttcttatatggataaaagatttagcatattttggtagcgtaatgtagatttgtatgtggtaggacaaaataaattaactacctatagcaaatgagtgaaaagtttgtatatatatttctaccctaaattatgttaaatacatgttttctgtggataatgttgtctattggcaacgactgttggcattacgctaactcatcaaggaatcattattacttctctccaattcatgatcagcttttgacacaagacaaaaaaacttcttgtgtaaaaaaagctaaagagaaaaaactgatgttacaaaaactatgttaatatgattcgagaagttaaaataaggagaacaaagaaatgtaactaatagttaaacttttagaggattttctgatttaaaattagaacatggtaaaatttataaaattatggtataaaaaaaactaaagatggaaaaattcttgtaaaattggagaattatttatagtagtgaactattactttgtagtataaaacataatatcatgtcaaaaatttaaaaatttgattttgtaattagttaagggagttgcaattatgctagaaaaaattcatttcaaaattgtagtttaatatgtagtaatttcatagtttaatgactatttttctaaatatatgatatatctattaaaaaattattttagtcaaattacaattaatgataagtacacgtgtcattaaagtagtgtaccaaatgtcgcattggtaggcaaagttaaaaaatgttataaaataatttaataatatatatataaaatatttatgactaaataaacattaaaatgtttaactacattttaaataaattaatcgttttatagttggttcagaacaccttggttgtcttggtactgtgaggaaacaacttaattttgtttagtgaatatctaaataaggtttcatttaacattgtcaaacttaaaaaaaaaaaaaggaagtaaactaagatgacaaataaatacttttttctatatagtaatctttagtaatcatagtctaagaatttccctctatttcatgaaaataaggtttcaattaacattgtcaaacttaaataaataaaggaagtagaccaaaaaaacaagtaaatactcttttctatatagtaatctttaatattcatagtctaagaattttcctctatttcatgaacttcttcaaccttcttctttgtcttctttgcctagacagaaaaaacaaatggagatacacaatcacggataatgagtaggtactttcggatttgattattctagcaagaataattatgcatctcaatggactttaacaacaccagagaaaactttgcatgtatttaccaaatatttatttagctagtatatcccataattgttgtgaaattgagaatttgaattttcaaagaatatactatatacaaatataagttagtgtagagcttagatgtttactgaacttgtaagaaacacatccaaactctagaaagatatatcgatgtacaactaaaatatgcaaaaaaaaatgaaaaacggatattgtatttggagctgagcatttgagacacttgagttgccaattgcttcttctcaagccatgcttgttatatagttgcattcttaagccatttttagttatatattaagtcataaattgtactttaatgtggtgatcaaaatattgtaacttatgagatataaagggtcataaatttttggatcaaagtactcctaaatagtgtttaataccttattacggttaagcagctaagaaaatgttaagagtatgcattaatggtaatctataatagtaaatataataattttttattatcaaaaacatataaatagtgataactttgtactctaaaacataatatcatgtcaaaattttaaagatttgattttgtaattagttaagggagttgcaattatggtagaaaaaaattcattttaaaattgtagtttaatatgtagtaatttcatagtttaatgactatttttctaaatataagatatatctattaataaattattttagtcaaattataattaatgataagtacacgtatcatcaaagtagagtgtcaaatatcgcattggtaggcaaagttagaaaaaactttctcttattatagaagatttttatctaaccagacttcttgtaaatccttcttatgggtcacaaacgcacaatcaaatgcggaaacataaaatattcacttgctttaacaactactagctgtaaaccaaacttaacaaagaggtaagcgaaacatttcactataattagtaggatcaatatgaaagaaaaactttttctatatttaatctaaatttagctaaaagagtttccatatgatagtcatcataatatttcacgataatgtcaatatagaatatacaatatttctaccaatataaattagaaaaacgagaatggacagaaacgttaggagatttcagtacacgtcagtgattaatccaacgtatgtacaaattcgatcatttagaatatgattatcttccctttttttctttagtttcatatataacttgaaacaaacaaattaattttcattgagaatgcttcactgctcgctcttctcttctttaatttcatagtcacaacaagttgatcaaaatattaatatttaacagaaaaaattaatccacattgagactatttctctactcctttttctttaattccataatcacaacaagttggaaaaaatcaatccaaataagtgtttttgtcaaaagaccaattcaatattgattcattcatatactaacctcgtgcgatcgagagctaaagctaattgcaataaatctctttgtaatttaagtaatccttaaaaaaaaactatacaaaatgcctcttaccgagattatcgcaggggctgctcttggacttgctctccaaatccttcacgaggccatccaaagagcaaaagatagatccttaaccacaagttgtatcttggaccgtctcgattctacaatcttgaggatcactccactgatggctaaggtcgaaaagctcaacaaagaatccgatgaatctctgaggaaagtcttcgaagatcttaaacatcttctcgagaaagccgtggttcttgtcgaagcttatgcggagctcaaacgcagaaacttacttggaaaatataggtttgtgaatcttttggtctcgtatatatatacatgaaataatgattttttttttaatcttagatacatgaatacttctacatattacttgatctcccaacattatatagacaccaattaaacaaaaacctatcatttttttttgtttcatgtatgtatttaattacatactaaagtgtactgttgttttaggtacaagagaagaatcaaagagttagaaggttcattgaaatggatggtagatgttgacgttaaagtcaatcaatgggcagatatcaaagatcttatggccaagatgtctgaaatgaacactaaacttgaaaaaatcatgggtcaaccaatagattgtattatatctgaagataatactaatatggacatagtcgaaagagttgatccatcattggaagcaaaagctggatgctcaaatagcgattctaagccgaagatcgatatccaccttcgatggagcaagcaaagcaaagatcacggaattcgcttcgttttgaattagttttttttttgatgtggtatgtgtcatagaccagcaaaattgagaaagaaaataatcaaatgtaaaaaaaaaaaaaaaattatacttacgaatattgtgttatcaacttatcatacatataacgcctgcttgtataaacaaaaaagaagattggttccaactaatatgtaaattaagatttttggatttttttaatgcaaatgtacaagtcaacatttaatcctactgttaaagtcaatcattgagattgattctcccttcttcgtaatttaaaaatcacaacaacttgcatatagatccaattatctcctttcacctagaaagaaagagagtcgactaattctaagtctttaagtcaacgtctcttgtcttcatatagttcatcaaaaacaaaacgttttgttaaacaaaagattcttcaatggtttcatgtatatagattgctccatacaatcacgttgagagctaaagagctaatctcttgacccaaagaaaaatgccggttagtgagattatggcaggggcagctcttggacttgctctccaagtccttcacgatgccatcaaaaaagcaaaagatagatctctaactacaagatgcatcttggaccgtcttgatgctacaatctttaggatcactccgttggtgactcaagtcgataagcttagcgaagaagtggaagattcaccgaggaaagtcatcgaagatcttaagcatctccttgaaaaggctgtttctcttgttgaggcttatgcggaactcagacgcagaaacttactcaagaagttcaggtttgtatacaatccatgaaatgcatgaattcttttggttcatacgaagtcttcttatttcttaaatttaatagttaaaaataaaataaaaaattgtttgttttgtcactacttaaaagatggataccattagaatctcagattgagatactgacttacagtgattaatttcatggtgttttaaaataagatatcttggattagctaggaacggtttacttcaagttcgattcaagtttttttcaagtgaaatctttttttagatgagcatttctataagtgattttcgtaatttctcaatataaatctaacaaaacttatcattttaatgaaataacatgagtattaatatttttgtgttattttgatctttaggtataagagaaggatcaaagagttagaagcttcattaagatggatggtagatgtggatgtccaagtcaatcaatgggtagatatcaaagaacttatggccaagatgtccgaaatgaacactaaacttgatgaaatcactcgtcaaccaactgattgtatttgtttcaagagcaatcatagcacatcacaaagtagtagtcaaaatattgtcgaagaaacagaccgatctttagaagaaattgttgaatgttcgagtgatgggtctaaaccgaagatcgatatccacattcattggagttcaagaaaacggaacaaagaccgtgagatccgatttgtcttgaagtgatgattcttgatgtaccaattgtgtcaaatcactcaaatgtgatagtaggactaatttaaaatgtagactcaactttgaaataattaggagaattccttattttcctcaggtgtaatgctatcatttgtatataaaatgaacttattgtagcaggatcggccacgaaaaccctcgatattagatgtcgacattctggtgaaagatgtaagtactctgggatttagtatatggtactaaggattctctgcgatttaggataatgaatgagatagaaagaacttagaaaagaagctttacttgtattgtctttcgataatctattggccttgtggatcttcaaatggatatgctccaaccaacattacatataaggttacggcgcacatttacaagctgcatgtgtattttagcagcagcgtaattcagaacctatcgtatttttgttttcatgtaataacatacaaaagtgggcagatattaatgaacgttaactcatgggcaagatgtttgaaatgaatactaaccaatacactgtattagatctgatgaggataagactaatcagaacatagttgaaagcgttgatccatcattggaagccagagctggatgctccgaagatcgatatccaccttagatggagcaagcaaagcaaagcaaacatcacggaactaatattttgaggaggcaggtgtatcataggcctaaaaactgaggaaaatataaaatcaaatgtaaaagtttgattgattattattttaaaaagtcatagattttaatgttagtatttacggtaggtattcaccgaaattgttagtattcacgtttctattcacgaaaattgcgttgatcatacatatgataatccaaactacatgtatgtacgtctgccttgtacgtaaatatacaaaacaagatcgatcggttccaacttatttgtaattcagatttttggaatttcggtggaaatgtgcatgcaattcgacgattctacgtaaaaagtcaatcattgagatcgattttcacttcttcttcgtaatttaataaataataatcctcttcgtacattaattgtaaagactaagaatggttgaaaaagtgcttgatgttattgatcgatcttgaggagtatatatacacacatacaaagacaaccctaagcttactctccaagcacttggtctccatttcaaatcgttttcaatccttatcctctttagatgatgactagtcaataacacagctgtctaaagcgataaggattctagattgttatctaagagcacctccattgatgataaatggggtgtctttcctaaggttttaatatttgattaaagacattcatgaagaaagagaaacaaatgtctttagcaagacattgaagacccatttgaagacactcttaaactttgtgatatattttgattggttctgtttttttttagtttaatatttttattgactaaaattaattaaagacacattcgttggagttgtgtaatgaggatggtctaagtgtctataaagacaattgaatatactctatcaatgtattgagaaatagagcaataggattcaaagtgtcatactttctaaacttcttcaaagtttcctaatacatatatattctttacataattgacatagtaaagttctaagaccttctagaacctaaaccgtgttgcactataccaccagcaacttgcatacagaattatagatccatatcctttcacctagaaagaaatatgagtctacgtcttcttttttgttttttgtgaaaacgtcttttgttttcatatatatcatcaatataattcatcaaaaacgtattttgtcttcataaatgtgccaatgtaacttaaacaaagagaaattcagaaatatattacacattacaatacaatacatataatatgcatgtgaattcaaagtttgtagagtaaaaaacaacaaacgatcccaaaatgacgattctctgccacattggtctctcaatttgtttatttagaactcaaaatgctctaaagaacaaagtttttacaaagagatgaacttagcttattaaaatcaacggagaagcaaactcaatacaatcaagtttgaaggataatgagtataacaaggttgtggataatgaattaatggtgaaagaagatataaagaacttagaaaaaagcttaactaaatttgtttttgcttcttacataaaatgaaagtttttaaggattcttctcatttgatttgatcccatctttgaagtgtaaacgaaaaactggaggaagaaaaatataatgtgtcaacacatgtataaaaggctcaataacaagaaaaatgtttatggcgtttgagtggatctttcagattagtggtttttaacttcagtatttttttttcagtttggaataagtttttgagatttaattataatattatgggctaattcaaattcatataataataatagtttatttgcatatacggcaaaaacaacaatacgtattctggtctttctcatatctacaaaataatttgattatgataaactataattatttctaaattttaaatatacactgcaacacgcaaagtatttattattagtagtaacttcttttgttgaaatatttttagtagtaaattcctttgttgaaatatttttagttgataccaccattttcctcttctgcttccttctcttttttcttcttctgttcttcctcagccaacttctttgatttttccttctcttctaaatgtacaaagtcaatcagtgagagtgaaagtgacgctcgctttttcgacgtaattcaataatattctacgtaatttaatactcacgacaatttgcatataaacccaacgatctcttcttacctagaaaaaaagagagttgacccgtacaatactaagtctatgaatcaatctcttttgtcttcatataattaaaaccacacgttaacttgttaaacataagactatttaatatggttccatccttgatccttccataaacatagattcctctatattcagccccggctatcagatcgtcttctttatcgctcctctaattatattcatctcgagagacgagagctaaagaactacttccaaaaaaatgccgattgctgagcttgctgtaatcaaaacagtgggtgggcctctgatagcggctgctcttggagttggagcccaagtcatttacgacggcttcagaaaaggaaaagatacatctatcataaaccgtctcggccgtacaatggaaagtatcagtccggtgcgggatcgaatcggtaagctcagtaatgtggaaggtaaaccatttagggaagtccacgaaagtcttacgcgtctccttgaagatgcgaaatctattattgagaaatattggaaactcagatggagcagacacgtttgcaggaagtacaggtttgtatattttacatgaaaattaataaaataaaatttgcagccgctgcgtttaaatcagcaaattggatttgatgaatatttttcagcttgatttgctttatccatattttgtagtttggctcatatttgctttttgtttatttagaagatcatttatggatacataacttgtggtttgtactaatggtgtctacttatgatttccataatttagaaacactaaacgtagaaaaactatcatgttctgtaaaacaacatgtgtattatgtttttgctgtttatctttaggtacatcaaaaaactcgaatcgatagaacttgaattagtaagggtagcacgtgagatacaagtccaccaatggaccgatatcaaagaaatgaaggcgatacaagtccaccaatggaccgatatcaaagaaatgaaggcgatacaagtcgaccaatggaccgatatcaaagaaatgaaggcgatacaagtcgaccaatggatcgatatcaaagaaatgaaggcgatacaagtcgaccaatggaccgatatcaaagaaatgaaggcccagatatctgaaaagcataataaatgaatcaatatctaaaatctggtgtttttctctctttcttcttcccaacaatgattgaaaaactctttcttgttatgaataaagatggatgcccattataaggcccatcatctaagcccatcatctagatgtttctagggttttaccctttccttgtactcctatataaagaaccctttatctcaatggaataacacactcatttcttctatctctttctctgtttataacacgttatcagcacgctctaaaaggtagatatagagattcttacattttttttaagaaccatgtttacttatcgactcatggttcatagtacttattttctattattgaaacaaaacaatatgagccgatcgatgattatagtatagatcggtaaaagcatgttttcaatgattcaataaagaagagaatcatgcttatcatttgtttctataattactatcgcatgattcaatgattctacaaagaaaatcgttaaagaagagaatcatgcttgttaattgttaatttttgtgatttactattacaatattgaatatataaattaccaattttataattatataactaattttgtaactattcatagcccggtggtgggtgatgcaagcatgtattaatgttttagcattccagttttgaatagttgcatctatattcaatatcattttataaatattatattgtctaaaatccatttatgattgatatgatatcccttatttaactcctttgattaaaacgttatacatatcttatcacttttagatattgacttttccatattaaatatttgatttccatatatttgattgtgttattattatttttactaaaaacgttgcaaaataatttttttttttataagattccatatatctaaatcttttgtgttattattatctaaatctttttataagatttccatatatttgattgtgttattattatttttactaaaaacgttgcaagataatttttctttttataagattcttttctctaaatctttgtggtatctaaaaaaaaattaaactaaaaataaaaaaaataaaaaaattgttcatggttttgccctaattttgcacgaaatcattttacccaaatcttgcacgaattcatattatcctaaataaaagttttgtcaagatatatgtaaaatccagattttgcacaaaatagttttattctgattggttttacaatattacattaaaattgtattagtatataatacttgattattttataaaataaaatgattgataaataacttaatttaaaggtataatcacttataaaaattttcatgaatgactagtttaatgtatcttaagaagatatcatatttttgatggtcaaagttttttttaagaacttaaattatcaccagaagttgagaaaataaatataataataataataataaaaaaaaaaaaaaaaaaattctaacgatgaaataatctagtatatcaagtagtataaaatcttattaaaagactctagaagagcatatacattgttttctatgggaatacaaaattaaaatcatcgatgcggtatgagaaagttaatatgatgagatataaatacattatgattctagagtggaattcaatacgagatggatgaacttgaagtttcatcatttcgaggaggagaagtaatgaatctcacatggataataagtgacatatccagaagattatgttcaatctttgactactaaagatctaaaagttgtataaagcaattcttatacgaatgtgttattagataaaataagttataattagttattactgaaacttcaagacttgaagtctctttgtgaatataactcacattgttaagagaatatctatgatgcagagatggtaaaacagacgcttaaacttttacgtaagtattgttgtcctgtagacacaatatttggaatgaaattttgagaactattataaacttaaatcgagtgtttttcaaaggctaagaaaacatatgaattatcgatgataagtaatactcatattctgaagtgaatataagatcttacatagttagtcaaatttaatatcgtttatactagaatataaaattttaattattatcttgttattgttttattaacatatgattgattattaaaatacatggaagtaattttgattataagatctcattaagggagtaactgataagcaatgaaaagtaaattagaagttttgaaagaactagaagtttcaaaagaattaaaagtttcaagagtatatttggcttaaccggattggttatcctggtttaatgatgatgtgaaagtattgagaattatgtggacattaggtgaaaaaccagaagattctccctaataatttatcaaatgttacttgctcagaaagcaatatgataatgtgatttttaccagggtaagtaatttggactttatctattcgtaagtatatacaaggagataattatgggttgatcacccactatatgacatttagatacctaatggttgtaaaagatgcatcgattcaatggacgcattgactcgattgttgcatcgacaagaaggtcatatttatccttgttataaacccgcaacatagagtttgcgagattactttcttgattaaagtacaagagtatttcagtgtttatttataataaccattattggatatccgttgggataagtgtttaacattttgaaattcatgttcatacacaaaatggtttagtaacatcgatacgcatcaagccaatgaataattaatagttttccccattattattggttttgggtcagaaaccaaatagttttcatctaaaagctttgaatgtgaaaagtgctccaccacagcacgcagaaatgaaccctcaaaggaggataagaatacatgttggatatgaatgataactaagccatcctagaaggatttatataccgctcgttttgaagactatcatattatatagtcagctattccaacataagggggagaatgtatacagctggtgaaaaagataaatagaaatgaattatcaatgatcctcggagtaaagaatgtatattaagagtccaaaagataattcaattacagaatttagcgttgtaattgccagacgcatttgctgacccaaataaagtgatgaagtcacttataccagttgtaaattaaatgctccagaatataatgaatgtcctgtaaagaccaatttcaaactgctattgagtcttaatatcgcatgaagcgtaatagaccttggttccaaatataaatatcctcgtaaaagtgaaagagcacaaaattaaaaatgaccaaattgaggaaataaatattttgatgatctcttgaagagagtgaatgatctctaaaagagacataaacatgacaaataaaacattcacgtacttgacaatgaagagatctagctagctatgtcatgtcaaaatataatggaatcaaaagcaaatcgacgtcgtaatatatttgcatgctatgagcagttgatattacggacaaaaaggaggatcatgaaagaaactctattgaaaagtgtacacaaagtaatgattagccaaaaatggaaaagaagaaatagacatataattataacctctagtagagatatttggactagtagtctatgcacatgatgtgtaaaaccagtggaaaataaattagtctttatgtgaaagaatagtgaaattaatgagattttcacaaagataagaaatgtattatgaagagatatattctcttgtggtggatgtaatatttttttttaagtatctaaagtctggcaataagagacggaacactggatatgacatttatatgaaattcttgaaagatataatctcttaaggattaattatatgagaattatgttctctaaaactctactcgatcgaataaaaaaaaaatatgtaacatggcatataatcatataaatgtatatttatgttgagtttgtcaaaatatattgatcaaactaatatttgttttgaaaatcattaaaactcctacagagttatcataagtaatacgatgacaataatgtatgataaaatatcactagataatgatatttataaatttatatgaaaaccatataattttgatcattaagattatggttattaattccaacgagatattgtatttgattgaaaatcatctcatgaagaagatgtttccaagggggagattgaatgatatgcgtggatgtaccctttttccttatcatagtttttatcccacatgatttttctatgacaaggtttttaacgagacattaaagaacacgcaaataatacacttgatgaatattaaaaaattctatcaatcatccaaatgaatattatacactaatgatatttagagaaataaataagatggtcaagatgaatcatctaaaagattcatgagcagaagaatggcgttgtactttatccagaaatttgttcaagagaagatttggcagacttattctcaaatactgtttattctctgccacatcttctaatcatgcagagattttaccaattcatgaagctagccgcaagtgtgtatggctaagatccatagttcaccatatacaagaagactgtggtatatatgcagggaaaaagactccaacaattatgtacgaagacaatgcagcatgcatcgcacaactcaaagacggatacatcaaaggcgatagaacaaagcacatcctaccaaaattcttctacacacacgatctacaaaagagcggcgatgtacgagttctacagatccgttcgaatgataatctggctgacttattcaccaaggcgctacctactgctactttcaagaagttagtctatcgtatcggattacgccgtctcaaagatctcgacgaatatactcataagggggagtaattgtatgttgcactctttttcccttaaccatggtttttcccattgggttttcttggtaaggtttttaatgaggcagcatttcaaatactttacgagttatgatactataatggtcatcagggagagtgttatgaataaagatggatgcccattataaggcccatcatctaagcccatcatctagatgtttctagggttttaccctttccttgtactcctatataaagaaccctttatctcaatggaataacacactcatttcttctatctctttctctgtttataacatttctcaatttatgtgtaatttatcacaaacttattttgattaattcacaataatctttgatattttgagtacaaaggattacttttaactcaaatatatccatgaaagccctcttggcccaatgattaaccaaaggttcattaatgcttctataccaaaaggtctaggattcgagtcccagctactgcgatttattagcaaatttgcatattaatggagacaagtgtgcaggaggtctacaacgatgtacaattatagttgttcgccaagattctacgcagagaagatattgaaggtgtccatcaagcgcatggaaaagaagaagaatgtgtcgtctctcttggatctaataagggtcggaaggaattgtccgtggtagaatcgtctatgtaacagttctcattatttataataaataataaatctaaaacggcaaaaaaaaaaccaaatatacccaaatgtatatgaattactaaaacaaatgtagtatattcggattaataatttttatttttggtatttgaggtattacaagtatatatcttatatttaacttttcatactattgcgacatttgacattcacaaatgatttgtcctccttaatagtaattttatttttatataatcataatatataaaactagagaataaatgagattggtttaccttaacgtattcataacgttaacgtatcaccaaaccagattgtagaattaaatctgatataacatatattaatataagatataatatattataatacttattttatattacttttttgatatatgattttgtcttatattaataattatattcatgttattaacacacaaaattttcattacattttaaatacttatataatattaacttttatttatagcaatagtactgctcttaatgaaattaattaacgaaataaagaaaatagccccaaatataagaaatgaatttaaaacaaaaatcagcccaaaacactaaattttgtaacgtttggttattaaaatcccacactaaattgcttatctttaagctaacattaataactattgaaaaccatacaatgaattcttgtgaagaatcaaaaccaaaattaatgccttttaacgttgactaatagcaataaaatagtatcataatcaaagaaaatgatgtctttttaaaatataagtagaagtaatgaagacattgaaaagaagagaataaatgagattggtttaccttaactgtggcatattgtagaattaaatctccattttatggcttataataaataataataatggtgagaaataatagaaaaactatttataaatagcaatgtttcatgcataacaaaacatcaaaactataaaacccaaattatattctgatccacaaaattttcaatagaaaatatactatacacattatgctatgaccaaattccggctccatcgcaaaccattaaccacttacgtcccaaaatcacaacaccagaaaatttgtttccgtcaatattgaaaattatagtattcacatgtttcttactgcacgaaaaaggtaaattgttattcttatcctatgcaaatttaacatgttctaattttaaatcagaaaaatcctctaaaagtttaactattagttacatttctttgttctccttattttaacttttcgaatcatattaacatagtttttgtaacataaatatcttctctttagctttttttttacagaagaagatttttgtcatgtgtcaaaagttgatcatgaattggagagaagtagtaatgattccttgatgaattatcgtaatgccaatagtcgttgccaatagtcaatagacattgcattaccaagcattctccacagaaaacatgtcttttacataatctagggtagaaaatatttatacaaatttttcatccacacacaaatctacattatggtatcataaaatgctaaatcttttcatcaatatagacagtttaagttttactaattgcaaatcttaatcaaatgtctagcggcatgatcaaagctgatgatcataagccatgtcctccatcacgatgtcgaataacactatacatgaaatcgtgtgtcgtgtgaaacatagatcataacattcttaaccaagactcaagctaagctccatctcagaaccttgtgggttagttacatttctttttctagtaccatatcatttgtataaaatgtgccaatagttattaaacaaagagaaatacatagaatatattacatattacattacaatacatatatatgtatgtgaatccaaagcttgtagagtaaaaaacaacaaacgatccaaaaatgaacgatggagtgcgtggagctaagacaaaactccagtggtgtgtctcaacagtacggacaaaacagactttgtcctcaggaatctcagagagcataaactatctctccactactgtcaacatcaatctcagattcggaatcaaagtcatccatgtcatcgtctagatcaagattatccgccatgaaatcatcgaggcaacgattacgaacagtcggaatcgtagcctccgatattatctgcataatcgtgtcaaggctctgcattggctgctcaggctcttgaaactgacttcccattcggttctcatccatcaaatcacctggtagattcttcaagaaccatttatcggatgtgatctccggaatagtgattctctgccacattggatctctcagtttgtctatttagaactcaaagaacaaagttttctttgaaatgtaaaacttactgttgccggatcagccacgaagatcctcgatattagatggcgacattctggtgagaggtgtaagtcctctgggatcgagtatgtgacactaaggattctctgcgttttaaaatcagtggagaagcaaacatatacaatcaacgtttgaaagataatgagtttgtgaatgatgatgaatgagacagcaagaacaattgaaaaacattacttgtattgtctttcgataatctcgtggctcctgtggatcctcgaatggataagctccaaccaacattacatataatgttacaccgcaagaccatacatctgcaagctggaaaaatgtaacaccagctatttcagaggacaactcaaagaatatttgtggtataaacagtcatatggataagctggtttgaactctagacagaggaattggtctcatggccttaccttgccatcatattcctgtcgaagaagaatctctggtgcaatgtatgcaggagtaccaacagttgactttggttgggaatgaagaacagaagactgaagaaaagaaacgcatagttaatacttgagcagaaatcaaagcgaaaacagacacttagtaggaaacacatgtaggtaaagagcatgaacgataagaagcacaacgaggaatcacaagatgtcccccgctgttctgcgcttggccatacagtagcatatataaacttagaattcagaaaacaaaccttgagagaaataaatagtaccttggaataaccaaaatcacatattttcaaacgaggtgccggacttccatctaacaatgtattttccagcttcagatcccgatggcatatttgcttcacaggaaaatcaaacacagaattaaaaccagagtggtatacacgagaacgagaaaagttcaagtaagttgcaagaacactgctctgcgtaccattgcatgacaatagctaactccagatataagctgctgaaagaagaaccgagcctatacataaaaaaacttaaagatcagtagtcacacatcaataccacaacacagtacgataaatcagaatccaaacctcatcttcactaaaccgtccggcattacaaatccgctcataaagttctccaccagcagcatattccataacaatagccaaatgggaaggcgtcaaaatcacctaaaccattacaaaaacacacacaaaacaaactctaaaccacactgacttaatacacaaacacacacagaagaaacatcaaggtgtattatattatacctctttaaacctaacaatattaggatgtctcaatgatctatgattgataatctccctctgaacattttcatcaatctgcaaaacaaccataaaaaaaagtatcatcatttattgagaaatatcaaaacttttcaaaagcatttaatcatagtaacagtaagtaaccaccattaaagacactagatcaacaagctctaaaaaggaaagctactaaatctggaaactaaaaataatcgatcatcaatcaatcactaaagcctataaatatcaaatctttttttcattcaaaaaaaaaaagacgaaaccttttctcctctctcgatgtatttaacagcaacaagctccttggtgactctatcggtcatgagacgagcaacgccgaaattaccagagccaatatctttaacgaagtcgtaacgatcactgtcgtgcataatcggtaaatcaatcggcataatcggtgaattagtcgccggatccattttttctgattcttctcttcctctattgctcttcctaatcacatcagattaagtcgaagaatcttctggagtagctggaatctagaagaagaagaaggagaaaaatatctaaggaaggatatgaatttgggggaaaaagatggatcaacgacgaatgagaaagacaaaggcaattattggtcgctctctaagttagataagaggagagagatgtttgcaacgacaccgttttctttgttttagttatctgatttgatacgacaaaggccgccgcgttttggtgattttttttttttttttttcaaatatttttttttttggtttttttaggtatcaatattaattttactgttctatattatcaacacaatttggttgctcctaaaatttgtaattgaatgagtacgaattgtgaggtgagtaaattgttatgtctttcttaaattaattatgtgaatgtctcatgtatatatgtattgttttaccttcacttgtacttgtttacttccaaaatatcccaactttatgtgggtgattgtggtcgtattttgagccaagtcagaaattgtttttgtcacgaacaaaaaaaagcttcttatagatcatataagacgttttcacgtacacagcaatgttacattaacctttttctaattttataactcttgtctagtcgtttgtacataactacaagtgcacctttattattttgttatggcagagtgtagttctacacaaggtccttgttgaatgttggagtatttgtaaaagaaataatcaaattgactaaggatcctgattagaaatgttaaggtttacggcttgaactgccgctgagtttattaacgtaaagatagtgatgaggcaaaaagtactttttcgaatcttaaaaaccaaaaaaagctccgttaccgggaatcgaacccgggtctcctgggtgaaagccagatatcctaaccgctggacgataacggatgttttgttaactaaaaacaataattgtatttatatcttaatgtagttatacaaacgactagacaagacttaaaaagattttaaaagcttaccattgttatcaagattcaatatgataatgattaatgtaggttaaagcatggtccaaatttttgataagaacttttgtcacggtaactctcctcatcgtgctgcatctgcgtctcttgcatttgagcgctttgtgtggatgcaaaacgttgagcctcgttatacaactgttgacccgttaaacaaccaccgttattaggtgtgtgttccggtatcatcataggattgttatgcatttccagattcgtcatcgaaggtggtggcacaaatgtggggacgatacagtaagaggcaagttcgttcttgacgatcgcgagttgttcttccaagtctttaatctgactaaggaggttgtaaatgatacccagacagccattgaccggatcattggcttgaacttgtgcctcccaagcgagcgtgtccatggcaaattctctttggcatgggtgaagactgttgataagtgtagccacatggcttgctccaaataccttgtgaaccgcttcgtagttgtccagtttagtcgaggggaagtaaggcgcaaacacacaatcttctgtgcattttctcctcaggtgcttgcatgccgcgcatggtgtcgatattttgtccatttgatgaaacatcataatctgtgaaagaaagaaagaaaatgtaattgtacatttttgatcatttctagaatatatacaaaatacatttaaatataggatatatcgaaatacatgatgtaattttttccttttaaactgaatcaaacaaacatatttacagaatctttttcttaaacacgaaaatccgaaacatgaaaaaaacaaaaacaaaagggaaaatcgtatgcctaggtctatacacgaactgaaaaaaaaaaatcacaacctacgaatttttatgtgaattctaaacagtaaagagattaaggtttctaaataatatagtaatcagaatagccaatcaaaatcgtggattgcgttgtactgcactcaaatatgttagagaaggtgtgaagatgaaaacacaaacctcaatgcataataagaagatgaatctaatcaagcgaatatcacctgatttctaaaccctatatattaatagagataaagaatggatataaaatgaaatcaaatcggtatttatatgaaaataaaaaaggaagatgaatagagagattcagtttttaacctaaacacaatgcttcttcaaattctattccctacttgtaaaatgcgttttgagaaagaacctaaaattgatcaacacagatttaggtcaaaatttcctaccacgcaattttacttatatagtaccaaaaaatattcaggttagttaatatttttgaaaaacaaaatctagataaaactgaattcatgattatccaaaaacaaaaaatatatatattagcttccaaaaaagtaaccaatcaaaatcaacatataagatttgatatctaaattttaattaatttaatttaattagaaaaacgaaatacattattattttccaaaaaagtaaccaattaaaataaacaaattagatttgatatctaaattatcatattaatttttttattaattattatagtttacctctcatctttatatgattctaattttgcaaaaaataatatcatcgttataaaaaataattagagtttttttcgcatatgccataatttgaatttttaaaaacaaatataaactgttcaatacataaaaaaatattataacagtcaaaaatagatttaagaaaactttatactgagtaacgggtcatcatttgaatatttatattcaatttcatacatattattttgaaagttataatcttatatacaataataattaataacatattagatttttttatgtgtatgatgtgattcaatttttaatacaagcaggaaaattctagaattgacgggtttagatcgatattaatacaagatggtatactacaggtgaaactctaaaattaacaattaaaatacaagtgtataatcttaaacactaaacaatataaataatatcaacaaaacatatacaactcgcagtttactatacatttaaaatcaaataaaataatattatctatttataattcatctttacaataaaattttttagtttaactaaaatataagcctacctgcggtataccgcaagttaatatatagttagctcaatatcattgtaataattaaatattatttgcttcgttccaaatattttataagaaatttagcagagttttacgtatttgctttggcctctcttcagctacagttagagatccagatatggcggatgcagtagcaagatttttttatgttactattttatttctctatacatgtttccatgaaattaaccaactacagtaaaacctctataaattaataatattgggaccaaaaaaatttattaatttagagaagtattaagttatcgataaattaattaaaattgtacaaattttgtaaattcttacaaaaatttgatataaaatgaagtttttttttcttataatcaataatatttatgaaacaaattacaagtacaaatcaattattaagtttaaaaacaatacaattttttttgatgttgtaaaatattagaattgaacatacaaaaaaattaataaaaattgaagaaaaacaatgtcatattttatatatgatatttataatatatattggtaaatttatattattattaatttatattattgatgggaccatatatttatataagatttttaaaaaaaaattagaatcttattaatttatcgagttatatcaatttttatattgatcttaattcgagactggaataattaattaatttatagaaattattaatttaacgggtattaatttatagaagttgtactgtagtatgtaataaagtttgttattgattttaacgtgagagaggaaaaaaaacgtaaacatatttgcttcgttcgaacaaagggcaaggcccataaacaaaatctaagtaaagcccagttagtgttaatgtcatatcaatggaattggtttctcgtcgttggatgaatctaaagcaattgtcagatttcagcatctcccatggaggaatcaagattcgagtatgcttcttcttctagcttcttctcgttatttgcatctttgatcgtgtttttgacgaaatctctttgttggttttactacagttctgaagatgttgattatgctgagattgttgttgttcgtcatggtgaaacatcttggaatgccgagagaaaaatccaggtaaatttaacaataatggagtttgtatctgtatctttggaatcgaaacttgacttagaaatcgtaaattttgaatctttatcttgtatttagtaatgattagcatctttgtgaatgtatagttattgggaattttgattagagatgttgaaatgtggttataatttggtgttacagggtcatttggatgttgagttaaatgatgcaggaagacaacaagcacaaagagtatgtgttatcttttgattgtgttgtaaccttaatcatcatgatgccttttaaaacatttctttcatttgaaatgaaggttgcagagcggttatcgaaggagcagaagatatctcatgtatactcttctgacttgaagagagcctttgagactgctcagatcattgctgctaaatgcggcaagcttgaggtagacatctaaagacataatgctatgtgtcaaacccactaaagtcttcacctttgtgcttgatttttagtagagggatctaagttttgaagctgaatccatatgactttctagacttcatagaagtttaactacgaataatggttgtctaggtgcttaccgatcgtgatttgcgggaaagacatttaggagatatgcaagggcttgtgtatcaagaagcttcgaaaattcgcccggaagcttacaaggctttttcatctaaccgcacagacgttgatattccagtaagataagaagcttagttatatgaatgatgcttggtttctgtattcaactaacttttgcttcgtttatgtgaatgaagggtggaggagaaagtcttgacaaactttacgatagatgtacaactgcattacagagaatcggcgacaaacataaaggtttcttcctcttctctgtgtgtttctttctcacagtttactacactgcacatatgttctaagtattggtttctgtctacttggtggttgatgaaggtgaaaggatagtagtagtgactcatggaggtgtgatccgatctctctacgaaagagctcgtccaagtgcaagaaaagttgaaaagatactcaatacatcggtcaatgtgttccgtttattcgacggagacaaatggaccatccaagtttggggtgatgtgagtcatctggaggaaaccggcttcttacaatcaggttttggtggtgatagaacctctggttagagagattctatactcttagtcttcttccccttggaagagcatttatgtaatttaagtttcactccataacttttcaatttttaacatttgaccccattactttgataaagtgatttgggaggattgataaagtaaattgctataaatttctacagtcaaatgttatatggttcactaagtacattgaatccaaagcattcgtgattatattaataaggtttagttttcaagaacgtgttgtctgaataatttggactaatggctaaattaatcccgaaaaatatgctagccgaagaatagacgattaacgactaactaagcatataacaaaatcaagaagtttgctacgattatgactaatcagctatacattttctttcagaaaaatatgagacattgaacaatgaaaataatcaatattggaaatgaaataaggttcttgaaggggaccaaatcgtggtgtcccaaatgacctctatgtaagataccgtgtgttggagtttgggaatagaaacattgaacaatgaagtgtttagtaacttgactaaactctaaaaccaaactatagtgttaagtgttaaccttcaaataacattgggatcataatcttaactttttcttatcttggagattgagaaagagatcttgtctaattgacagaaccaccactggaaataccctttttatattggcgcaatcgctatcaaaaagaaaaagggagaaaggtacgttgagtccatttgaccatatagtattattggccccagagcactttctgattttggcggcaatggtacaggggtaaaaatggcaaaaacataaaaagttgaaacaccaagtagagatgtgttattttcctaagctccatgattgtcatcattaggagtatatgagtatcatgttgttgctttctttatcgattttttttcttccgtaaatgaagcctagattaattaatatctcgacttgttatgtgaaatttataatggttaagtatatctaatgaaaattagagtattatgtatgtgatgatgttgtaagcaaaataataacgttgaaatcaatgttgtggctaaaatgagagcaagaaagattatttttctatgtattggttctattgaagaaaacatgatcaagaattcaagattatgaagctctttgttcaacaaaaaaaaaagattatgaagctagtgaaagtttttttggcattgaaaacaaaataaagaccaagacaaatgtaagagtatagcggaaacgtggaagaagataataaaaagggtggccatatttttttttgatgattgcggtgcaccatgcgataaatcataatttatacatcactttacatataatttttcctgtaccataagatttgagaagttgactttggattctttagtgggaatgtcgattaaatttattcttcccttcttttaatgagaaggcacaaaattaaataaagagtaaaagtctattcaaaattcttggatcttgttacaattttgtttcttctctttattttcttctatatttctatgctataagtgatctgtttatcaaagaaacaaactataggttcataggatgttaagttcgatcgtgccactaatttagtcaccttgagtatatgatttactcacgtattacacacaaccttggcttaggattgtttttaattgctatcacaaatttagtcgattaatttcaaaactgacgttatattattaggatcactttagtaccgacgttaaagtatttcaaaactgacgtcaaaaatgtttttttttttttttttttttgtagtggatagattttatcaaccacaactttcccaacttttatacaagtttacatatcaaaaatactatatttatctacatttattcctaaataaaatcaaaatattttattcttttgccacacacttacaagatatcatggatgcaaacattatttttctgcatttatcgtatatagatgatagttaataacacagtcacaaactgaaactgaaacctctaacattgaaatattaaatatggatttatagatagtattttgacaaccaatgagttttctcttatcaatggtgttcgaatgcatgatcttgaaaatttactatttttaggtgatcatgtgaagggtttcggtttgatgagctattcaaaaaaacgaaaatatattcaaactgattacaataaaatagggaacataaaaatttcatcaacacataaaaatcttatagagagggatacataatgaatatgtttaccactatacgtgtgcatgcatttgaagtatcaataatacgaatatataagtgggtaaaaaatgatagctagctgcaaattttgaattggcttctcaatgtgtcggacgcaacaagcaacaatttaacaagtttcatattcatcatcatacgaattataaaaatacaacataatcattagtttcattcagtctcacgttgtattgcttttagtttacattaaattaattacactaaacctcaaattaaacatttgaatgaatcttttgcgcctgtaacgtaggctaagattgttttaaattgtcaaaaccgtgcaagtagcagttatttgttgtgtttaatctcacgtgagagaagttaacgtcgtttgaccaataaccattaacgaattgaattactgacgtgtcgtagtggaacttgaaaaaaaaaaaaaaatagtgatataatgacgtttttacccttgaagtgaacatagagaaggcacagctttatttgtcgaggaagcatcgaaagagagtccccaccacaaatccaaatggcaatagcgttaattaaggaaggaacaaacctacttctttactatttacactatttatttctccattatttaatttattagtaagtattaattatttatctagctggaccaccagactcttttatgggtcccacctttacccaccacgaacatcttacgtcgacctccgattattattacatcacattttctctatacttctctcttgaaacctaaaaccaatagtagagaacaaaatagtttgaatttctgtgacatgttccaagttttattgcttctgttctgtgtatatacaagttaatacgaatatcaaagttatagtcttcagagatcgcaattgataaatttgttgttatctattgttaatagtggggtaatcatgtatattattatatggaccataatgttataaggcaatattaataccgtcggacctgagagtgtccataccatttaagtttgcttttttaaacgatatcagcagaataacttgaaacttataatttagggtcccgatcatttattggttttaattagtgtcatcgtttacatttccatataaatttttttgcattggttatagatttgtaattgataagaaaccggtatcaaactatcaactaaataaaatttgaactcgttagaaactgctgaaaataacaacttctattatgttgcgatgttttatgtcctagaacaatgtaaaatacagaattaaaaattgaaaaccctacttcgcttgaataaaaatcacaaaaaaaaattataaagaaaagtaaatagtctaacaaatggaaaaaaaaaacaaaacgctagattccaattaaaatccataatatgaaattatgattggttaacttaatattagtggccttaccaaacaaaaaaaaagatgacctgaaatgaaatctaatgcacattcaagagttggcaggattataaatgcatctgtatatgtataataatacaataccctgtcaatgtctattaaattgttccaattaatttctcctcccaaaaataacttatccaaataaacaactataatcaatgaagttagttagcctttattttcatgatgattgtgataataccaaaattcttatcttcataccaaagtacacaaaataattcacactctatagtctatagtataaatttggcaaaatttcaccgaattctcctattttctagcttcggctttgtctttttatatacacgtattaactatagtcaccaataaaaaattaattaagttaaactgattaggaaaaaacactagttaattgtgtaattagtagttttgttcaatgttgttaattaaaaagcgaacgtatcgtcgtttctctttttaactcattctctttggatccaaatctttcgctttggaattcgccattgacaaagtactcaattccaaaacaaagaataagcaaacaacaacaattttcacttccttcaaaaattataaaaatccagtttttatctttgcaagattcaaaagtttgaatttttacttgttttgatttctgggttttgtttgttttttgatttcggtaatgatacaattgagattttgatttcgtgtgatgttgagagattcttaaatgggtctatgtacttcgaaaccgaattcatctaattccgatcaaactccggcgaggaatagtccacttccggcgtctgaatccgtcaagccttcgagctcttccgttaatggtgaagatcagtgtgtaacaacaacgaacaatgaaggcaaaaagtctccgtttttccctttttatagtccaagtccagctcactatttcttctccaagaagactccggcgagatctccggcgactaattcgactaattcgactccgaagcgattctttaaacggccgtttcctcctccgtctccggctaaacatatcagagctgttttagcgagaaggcatggttctgtgaagcctaattcgtcggcgatccctgaaggtagtgaagctgaaggaggtggtgttggattggataaaagctttggtttttccaagagttttgcgagtaagtatgagcttggtgatgaagttggtcgtggtcattttggttatacttgtgctgctaagtttaagaagggtgataataaaggtcaacaagtcgcggttaaagtcattcccaaagcaaaggttagtgtttctatggtttgttagtgacgagatctggtgaattagagatgatatttgcagaactattgaatgtgatatgtcctgtttggtgattgtgttgtgtagatgacgacggctattgcaattgaagatgtgagaagggaagtgaagatattgagggctttgtctggtcataacaatcttcctcatttctatgatgcttatgaggatcatgataatgtctatatagtgatggagtaagctcactttttgctctaacttatcagcttgggaattggcattattagcgaggcttaacaagtgtttctgtctctgttggtttagactatgtgaaggaggagagcttttggatagaatactttcaaggtaaagaggttttagccactttagaagtaggattgttttggtattgtttttactgaacttggtggtttttaatatgcagaggtgggaagtacacagaggaggatgcaaagaccgttatgatacaaatattgaatgtggttgctttttgtcatctgcaaggcgttgtacacagagatcttaaaccagaggtactaaaagctctttattggtacttatacatttgatgttcattgcaatctttatgaagttcacttaaactgtttggatcagaattttctttttacctcaaaagaagacacctctcaattgaaggcaatagatttcggtttgtcagattacgtgagaccaggtaaagcccttagattatatgctatatgtaaacttagattccagaacctagagaccagcatttgcttatatgcgttgacaattgcatttgcagatgagaggctcaatgacattgttggtagtgcatactatgtagcacctgaagttctgcatagatcttacagtacagaagctgatatttggagtgttggtgtgattgtatatattctattgtgtggaagccgaccgttttgggctaggacagaatcaggaatctttcgtgctgttctaaaagctgatccaagttttgatgaccctccttggcctttgttatcttcagaggcaagagattttgtaaagcggttgctaaacaaagatccgcgtaaaagattaacagctgctcaagccttaagtaagtgtagaatgcatacaaaattgtttcaatgtgaaaagatttgtaatcttgtttattgtttcaggtcatccatggataaaggactcaaacgacgcaaaggttccaatggatattctggttttcaaacttatgagagcttatttacgatcatcatctctccgtaaagctgcattaagagtgagtggatcagtttttcagtatttctacttaaaaggtcactttgttttcacttaccgttcgccatttgcttgcaggctttatcgaaaacacttacggttgatgaactgttttatctgagagagcagtttgctttgttagaacctagtaagaacggaaccataagtctagaaaacatcaaatcagtaagttttctatcttccgtcctgtttcagtttatcttctggtatgttttggttaacatcatgacactggctcgaactctctttgttaggctctgatgaaaatggcaacagatgcgatgaaggactcacgtattccagagttcttaggacaagtaagagccttgattctttctattcaatgtttaaaccatacagtttgacttggtgattgaaaatcttattggaccatctttgtagctgagtgctcttcaatatagaagaatggactttgaggaattctgtgcagcggcattgagtgttcaccagctagaagctcttgatcgatgggaacaacacgctcgttgtgcttatgagcttttcgaaaaggaagggaaccgaccaatcatgatcgatgaactcgcttcggtctgtctcttttgcctctttatacaagtctgtttaaagtctttggaaatgctcaaattaactcattggttaaacttacctcaggaacttggtcttggcccttctgtaccggttcacgcagtgcttcacgattggcttagacataccgatgggaagcttagctttctcggatttgtgaaattgctacatggtgtgtctagccgcacgatcaaagctcattagaagggttttgaaactttgaatgatatgtatgaaatttgtctgagctctaaggtctcattctcctaggagttataatatgtggcttttgacttttgttatgaaagctgagaagcaaagattataaaaaaaaatgagtgtagcaaaaaaagagagaagtgtgttagttttgtagagaatgatatgatattttccccaaatttggtaacttatgacgattgatgatatttctgacatttttagattttgctttttttgacaccaatcttatttccaaatttttttctctatcaaattattatttttcaaaaaaatcataatactatgagtttgatgatttcaaattcacattcgctggacatgtgccacaaatgaagttagtgcttcctagagaattgtgctctcctcaagaaactcactctacatttggattctcattcaacaaaagatgaagtcgagaaactcctcaaaatcccaagagcctctaccaaatgtgaggttgtcttttatgaatcagtttgatgtaagaagttcttgctacacaggaaatgcatgtctagattttgaaggtacttttgtaagaaatcatgttttctatgcaatcaagtttattactctcttgcttagaccatgtacataggtgatttattttgggtatcagtagcccaaaaattatattttaatagatcaaaccatgtatttgggcctgatccgtataattgtactgatacctttgatacttagtatcaggtgatgtggcagcacacgattggtcagcgtttttgctcaaatcagagaaagaaaaaaaaaatcttttgtaatcctatgttttaatatattactttttgattttgcaaatttttttttttatatatttaaaccgatctcaccaatgcaaacacattttgtaggagtatcataaaaatctcaaacaataaacaaacattataaatagtactaaaaaattctttatgatactaggatcaattatgggattggcacaataaagtgtggtattgtaaaattggggcctttctcaaatgcttatgggattaggcacttctaaataatcaaaatacggatttaaccttttattactttgtttactttcaaaccaaagagatatgaagatcccgagaagcttggattgatggtgaaatgagaaaccagagatgaagaagatgatcgaaaggcttatcattattaggatttgaaatgattttgttgtttgaatcgaagtttgtgtttgatttgagaagaattaatggtggtggtggatgaaggggagatgaaattatgggttgacgacatgatggactacggtggcgatggtgagccggtagcaccgccgtacaaatacttgtgtatatacgcacatatctacacatatagaaggtgaagattgggtttgagtggatttgcatgatccgatgttcagaaactcatcatcaccatcaaaaactcatcatcacaatttggttattctctaaagttgaaacatttgggttccttatgcagtatctttttagggtttagttttcttacatcaaaaaccaattaattgtttattgggttcatcagacagtcgttggtggcggagggattgttggtggcggaaggatcgtgaagtcgaaagaagaagaaaagatgtgttgatggagctaaattacaggggtaaattagtcaatctcattcacagaaaatgctttatcctgttagccctttatgaaaatgctcaatccctaatttttgggccataaagtacccatatatgtaatagcccctatgatactatatgagtatcacccatatacatgctcttatatttttaaaatttaattctcttgagaaggttttcactcttttcttatcttccttaaacatgtataaacagtaagtactaaatataaataagatattgaaaacacaagcattcttaaaccaaacatagaaatcatgtgtcgcatttgttccaatatatttaagggcaaccgagattagatgttagtatcgcaactttagaacattttgatctaaagttgactttacgctttccatattctacgcttactctttttctatgggtgtacaatgttggctatcgacaagagaagtgaagaagacaaggcatttagcagtccctcaaatttgcaatacaaaaaaaatgatgggttttggggaaaatgcaaaagtcatcgtgtatgttgaataatatataatttttgtatttttttagcttgtagaaattgaattttgctaggttaagcagcattgtcacttgtaaattaattattttagagcaaactcattagttttagtgaaattaaaaaaaatgtgaaaaatgaggttattagaataaataaatcgaggattacaccaacaaataagtattactatttatttatcccaaaaaaaaaacaatcatttatatgttttccaaattagccaaagaagtctttcaagccaataactcttatgtttcatgcaaatcctccatgaggatcaaattagggactgttcttgatttgccattttggcgcccaaattttttggatttactatttacttcaaagatattatatttgtcattttggtcacttaaaaactatacatttgagaatattttttatatacaatatatacttaataacaaacactaaatcccaaaagaaatggaacaaaataaactcaaacataatatgtaaaattattttttagatataagaaaataacaaaatgtaaaatatttaaggtaaaatgacaaaatcctcaaatgcaaaataaaataaaataattcgtattgattcatcacattatgtcttcagtttctatttaacttcaatgaaatcaatgtttaacaaaaaaaaaacatttaagaaaggataaaggatccaacagtaaattgcacacgacagccaaacggatcccagtcggggctccgacaaagttttaatggtttcttaagaaaaatcaaaagccgtttgctttttttgaaatttccatggcggacgaaaaggagatcgtcgatatttatagctcagatgaggaatacgacgaagacgatgatgatgatgatgataccgatggcgagagtagcgacgaagacgatgaagaagaagatcggaatctgaggtatttgcgtatttcacgatgatttatcggttctggatcggaatctgaagttttttggatctgattctggaattactcgattcagtggagatgatagcgaatcaagcgaagatgattacactgattcgaattcggattctgatgacgacgatgaagaagatgatgatgatgaggaggaggaagaagaagaagactcccttgttgataaagtcactcgtctactcaaaggtttatcaatttagggtttaattatggatcttgatttgttctttgtttgcatcaatttagggtttatgaatcttttgatagactaacaaattaggaacacttgtttaatttttgagggaaatcattgaattggaattggatcattcaagttcttgctagaaattggggaatgttgctatatatatatatatatatataacttgttttactaaaatctctgttgggatttggttttagggaaacaagattgactcgtacacatttcttagctgagaagctttttttaaggtaaatcataaagtgactactattagtggaacattttgttgttctatgttgttgttggaacagctccatgtttgtttggatctatctctctgttatatgatttcgttcttcttgtgatcgtatccttatcaggataaaaggtaggagcatgaaagaagcagtttatcaaagatcatctattgctaaggtaaatcatatactatttctatacatgctcttaataccagagatgtcgaaaacatttgttaatgcaatggagattattgttctcttcacacttatataagtttcttcagagggtttaacgattttagaatggctagccccaaagactatttgtaaacttgtgttcgaatcactcataagttcgcttgtcatatatgatcgtcttatgattgtactaagcctactcttagcgaactaccggtattcatgatttttggggtggcatgcaacttctttaactcactgttcctggtctagttttcgcttctttacgcaatacaataacacaatgctagcacaaatgtgtagtcaaagaaaactctcagtgtgttcttgtcaccaatgcttatctgtacttttattttgttattctagaagtataagaaagctacaagactcgttaatgatctcttgatgacttgactatcaccaaagttttactctcgtgtgaaaaaatggaccccgaaacatagagtagttccttgacgtgacaacacttaaggaccattgtttctagtttacctttaagggggtccctttttattttgtgatcggatcttaagtccattcacatgacttgtcggatcttcttgtgtcccgaatttaaacaccaaggcacttgtacctttttaaacttaatgccacaaaaaaagttcaagccttagccgacaagacaaaaccatcatctctaaagtcatgcaaactaaagaacaaaatgaaactattaatagataagagattgatagcttattcacgccaatcataaaccaacccttttaaatacttaattacattacaaacacaagaatacacatacatacacatttggctaaaatagcattgaataaaatcataaaccaatcaacttgtatttttttttaagtactagctagaaatttgggtttgatggtcggatatcgagttcatgtgtccaagctctccggtcttgaacatggagataccaataagtttgagccaatacatcaggatccattcccatcactcccgagctttctccttctccttctccatcttcgcctcctacgttgaatgattgctctgcgaccattcctcggggagggatgtttgtttctctgaaaacacattttcaagagattttatctatatatgcgatactatttcattttgtaatatcttcaaatgcttaaatgtgtcaatagagtggaccgttgtgagtgtggggactctttttcatatttgaccgatagaagataatgaaatagaggctatggaatcaaaaaatggtttccatttgctagaaaaaaatagcaaataaataagaagtggagctacatgattctttatttgcgatttttttttgaggtaagaatcttgtcggtttggatcagaatcttgccgtttgtggaaggtataaaaagttaaaagagcctttttcggacagatatttgtggttctaattcaattataatggaaaatgatcacataattgtgtgtaccttggaggtccaaccacaccgtcgatgataacatgagccacatgtattccaaaagcttgatattcttttgctaagcattgagacagtgccctcaacgcaaatttcccacagcctgtgccaatttcatatattttcttcagtgactaacccattaattaatatatttttttgcgaaaaatttaaataaaatcatttttaaaaatcttgagaaagttacatagttcggagaaaccagcaatgccattcaaagacgccgagcaaccggtgaagagtatagttccttttcctttctccatcatcccgggagtaaccttttggtaccatttattataaatcaaatataaaccttagaaataagaagctttttaaagaaattgaagtgtcgaaatcattcactataacatttacgcttctgcttcctgacataaaataaaaacaggatttggtacaactagcacatcaacaaatgattaagtaatctattaaaaatttacttcttgtggaaataatcttatctattttaactaaaacattaaaagtctaataaaaaatgacgcttccaataatattaacaagtgtttttgataaattatgagtcaatacaaagattatcctgatcaaaccttatattctagggtttttgggccatgaccaacatgcgagggatttcaaaagaaaacataatattgtttcgtatataataactaatcgcgatttcaagaaatatcacctgttgagcgcaaagaaatgcagcgaagacagagacagagatagatgtttggaaagattgaaaaggaatgtgggtgaaagaagtgggatggtgacttgcgtaagaagaatgataagcattgtacactaaaacctccacgaaccctaacgacaatactccttcgaaggcttctcttacacttcttggatctgcacaatcaattcttatagcaaacacttgtgctttctcttctcttgctatctcttctgctactctagataacctacctgcacaatttacccgactatattaagagagtgaccaacctgagtatatccttaagtgttactaaaaaaaagtgttatatatattttttgtagtggatcggcaataagtgcaccgttttgtgattaatattagctgatgggcgtaacttagtaactatttcatatacatggagggatgaagaaaactatttattattatagtcaaatggaaaccagtttaatgttctcatcaccgaacagaatgaaaaagtatcttttgtgtcaaacaaaaacaaaattatttaaatttaatcaaataagttttcactgtactggttcttaaaaagctgaatttatcgacacatttatttacactgaaaaatttccactattagtactatgtcttacgaaccagttaagcctatagtgaagtactgaatagtgaatactgatgtataaacccaaaatcttttttttttataaccaaatatacatttaaaatgcaccttttgactataaattatatattgattaatatgcatgtatgtgtgtcagtgtgtgtgtgtgactgtgtggtgtgagtcagccacattaatatttgccaaaagcagaaatccagcgaagaaaaacattctaaaaataactctccttttttgtttgttcaaggcttcaaaaataactcattttgcgaagaaaactgccgcaattccttttcttcattggaataaaaatgaagaagaaaattcccatgggaacatatatagaaaaaatcatatttatacatggaaacatgtgggtgtgtatagtgtatgaatagataaagatatggataaaaagaaaagcaaaaaacaaaatgaaaagagagaaagaaaaggaatcaaaccaagatcacgagcgaggatggcgacggtgtagccttcgtgagcaaacttccgagcgatggagcgaccgagctttggaccaacgccgactacggccgctatgcctttgctgccagagctcgaactccctacgtttctcatcatcgatactttatgatctttcctttctccaccttcttctctttatagctacttctctatggataaaatcgataaatagtgaaaaataattataagaaaattttagtttatgttgtgtccccttaacctaggcctttaataagattgtgttgagagagtgagagagagaaatattcttgtggactagataaatttttggttgttatatatacatatatacacacctttctttgtcattatatcagaaaagtttcatttcctttgatagcaattatataattttaacattgcaatgatgtaacaatttgcataagtatacgtatacctttatcgaattattaatattctatatatatataatatatgtgttctaggtgaaagatggtactgtccaatggatagtgtggttcttagacaaagagacatgtcatgtggaagaaaatatagcaattggttcttacttgttagactctacaagatgtttcgaaaagacccatataaggtcgaccgacttttgtaaattacgtggtcgaggattttatttcgatctattggtcaatataccatatgcgaatttttcattgcacttttttatgatttggtcgttctaaattgtttaacattaaaaattaatagtatttttatgcatttctgaataataagaaactatagaaacttttgtgaattataggaaagagtaggagagaacccttatagtattgttttgtaggcttgtaatgttaaatttaatgtgatgttaaaacttaatttattgatgattaataactttcacataaaattaaggaattttgtatgcacattttaaagagtttatatatatttcttataagaaatgaagaaaagtaatgaatatgataacaatttattaaataggttgacccatatgctctctttttaaggggattattattatgagattaccccttttgatttttgtatatagatttggcttttatttttgtcttacaagttggacatttgctgccccctttcctcttctgtcaacagctcataggcatttcaaacatatacatacaaatgtatttcatcgaagtttctagatacattacatgacatgtatatccttatatttaatttagtttttaatgtgggctctgattgataacttttttttaccgttgcggtatagagcttactgattttagaatgactaattacaaagcggtatggaaagcgttaccaaaaaaaagggaatcaaaaataatggtcaccgattcttatatcggttacaaagttatatttatttgtgttcgtgtcaccactactatatccttaacaaaggtgattaggattgccgataacattaccctcgtgcttttagaattatgaatgatcaagaacatttactcttgcattttttttttaatatactcaaattaacttacattactctttcttttatttgttaaagattaacattactcttgcttttagatttatcaaagattatcctacgactgatatgagatatcttagatgggatatgtgaatgtgaactgcggaagataaggattgatagattcttgcaacaacaaaaaggatctttcaaatacggaggagataaacttgaacaaaaatatatatatatatatatatatatatatatgaaaaagtggcaataagatactaattacaaatattatgtcattatacatgggaccagatattggtaactgagtaactaacccatatcatctatgattggtctaaatcttctcaaatctttcctccattctcttgtaacgcccttcgatatcacctttatataattattcatgtgtgtgcattgcattatatgatcgagtcttttagttaagttcatattaagttgatattaacatatttaatcatttaacatcaaacaaaaaatatacagtgttctaaattattcaataaacagtaagactacaaaaccatataatatagtggctagtgctaaatatgtgtctttactataaaaatatcagattattagtttctttaaaaaaccgagtttagccgtttatgaacacaaccttatgaaaataacataaagtctggtcattctcatcatattctcgtttttaaactctctaagtgaaaacaaaacaaaatatagacattatgttattttcttctcatgattgctctcgcaccgtcacataaaaacaaattcaattacgtgttcttgaggtgtaacattaattcaagaggtcccgaaggagttgaaaagtagctatcgttgtaattacaaaattgttttaaatatgtttctattataatgttacacacttacactccatttttttccaatactattatattatttaaatttattttaatatacttcctctaattttaacaaaacatttgtgttaaatttcatctattcaattcagctcatctttgtattctcttgactcaaataacttaattaatttcgttgtgacaaaacaaatacacaaaatcttagttaatatatttcttttggaaattaacttaagagtatcatttatcaaaattaacttatatccacatgatttttttgagttcatccgtttttctttaaatttaatttttaccataaaattaaaaacttatactatagtcatataaatacatagatatattttatcttattttgtcataataaaccgaattggtaaaacgcatgttttatgtatattgtggtttaacgataaaagcccaattctaaaactttttagccttacattagtccatattttcttgtcaaacctaaaaagtagttcacgaattagatcaaaagagatccgaaaaaaataccaagaaaatttctacccgcaatttcaagcggatctacgagcatgcacataaatttgtgaacaaatttgtaacagaaaagaagagagaattaaattaaattctaataataattaaaaaaaactatgattttattaattaaacgacgaacaaatcaagatatgtccatgagaaatggacaaaacaaaatcaaaaccctaacaaaactaaaaataaggaaagaaaactaaatggaggaacgaattgcgtgtggaagacttgcttagttcttggcatgcttgatgtgacaagagtattgaaggagaggagcaaagaaatgactcttaaacatcatgtgaagatggccataacacctcttgttcatattcacaatgatctcacaacattctttgtccaatgcgaaatcattctccgcccaactcgaaaatatttgcgagaaacatttctcattagttttcgacccatctttagacaaacatttctctaactcaccggattgcgacacgagaagagactcaaacggaggacctggaagtccagggatgttagggagtccagggatgttaggtattgggattcccggaatgttgggaaacgggatgtttggtattcccgggatttgggggatattagggaacgagccgggaggtgaaggaggagtgttggggtctgaagaggaggagcaagcccaaccaaccttagagtcaccgaagttgttattgtgattggctagatcggacggcttaggccatggtttctttgttgatccgacggtagggtttgggagagagacgaggcataggagagctacaatgacaatgacgctcttcatggtgttacggcgatgtaaacaaaggattttttttaagtgtataaacaaaaatgagtgagaatgcattgatccgtttatatagagttttattcttttcttttaaagtaaacaaaattaaaaataaggattaagatagaatttgtatatactacgaatatgttgtagcagttattattatctctataaactgatttgcttgcaaccattatctcgtggaatatttttttgtgattaaatttttttttcaaaaagaaaaaaagagagtagaaattagcataatctaaataaatcaaatagttggaaatcattttttttacagatctatttggtaaacaaaaattatgtaaaataatcaaaatgaataaaaaaaattgccctgaaaaaaaggttttaataaagaaaatttatcaactgaaataaaaataacgagtaaaaagaaaaagaaacattcaaatcgtaatcccattagtcttcttaatagtttccccgaatatccaacaagaagatccaactcttttgaatgaagatttttttttatatgtttaaaggttaattcaaattataatttgtaaaccgaaataacagaaagaaattaaagattgcatcaagatcgatatgaatcatatgatacaacagtttgctttcctaactatcttttcaagtccaaaaatctaattctttatacgaggtcacataaattgaatgttaattagatgggatataattcttcatcccatttactgttacatttcatagctcaaaaaaattaaaaaggaaacaaaagaggtgatttttgcaatgtaataagaaaaatttcaaataaattatatagtaactaactaaaaaatcacgaagaaaaaggaaaagaaacattcaaatcgttatatgtttcttcttgttaattagagatcacacatttctgaatgtagaattttcaaatattataaattaaaaaacgatgtaacaaaaagaatgattgcatcgaaatagacatgatatatacttccctaacgatcttttcaagtccaaacacaatatcttttgcaaataatgcgatttaacttttggtatttgatattttctttattcatttgcgaacataaaacaagcaacaaagagaatgaagagataattattcattgattaaaccttaacaaaagatccgttcatcagatatgaacggcaacaaatatcgcatgactaaacgaaccaaaacgaaaaacaaataatcaaagaaaaaaaccctaattaatcaagaacaaacaaagaagaagagaaactagcaggtgacatggcaagtgtaacgaacaagaggaacaaagaaagggtcgttgaagaatccccaagcgacgtcgtcacattcacttttcatgttgacaacaaggttgcaacaatagtcactaacttgaaacaacctcgtgtagaaactgacttccatctgcatccgacacatcccaacaggtcccatgtttatcatacatctctcgatgtgttcccatggattctgttgatgatgaggtggatttgatggagatgatgagtgatgacttggtggcggaggtggagacttcttgggtgttggaggtggaagagacggtgttgaaggagacttcttgggcgctggaggtggaagagacggtgttggaggcggagatggagacttcttgggcgttggatggggaacaaacggtgttaatgaaggcggagatggagacttctttggcgttggcggtgggggagactttttaggagctggaggaggaggagacggtgttgatggagttgacggaatcggcgttgatggagaaatagaaatggcaggagcagatccgttgctataagtacatttccagactttggaatctccatagccgaaactatggccagtgttcaaaagcatcagttcgtttctagtgatttcagacgggtttggccatccttcgatttttggccagtattttccgacggttgtggtcggaaaagccacaagacaaagaaaagctgccgctacaagcacgatggaggttttcattcttaaagggaagatttgtgagtgtatacaaagaaatggactaactcgttctttatatatagaaggatttaacttcttttttttggttggttacaaatatatcaaagatctttttaacaaccaaaaaaatatgaaaaaatccatatctcgtaactattattttttaaaatttaaactgttgtaaatattatctcttggaaactcgaaaagaatatatttttttattttttttatctaacaactttctttcaaaactcaaaacatatccttgtttacaaatgggattaaaaagtatggacaaaaatgtataaacaccacggggtcatgggcgtaggcagtgtgtaattagggggtcaattgacccctatgaattttaaaatttctactatattttattaagagtaattataatgaccccaatgcattatagtttttgatccccatatcaaactaattcaactaaaacgacaaaaaagccaaataagtttggttcattagaattttaaaccaaattgtaatgtaataaaattaaaaatccttgacttatttaaacttaagttcaactaatgatctaatgttataattatatatataaaaaaaacacaatttgtttttgcttttcttagtctttgtggaccataacaaaaagttgtaattattaatttagttgattttcagatatttttctcaggtgtagattatttctaaacaaaataataataaattttatataatatactatttttattaaaattctgatccttataacaaaattttctagctccgccactgcacgggatgttacatcgaattgaatttttggcgtagagcatctgcacaagtattctgctcacgatgtttgaaaacaaaactttggtgacttgaaacttcgcgtccatccacttatcgtagttagatagtgttgcagtcgtggtgatgatccattgttgtttttgagactaattcggttttttatatatagaaggatttaacttctgttttttgttggttaaaaatataataaagatctttttaacaaacgaataaatatgataaaattccatatctcgcaactattatctcttaaaacttaaactgttgtaaatattatttcttggaaactcgaaaatgaatattcttaacgagaaaaaaaaaacataacgaaaatatgtatattgcaattataagacttaaaaaaataaaaaatattaaatgcagattaacaaaaagaaattattagatgcagatttgtgtagatctttgaaaagacctattaaagcccatttaggcccattaaacgacaacctattaaacccatttaggcccataataacggcgtagtttcagaattagacagtgaggcaatggagcataaagtaacacccgaaagatccgacccggagaagagagatccggacaacccgacccaaatatttgacatttttggttcgatgttcttcttcttcctctattgatttttctgatcttcccgttcgatctcactctgtttcccaaaaaccttcgtgtaccttcgtattctctgcattggatttgaagcaaattgatgaactagtaatctcacacggatctaagagcaggtaaaaccaaaaatgaacactacaaagctatcaacgaattttccatttttttttgaaattttattttctttcgaagatcagatcagtaatcttattatcagcttctctcgttctcttgatcgatctgaatcgaaattgtgacaatgatcagccgtattttgtctttcagaagttatggagtgggcaacggtgcagcatctggatctgcgtcatgtaggtcgcggtgtgagcaagccactacaacctcatacggcggcgtttcatccttctcaagccgttatcgctgttgccgttggctctcacatcatgggtataatactctccgcaaattcttatcgattggtttcatagtttgtgactgtttgatattgaaacttattggtttttgcagaatttgatgcattaacgggatgtaagatcgcgtctattgatattggatctccagctgttagaatgttgtatagtcctactagcagcaatgctgttgttgccattcttgaggtcagtttcctctaatgttattgtagagattttgttttcaatttggaatagtagttttagcttggtgttcagtgttttagaatgatttgtgtttggaattgtttaggattgtacaattaggtcttgtgattttgaaacggagcagacttgtgtattgcactcaccggagaagaggagtgagcacatttcctcagatactgaagttcatcttgctgtgacgccacttcaacctgttgtgttctttggattcccaaaacgaatgagtgtcacaggttgggttatcagttcatgagttctcctatatgagtaggtgtgctggtttattttaccgattgactgtatttgttcttttctgtagttgttggaactgttgaaggtggaagagctccaaccaaaattaagacagatttgaagaaaccaattgtgaacattgcttgccatcctcgactacctgtcctggtatgataaaacattcacacattttcatgttagtgtgtggaatctgattttgttgtacacacgcgtaacttcttgttcaatgttttgtcttttcagtatgtagcatatgcagaggggttgatacgagcttataacattcatacttatgctgttcattatacactacagcgtgagtttaggaggatctcacaagtctcattgtttttattcttctcacttggggtatcctgagcaatagccaccagttaaagcagttctttgttatcctcgcagttgataatactattaaacttatcggcgcaagttcgtttgcttttcacccaacactagaatggatttttgttggagataggaggggtacacttttagcgtgggatgtttcaactgaaagacctaatatgattggaatgtaagtcattttcgttgcttttagatttctgtcagctggcatgaaattgctatcccttttttttctcgcagcaattcattcttgtttgttatattttggaactgcagaacgcaagtgggttcgcaacccatcacttcaatttcttggcttcctatgttgcgtgtacttgtcactgtgtccaaggatggatctcttcaagtgtggaagacacgagtaataattaatcccaataggccttcgacacaaacaaacttctttgagcctgctggtaagcctgatatctcttatagagaaaatatattttcctccccgacttaggaataattcccatggtttggtttggagactttgattacgcattgtagcactatccttttttttttttctttgcagctatggaatcaatagacattcctaaaattctctcccaacagggtggcgaagctgtttaccctttaccacgaatcaaaactttagaagttcacccaaagctgaacttagcagctttgatttttgcagttaagaatacttcctactggcactccttccttaggtagaagtgtggcttctgtctttgacatactgggtttcttatacagaacatggtgggtaatgagaacactcaaaatcgagcagctcagactagagaaggaaggaagcagctctttgcagttttgcaaagtgctaggggatcttcaggtgaatcttgaacactaatgttattcaaacataacaattgatactcttcttaagctgtatggatgtgtctcttgagagtaaccaatcctctgttaatagtatgggttgtgggttcgaccagagtcgttcgtatcaatatccggctttctaacatgtgagatgattaacagcttctgttctaaaggaaaagctttcgtctatgggttcctctggaattttagccgagcatcaacttcaagctctgctacaggagcacaaggggtaggtggatatttctcatgcaatcactgttggaaaattgcgcaaaaaaaagttactagcatgtgctgtgaattccgtaccaaatgactcaaatttcatctgcttcatagttcactctgttacttttctacagccagagtcagctaacaatttcagatatcgcacggaaggcgttcttgtatagtgtatgactgctttaccttcttgcttagacattatgtttgttttattatttggaactattttgagcttagtcgatgaattaatccgtacagcattttatggagggtcatgccaaaactgctccaatatcaaggttaccccttattacggtcgtggatacaaaggatcaacttaaagacattcctgtttgccaggcatgtaactgttgtttagtgtttcttttctgtagtatctgatttatgcctgactgattggattatctgacagccatttcatttggagctgaatttcttcaataagccaaatagagttcttcattatcctgtgaggtccttttatatcgagggccttaacctcatggctcacaatctctgttctggaacagacaacatctacaagaagctgtacacatcggtataatctgatatcatgtgatttcgttttagtttttggtttccttttacttacagaacttttctgtttcagatccccggaaatgttgaatatcattcgaaacacattgtttacagtcgtaaaaggcacctctttctggttgtctttgagttcagtggtgctacaaatgaagttgtgctttactgggaaaatacaggttcccagctgcctaatagcaaaggaagcactgctaaaggtttgtctaatcattggattcccttgctattctttagagaacttcctatcctgcctcataacttttagttttgaaaacattaaacggtatcatactgcatccagtcatttaaatataccaggggtacaatgtatgctataaaacagtagttactaacaatcaaggaagctgaacgtttcaacgaatgatctgtttacttgatagagatgcaagcttagaattatttaagccgttcatcctttttgttttcctatgtttccaaaggcgtaaacgaacaagagaagagtaacctcaaagctatacttttttggtatgcaggttgtgatgctgcctttatcggcccaaatgacgatcaatttgcaattcttgacgaggataagacaggactgtctatgtatatcctcccaaaacttaccacaatggaagagaatgagaagaatttgttatctgaagaaaaccaaaagaaagaggcggatccttctggaattcagggtccacaacaattcatgtttgagacagaagtcgatcgtgttttttccacaccgataggtgatgttgcatcagataatctcattcttgaagttacagataatctcattcttgaagttacttatcaattggagcatgccatcgctaactgatgcctctttaaattacagagtccactctgatgtttgcttgtaatggaacccaaattgggctggcaaagttgtttcaaggctaccgtctctcagcttcagatggtcattatatttcaacacaaggtgagggacgaaagtcaatcaagttgaagaaacatgaaatagctcttcaggtatgcaacatctattataacttcgtactgtttattagtagtttggtgggaaattttccaaccaaataaacttttgatatctagtatttgattctatgaccagctcagtaaatgcagtcgttttattccttaccctttaatgtggtttacatctggccggttctctttgaaattaaaacgatcatgttcagaaaattgactcgtcatgttggtgttagcgttctattgctgtcaaaaattggttgaatcgacaattgatattcctgaaattttggtcaatcaacttttgtattacgtagagattcttagaatatgatttagatttctaaagtagttttttccatcaattgtataaagaactaattgttgtctcaaaatgtacaggttcaatggcaagaaacaccccggggatatgtcgcagggatattaacaacccaaagggtgctgatggtgtctgcggattttgatatattggcaagcagttcaacgaaatatgatagaggcttaccatcaatatcctgattaaactatctttcttccctttcaatcatgtgcattatatgctaacactttttagatgcatgctcattgactattgaaaatccttaacttatgcgtactttagatctcttctatgggttgggcctgccttactcttttctacaacaactgctgtatgtttacttggctgggatgggaaagtgaggactattctttccataagtacaccatacgcaggtaagtagatcttgattctctatatgcttaaggtgattttactgtatttcattctcttaaatttatcctcttcaacgcagccctagttggtgccttgaatgaccgcctattgcttgctcatcccactgatataagtccgaagcagaaaaaggggatcgaaatcaagagctgccttgttgggctacttgaaccgcttttaattggattttctacaatgcaacaaacatttgaacagaaagtagacctttctgaaatattgtatcaaataacaacaaggttaccccctttccttttttctttgcttacacgttgttacatatttaatgtcaaatactttggaataggtgtgcaggatacatcaatgagtttctttgtctctttccctagctatctttattgactgcattccatgctaactatattagcttctttttttatatatataatggctgcaggtttgatagcttgcgaattactccaagatctcttgatattcttgctagaagcgctccagtatgtggagatcttgctgtatcactagctcaagcaggccctcaattcaaccaggtgagtcgagttcagtagatcttatgaccagaactctcccccagaagatgtgttctcttactaaacggttttgaaaaaattaggtattacgttgtgcatatgcgataaaggctcttcggttctccacggcattgtcagttttaaaggacgagttcttgcgttctagagactatccaaaatgtcctccaacttctcttttgttccagaggttccggcagcttggatatgcctgtatcaagtaagtaaactttctttgcaggacatatgtagcatctgaatatctaaaaaatatagttagttattgttggatggcctattcaaagctacaatatgtgggagttttagcgtatcttgaactggaccttgaaaagttaatctcaagtatttttaccgcctccccagtcactatctatagttagttggaactccgatataacacttcttgatccttgtacctaaattacatccctatgctagtttctcatggcaatatttttggcaagcttcagtcatctaactactttgtacattttgtactgtagatatggtcaattcgatagcgcaaaggaaacttttgaagtaataggcgactatgagagcatgctagatctttttatatgccacctcaaccctagtgctatgcgtcgtcttgcccagaaattggaagaagaaagtggagatcccgagttgagacgatattgtgaaaggattttacgagtacggtctacaggatggacccagggaatttttgctaattttgcagctgagagtatggttccaaaaggaccagaatggggtggtggcaactgggaaatcaagactccaaccgacatgaagagcatacctaagtgggagcttgctggggaagtaatgccatacatgaagaatgaagatggaaccatcccctcaatagtagctgatcatattggtgtttacttgggctgtgtcaaaggcagagttaatgtggtggaaattaaagaagacagcttagtttctaaacctggagggcttagtttgttgggtaaacctgtatcggataaacctctggcacttcctgctggtgaatcaagttcgatgatgggtctggaatcccttggaaaacaaaacgtagctgatgaacaggcaaaggctgctgaggaattcaagaaaacaatgtatggtgctactggtgatggcagcagcagtgacgaggaaggtgtaacaaaacctaagaagctgcagattagaatacgagaaaagccaacatctaccaccgtggacgtcaataagcttaaagaagctgctaaaacgtttaaactcggagatggtctaggcttaacaatgagtagaacaaaatcaattaatgctggatctcaggatttgggtcagatgttaagccagccttcttcctcaacagttgcaactacaactgctccaagttctgcatctgctcctgttgatccttttgcaatgagctcatggacacagcaacctcaaccagtttctcaaccagctccacctggtgtagccgcgccgataccggaagactttttccaaaacacaatcccatctgttgaggttgccaagacattgcctcctcctggcacttatctttcgaaaatggaccaagctgctcgagctgcaatagctgcacagggtggtccaaatcaagcaaataatactcctctgcctgatattggtcttcccgatggtggtgttcctcaacagtatcctcaacaaacaagtcaacaacctggtgcgccatttcagactgttggacttcctgacggcggtgttcgtcaacagtatcctggtcagaaccaggtgccatctcaggttcccgtttctacacagcctcttgatcttagcgttcttggagttccaaataccggcgattctggtaagcctcctggacaacctcaatcgcctcctgcatcagttcgtcctggacaggtaaatgtgaatttgattttggaattcactaattaatctttctgatgtttcttattacatatatagatcaaatccaacacgtaaaagtgcatatcttattgtttgcttttctcctcaggttccacgtggagctgcagctccggtttgtttcaagactggacttgcccatcttgaacaaaaccagcttccagatgcactgtcttgctttgacgaagcattcttggctctggctaaggatcaatcgcgtggtgcagatatcaaagctcaagccacaatctgtgctcagtacaagatagctgtaactctccttcgggtaactaactctcgtcgatctcccctgtaatgagtttagattctgctcaaacgatgagaccatcttatcaatgctttttttctcctctctcccatttgcaggaaatcttgaggctacaaagagtccaaggtgcaagtgcattaagcgcaaaggacgaaatggcaagactttcaaggcatctagcttcactgccactactagccaagcaccgtataaactgcatacgtactgcaatcaaaagaaacatggaagttcaaaactatggctactcaaagcagatgctggaacttcttttatcaaaggcaccagcgagtaagcaagaggaattaagaggactagtcgatctctgtgtccagagaggcacatcgaacaaatccattgacccgcttgaagatccttctcagttatgctcagctacgctcagcagattatcgactattggatacgatgtttgtgatctctgtggtgctaagtttgctgctctttcgtcgcccggttgtatcatatgcggtatgggaagcatcaaacgctctgatgcactcgctggacctgcacctgtatccacaccgtttggctaaaggttatagacactatcaccgttggtgttaatcaacatctaagcaaatttcaaactggttacatgtacgaactcattcgatcgattttgtgggtttgattttgatttattcgtctgtatatgatttgattatttgtatctgtttattttccgtacgtagctaatacaatttgttgagatatttacgtgcttttgaattttaatttacctcattgaaggtaacaaatattaagaagctcattattagtccatatcaacactacggacgatataatgagtatttaaaatcataattaacaaataatatcaataaacaagctcgtacaatacaaagagtttcaaatgttaacacaacaatttgtatccctaattttattcatgatctagaattatgaatccagtataaaatggtaccaatgggtataatctattacactataatttataaaaatacatatcgtaaaccaatgtattagatatagctataaactattaaaccttttttaagctttaggttcatcgttcttgacagcatgaccaaccccggggctatgtcctggtgtcgtgggtttgaagtcatctcctttcttatggcccataccgggactgtttcctggagttgtaggtgcgaaatcatcggtagatccggttttgaaatgatcttgaccgttcattttctgcaatcgtatttcttccgtgggtgcgaagtcatctttaaaccctttaacatttgcatgccctttcttgtgacctatcccaggactgtttcccggagaagtaggtgcaaaatcgtccgtagatccggttttgaaatgattttgaccgtttgtttgttgaagctttcttccttccttgtgtttgaagtcatcttcggaactttcaacattgacatttcctttcttgtgtcccaccccgggactgtgtccaggggaagtaggtgcaaaatcatctgtagatccggttttgaaatgatcttgaacgttagttttcagcaactttcttccttccgtgggcttgaagtcatcttgaaacccttcaacattcacattaccttttttgtgtcccacaccaggactgtttcctggagaagtgggcacgaaatcatctgtaaatccagctttaaaatgatcttggtcgtttgttttcctcaagcttcttgcttcagtggtgattggtgtttggtaaaataccatcgagatgacgatagaggtcaaagtgatagagagtagtttcatgttgttgttttttgtggatttagaagcaaggtttaggagtttgtatatatgagtagttatgctgaaatttgcagtaagagtgccccaaagagaatgtatttatagtgccatgagattgcttatgttgctgttcattaaatttaatgtgtagacacaatggccacactggttgattttggaccgtctatctattaatttaagattatcaaagtattcatatatatttttttatcaacaaagtatttatatatcaaggccgtttttaattttttgaagggtgttcgaatacatttagtcacgaatttttatttttttcgatgaaaattaacaatacgtttctcatatatttagttccttgtttctctaaattaaaaaaaaaaaaaaagatcaaggagatgataaaaaaattcgttgatatgatcatatgaatgttaaatttcattacaatggaaggaaatgataaattgatgatgaacttttttatatgacaatttgagatagaattcgattaaccttcgcacctcgaacattactaattagtttactttggcatgatataccaaaaaatatatagttactaattaattagttctttgcttctttactgaattctccatttgcacatgcaaatatgacgacatgtcgacatagtataattgtataaattatatacctattcaaatacattataacaacaagtgtgcacgcattcttattttgttgctcgtgcatggttataattgaaatagaaaatgctataatagactatcaatggacggacgataaatagagcctctggttaaaggagattccaaaatattgatagattgctatttctgatgaaggttaatcatacaatattacaaagtcggtccgaaacctctcgtagtgctccattgttgaatatacaacacatatttgtattccgaaagatttttaacgatggaaataataacatttggtttgaaaattatattaataatctaaattaattggttcattgtttttaaaatgaattcaaaggctaagaaaagactcccttcgccaccacagaaatgcattttcaacaacacaatcacacgagtttaaagaagactaatgatttgacaaaagatctttataattgacttttctctcctttaaggctttaaaagtcgaatggttagtgtaaaatactaaataggattctatgcatgtttgactatatattgtgcaacatactgttgagatttttatataccgtgtatagtactttttcatgctaagcataataagatgatcttagtcacaaatataaagatcttccactaccccatgaaaagtgttgcctaccaccaattttcttcctgttgttgatatgcaaagacttcgcaatgaaccaaaactctttgaataatatttagagatggtttaccgcttacctttaaattttgtgtttatttcgaatgtcatttaagtgattttccaatgaataagaatttttttttgttttcaatatacttggaatacatgaaagtttggttattgtggattcattttttttggaaagttccaaacattgaaggttgagtcgtccatattataaaaacatcatatattgtttgttgcattgctcatataaagaatatatatatatatttcgtcctctttctgaatcttatatatatactaaaatgttaatagtttaactcgacaaaaaatgcgataccggtcttcaattgaggagacgaaaatcgctatattagaacaattttattgacttgtagtttgtggatgttattgatttccttgccaactcgcatgtgtccgacaacgccgccaagcttctaaggaatataccatttccaaataaataataatgacaaaatatcaaaccaaaagagggaataaaaaataaaccaaaacatagaaaagccatgtagtcaatagattcactagaataatgtcaaaggcactatccccatcaacaaaaccactactataccgtccctaccagtcaccactaagttaaaaaaatttggtgttcagcatcataatatgtttttggttctaaatatatatctttatacaaattttataacatgtaaatgatgtagccggaataaatcgtctgttttcgaactagcacatattttatataactatatcgaaaatgatcggaatggttgaagaatgcgcatgcatgttaatacaaatacttgatattaccgaaaagggattataaaagtaacaaaatagtgaatatcatggccttttttgtataaaggcttaaaaatagtgaatgacatgttgaaagggaaagaaagcatttttaatttggttggctcctgcacacagggaagtttccactaacgtagcctccgccaccctaggcttctatttatatttagaacaagttgttgttgtctttttttccatacagaaacgagaacagtttcgcaaaaacgataatgtgctttctcttaatcatcactagtcattttaaacttaatcgtacataaccttgtaaattacaaatcttgatcataatccctaccatcaatcaacttctctacctctttgttaatatgataaatgcgcacacaaacttgcatataatatgtatgtggcatgaattcatatatatatatatgaagatcaatatgaaaagtatatataatttactatttccacaaaacttttttgaattaatagatagacgaatcttagattctaaatatttttgttgaagcctgaattttgagaactatgtaaaaaaacaaaataaaaacagaagagttttgacgattaaacaaaacaagagagtgacgaattcccctttgttaactagggattactttgaaataagaaaatatgtattattctttatatatggctttagaaagtcaaaagaaatggaaataactatttgaaaatcacgcgtacgtgtgattgtcttaagagtttttgaagtctagggttctctttaattatcaacgggagaattaataatgtgatttagaaggtaagcaccaaaatctatgtgaacataacatatatattatatttggttttgtgattgagtttcaccatcagaaattttactttaatttgacaaaaaaaaaaaatacttttaattatgtggtgttattatgtatggttcgtgtttgtcaaagccatcgaaacggatttgttggtacgtattatcacgaggtcatgaggacataatgattgtgtttaatttacgcatttttcaattggtgtattacaacacaatttgcttctttttttgttttaacactaatcgattcgtttatacaaaaaatgaatgcgttattaatgaactgtcgcagtaacatatgttcatagaaaaggtcacactattccaatattaaaacatcacgaacgaatcaatttttataaggaatcagaagtcacgatcatagatttgtaaggctgtttcactaacctttccaaccttaaagttggtccgtctcaaaattctagcggttcagaatcattcttcactctatgctttttttctcctttttctttttttcccttttttggtatgttatagcttataggcatctttctttcatttaattacattatttcgaagcttctttgtttacttcttacccccaaaggccaaagtgaatcttttataatgaaagttgagatattattctctctgatttgataagtagactgtagtacaattgtacaactttagttttcagttatataatattttctcataaaaactaaagaagattatagtaattaatgaattaagactcaaataatgccgaaaacaacaaccatttatttctgaggattgttaagtaactagttttttttttgaatttatgagtaactagttttgataacgattttggacaaagtaccattcgcagttgtacgtaattgtattctttttggttaaataatgtgtcatcgagtaaaatatcatgttatcgagttaaatatcactcacatatcaatgaatacgaagtagtattgccgtataagatatcgtgaataggaataaaatagtgtaccattagataaaaggagcatgttgtttaaacctcacgtgaaacgattagcaattacatgtacacctttatttctcgtgaaaatatttatttctccagcatgatttacggtcgacgagaatagacccaacatgaataatgttaaggctccaaagaagtcaaatatgtcaaagtcaaaaatcgaatggtcttactgggcctaatttcaaggcccatttcatcatctatgaaatagtgaaaaaagtacatcagaatgtaagaacagatcataactcaaatcaacaatcacaaaacaaacctctaaaaataagcaatacagttttccagttcctcctatacatccaatgagaagaaaacaaaatcatttatgtgctaaaaagataacaaaaatagaagatgataaaggaaaagatcaacaagtagttgagccgaagaacctaagaagtagaaaagcttcaaacttagaagacctttttttcactaagatagtttaaaacactaataatcagctcgtagaaatttctcgtactcagtcccattcaaagtcttgtttatatcttcccaattctttatatgatctgacaaatctcctctatgtattttcacctgtctgcttgacaaatccttcactggaatgttcaaaaactcttgaacttgtttcaatgtctgcatcaaactccataggtattaacaaccgcgttaagcaaaagacaatagcgtagctttgattatttcgaaagcttaccgtttgatttgttatgagatcttcgtagaagacaacaatatgacgagtggtattgaaatattctaaagcctttgcagctgaattctctgtttcttgtaaatcgtggatcaacgatgtcgagttgattaccggcttatatctagaaagtgcatctgcctgcagtggaatcaaaagaatcaagaaaccaacaaactcaagaatccaaaacatttgtatgcaaaaaaaaaagaacctctgcaggagaatgaacatgagacttatgagttccattcaaaagcttagcataacggtcataagaatttgccaacacagaaaccattcttcttaaaggattccttctaaacagaaatatcgcagagacgcctcttcggttaaagtactctactatgtctttatggttctccaacaaaccctgcaacagaatctgattaagaactctaaaatccgtaagtacttggctcggtaacgatgtttaatacctggttaagcatccatttgaaaccaatagcagcagaacattcgttctttgaagcactcgtaaaccaatcaagattataaactctatcaagagtctgaatgattgaagaaatgtttttccttcgatccaaaacagagaaaatctctccattagaactcacattgttatgactattcaacaatgtttcgaaccaaccgcttcctgatctctgcatcgacaatatcgcaaagtacctcaccggattatgtccacattcagctctagtttaagacaacccaaaacaaagatttaaacaaaggaacaaaccaaagagagtcaaaaacatagacaagaacagaactggtatattagttacctattaaaagtctgaggctttggataatgaatccgagtaacaaagcgtagcgagtgagaatcaataggactagtttggacaagttgggaggtttggaagctgacattacttaactgttttaagcaaacagcgcaaatgtagagaccacaaaccatagcaaacactaaaacaatcatccttaagaataatggtgatttctttggttgctttataacaatcgctgcactgtcctgttacaaacaacaaccaaatcaagagtctttagttgcctagagaattgattttaaaaccctaaatcaaactatttcaagtgaatcttcttccttaattgctctctctagggcttttgttggctcttcgttttcttgtttcaaatagaaacaacactttggttcaaaattaagtcggaatcaagaatatgaaaacacagagcagacaagaatctactgctaaaccctaaaccaatcacattcatttacaacggagaaataacagagagactcaaaaatcatgacttttccttatgaaatctttgcaaaaaacagaactttttggtagattccattgataaaacatacatgcagagatacccagaagcttaatcacaaaaagagacacgagagagagagaaagaaagagaagaaccttgccgaataaacagatatactccgccattgaagcttctagaagcttatgaaacagagataatgttaaaagcagaagctttttagatacagagacgagattacagattcatgaatccacttcaagctacagagaatctaaagaagaagaagaaggtaaaagagttcaaagcaagttgtgttctgagcaaaagaaagattttgtaatattataaacgtggaaagtagagccattgtcattaaaacatggggactgtcctttttttcttcttcttcgctacttaatctcagtaattaattactacaaacctaatttacaaaatttggctaattttatccacaaattcaagatacaaaagtgttcagattaggaaattattaaaagctttttaataaattgacttgttgatactatttctcatttggtgtcattacgtaagttcccttattaatatgtttaagtagaaacttagaagttgactataaattagttaaaaaggttaattatgaatttgattatttcaaatttattttatgaatgaaatttaaattaaagtggagacacaatatcaattaaaagagagagccactgtgtcacgcgtgaccgtccgttctgaaacgttacacttttgactttatttcttgtttaatatatagttttgtttttgaataatatcgtttagtatatatagtttttgcttcgtaattactctaaacttaaaatgaatagttgttggtctcttgtttacagctttacattaatagtagtgatactttacactaagaataataatgaaaaatgattcttccatgctgagttactgtattaaatttgattaaagtcttttataatatactacatattgatacgaatcattaggttgtctttatttactaaccttgttttagcggaagttattatgtcccttttcatctaactatatttatctaatttatctatatttgatcatttagtttatgattgatctaatatatttattcattgaacgaatcttgttggcaaacagacttaaatttctgaagcgggatgagaaggaaagagacttttgaagtttctcgcgtacgattttaattgattaataatgttgttagtttgaaagtgttaatcaaaatacatagtaaaaagaatagttgccatataaaaaatttcttttaaagatcctaaacacacacagaatattcaatctttttgttatattattatatatataaaagataatacatttttcatataattaaccactaaaaatacaaacgcatatatgaccaaaaaaaaacgtttagaaacacaatgacacataagagttcgagctgccgacaccgtacgttacaacttataactggtcggcttatcaaaccgaatcaatagtgtttatttggtctttacgagataacatgtaatagtaacgactaaaaaacgtaatcggagtataagctttgttaatacaaaatagtgtataaccaggtttgtcgcagtttgagacggtcgtccattgatgatagcgccttatttgagcaatcctatttattttagcctgagggctagtgtgattccatgcgtccatatttattgcaaacatacatgatacatggtaaatagtaaatctatatcaaaatttaaccctaaaacatacttaatatacctaactttttcatgtgagttataaagccatataaagttcaggttacatctctagtctctactctctacatagttatcatgtaatatatcattgttattgttaggcatgaaaaaattatcattatttaggcttaggcatgctatataatttgcatagcatcatcatacacataataataaagtacaattgtccatgttatacttatatatatacatagaggaaaactttaaaatattgcaaaagcagcctccattatcacccaccaaattagttcttttcttacacaccaaattagttttactagtttatttcatcgttttgttttagaggatagaaaatgtattagttttcttgttctacaaagaagaaaaagagaagaactttgtttatttgatattgtcctgtacttatttgtttgaatattcctaacaaacgaaaaggattttgagttggtaccacatggttcaagtctttgaacatttgagtgggatccaacgtggctctcatcgatgtaggaatcaaatggtgcgagtcattttggtcgacacttggaagtttggtgatctcgtagatttgtcttattaagttgcgatcttagttaattggctaacatagttttcatttttgctaattgtcatggtcttttctatacaaaatttgtctcaaaagtgaaaaatttcaaaaaaattgttgggtttgttgagccatgtcaagtgttttgtaatttttttgcattgctgattttatcccgcataagatttgtaattttgtgagctgaacaaaaaaatgtgtttgcttttgacccaatgaaatgattatttaggcccagtaaaactaggctacaagaataaaattgtagattctaactgttggacccataaaatcaacgaagcaggcccaataagctgatatttgaaaaaacccatgtcaatttcttgattcgaacggaagttacaagctcattttgtatattaaaaataaaagcccaatactctatcacggaattttatctttatttttgaaaaaatttcattctgagaaaaaacatatacatatataattcgaaactatattccgagattatatatggtcatcagtctctccagagaaaatgtaattttagtatcatgatatttttcgtcaattttggacattttagaagaaaagcacaacatgcaaatgattttgttttgttttgtgcaatacaatatgcaaatgaaagtaaaaaagaaaaatttgaagttcacttaagaagtttgtttttctgtaattatgtattattctgaagagaacataatgataatgtccaagaaaaaaaagaaaaaaaaaaagattccaggcagagtagataagccagtcgttagaagtcaaatcaaattttcataatttatcaactctatatattttcttatatagcaagtcgaatcatatttttgtcgttatgccttgtaacaaacacatacaacataattgaatgatgagagacatatgtacaaaccaatgatactttaaaaataaatgaaatatgtgaggaagaaaaagagacacgatgtctaacaaggagacaatctatacaagctattaatctgcaaagtataagaacaagacggctaaaaacgttagaaaacaaaatggtaagagctttcagcaatgaaaaaaatggtaaaatattaagaaattgtcttttttttttttcataaacccgatcatagatccggtcagccgtagtaaaaacttaacgaagtgcttcagactggagttttctttaaaggttccgattaatgtcactagaccataactctacgggtgattaagaaaaaactaaaacatgtaaaagagaatgataagataaaaagttttatatattatattgtttttgttcgggtttagtgtggttgtaagatggtgatcaatcacaattgtcattttagaagaacaagaagattggacacgtggcagaaaataaagaacccataattaagtgtccacgtggtaacccctaatagacaacgatggaccatgaagaaaggcacacacgttaagatcacttcgactcgaagttcatttactctacccatcctaacattacgacaccatttcgttgtcctttcttctccttcccagttcccactattccactaaccaccaaaaatgcattttcctctttacttctttatcaatttattctttcttatacataatttaactatctgtttttgtgtttgtgtttgcttcatgttggtttacgcttgtgcggttcatgtttgtgatttctttataattattgtccgagtaggatttttatgttcttcgctcaaaccgctagaccgatgatcttaaattaaagaaaaaggaatagatatatcttatataatatgacaaagttttttctaacttttcctaagctaagtgatgttatatatgatagttcgaaattgtatcccataagctaagtgctcaacattttactggagttcggttataattaaattttgcatcaggcaaaaccatcgatcgatgtatgtacgaagagtcttcatgtttgatattttattctgatgtcactctcctattcattcgttttaagaaaaaataaaatcagccaagcaatttcaattgttatttagatattacaattacattaccttttttacatgcatttataaatacgtatactaattaggtagacgtaaatgtgtttgatttttggggctctagctatttgcatagcttctaacatctaaataaattgtagcttgtcctcttctgcttgtgagtgagatgtctgaagctaaggagatgggccaaacccataacaaatcaagtccaactataaagcctggtcaacaaatacagaagatgacaaagatcaaaagctgtctctcatccgtacatgtacctgcaggaaacattgaaagagaaaggaagacgctcctctaaaactaattcaatcctctttcatccttatctaataaccaaaaattacatacatctgtatagtgtcgagagtgttctagatccttctccctcaatctctataaaaagaagaatgtaatctcattgtaattattattgaaaaacagagtaatattattaaaaggttcaaattttctcttctttctcatggtatcagagccattctaaactctcacaggtccaaaaatggcagatccatacccttttccggacaatgtccatgtctctagttctgtaactctcaagctcaatgactccaactatctcctttggaagacacaattcgagtctttgctatcttgtcacaaactcatcggctttgtcaatggtggaatcacaccaccaccacgtactctcaacgtcgtcacaggagacacctccgtcgatgtcgcaaaccctcagtatgaaagttggttctgcactgatcagctcatccgttcatggctttttggcacgctatcagaagaagttctcgggtatgtccacaatctccaaacctctagagatatttggatctccttagcagaaaacttcaataagagcagtgttgctcgtgagttcacgctccgccgtactctgcaactcttgtcaaaaaaagacaaaactttatcagcgtattgtcgtgagtttattgctgtgtgtgatgctttaagttctataggcaagcctgtggatgaatcaatgaagatctttggttttcttaatggtctgggaagagagtatgatcctatcactactgttatacaaagctctctgagtaaaatttctccaccaaccttcagagatgtgatttccgaggttaaagggtttgatgtgaagctccagtcctatgaagaatcagttactgccaatcctcacatggctttcaacactcaacgtagtgaatacacagacaactacacttccggcaaccgtggtaaaggtagaggaggctatggtcaaaatcgcggcagaagtggctactctacgcgtggaaggggtttctctcagcatcagacaaactccaataacacaggagagcgtccagtgtgtcagatctgtgggcggactggacacacagctctaaaatgttacaacagatttgatcacaactatcaaagtgttgatactgcccaggccttctcttctctgcgggtttcagacagttctggtaaagagtgggtacctgattctgcagctacagctcatgtgacttcttccacaaataatctacaagctgcatcaccctacaacggcagtgacacagttcttgttggcgatggagcatacttacccatcacacatgttggatccaccaccatttcttctgattcaggtactcttccactaaatgaggtcttagtatgtcctgatatacaaaagtcccttctatcagtatccaaactatgtgatgactatccttgcggtgtgtattttgatgctaataaagtatgcattattgatataaatactcagaaagtggtgtcaaagggtcctcgaagtaacggtctatatgtgttggagaaccaagaatttgtagccttctattctaatcgacagtgtgcagcatccgaagaaatatggcaccatcgcttaggacattcaaattctcggattcttcaacaactcaagtcaagcaaggaaattagtttcaataagagcagaatgtcccctgtttgtgagccttgccagatggggaaaagttctaagttacagtttttttcttcgaattctcgtgagttagatcttttaggtcgaattcattgtgacctttggggcccctcaccagttgtatctaaacaaggtttcaagtattatgtggtgtttgttgacgattactctcgctactcatggttttatccattaaaagcaaagtcagatttttttgcggtatttgttgctttccaaaacctggttgaaaaccaatttaatacaaagatcaaggtgtttcagagtgatggaggtggtgagtttacaagtaacttaatgaagaagcacctaacagactgtggaattcaacatagaatctcttgcccctatactcctcaacaaaacggtatagcagaacggaagcatcgtcactttgtcgagctcggtttgtcgatgatgtttcacagtcacacaccgctacagttctgggtagaagcgttcttcactgcaagtttcctaagcaacatgcttccctctccgtcattaggcaatgtaagtccccttgaagctt

SEQ ID NO: 1074 - DNA, 84196 bp, Arabidopsis thaliana
aagctttgttaatacaaaatagtgtataaccaggtttgtcgcagtttgagacggtcgtccattgatgatagcgccttatttgagcaatcctatttattttagcctgagggctagtgtgattccatgcgtccatatttattgcaaacatacatgatacatggtaaatagtaaatctatatcaaaatttaaccctaaaacatacttaatatacctaactttttcatgtgagttataaagccatataaagttcaggttacatctctagtctctactctctacatagttatcatgtaatatatcattgttattgttaggcatgaaaaaattatcattatttaggcttaggcatgctatataatttgcatagcatcatcatacacataataataaagtacaattgtccatgttatacttatatatatacatagaggaaaactttaaaatattgcaaaagcagcctccattatcacccaccaaattagttcttttcttacacaccaaattagttttactagtttatttcatcgttttgttttagaggatagaaaatgtattagttttcttgttctacaaagaagaaaaagagaagaactttgtttatttgatattgtcctgtacttatttgtttgaatattcctaacaaacgaaaaggattttgagttggtaccacatggttcaagtctttgaacatttgagtgggatccaacgtggctctcatcgatgtaggaatcaaatggtgcgagtcattttggtcgacacttggaagtttggtgatctcgtagatttgtcttattaagttgcgatcttagttaattggctaacatagttttcatttttgctaattgtcatggtcttttctatacaaaatttgtctcaaaagtgaaaaatttcaaaaaaattgttgggtttgttgagccatgtcaagtgttttgtaatttttttgcattgctgattttatcccgcataagatttgtaattttgtgagctgaacaaaaaaatgtgtttgcttttgacccaatgaaatgattatttaggcccagtaaaactaggctacaagaataaaattgtagattctaactgttggacccataaaatcaacgaagcaggcccaataagctgatatttgaaaaaacccatgtcaatttcttgattcgaacggaagttacaagctcattttgtatattaaaaataaaagcccaatactctatcacggaattttatctttatttttgaaaaaatttcattctgagaaaaaacatatacatatataattcgaaactatattccgagattatatatggtcatcagtctctccagagaaaatgtaattttagtatcatgatatttttcgtcaattttggacattttagaagaaaagcacaacatgcaaatgattttgttttgttttgtgcaatacaatatgcaaatgaaagtaaaaaagaaaaatttgaagttcacttaagaagtttgtttttctgtaattatgtattattctgaagagaacataatgataatgtccaagaaaaaaaagaaaaaaaaaaagattccaggcagagtagataagccagtcgttagaagtcaaatcaaattttcataatttatcaactctatatattttcttatatagcaagtcgaatcatatttttgtcgttatgccttgtaacaaacacatacaacataattgaatgatgagagacatatgtacaaaccaatgatactttaaaaataaatgaaatatgtgaggaagaaaaagagacacgatgtctaacaaggagacaatctatacaagctattaatctgcaaagtataagaacaagacggctaaaaacgttagaaaacaaaatggtaagagctttcagcaatgaaaaaaatggtaaaatattaagaaattgtcttttttttttttcataaacccgatcatagatccggtcagccgtagtaaaaacttaacgaagtgcttcagactggagttttctttaaaggttccgattaatgtcactagaccataactctacgggtgattaagaaaaaactaaaacatgtaaaagagaatgataagataaaaagttttatatattatattgtttttgttcgggtttagtgtggttgtaagatggtgatcaatcacaattgtcattttagaagaacaagaagattggacacgtggcagaaaataaagaacccataattaagtgtccacgtggtaacccctaatagacaacgatggaccatgaagaaaggcacacacgttaagatcacttcgactcgaagttcatttactctacccatcctaacattacgacaccatttcgttgtcctttcttctccttcccagttcccactattccactaaccaccaaaaatgcattttcctctttacttctttatcaatttattctttcttatacataatttaactatctgtttttgtgtttgtgtttgcttcatgttggtttacgcttgtgcggttcatgtttgtgatttctttataattattgtccgagtaggatttttatgttcttcgctcaaaccgctagaccgatgatcttaaattaaagaaaaaggaatagatatatcttatataatatgacaaagttttttctaacttttcctaagctaagtgatgttatatatgatagttcgaaattgtatcccataagctaagtgctcaacattttactggagttcggttataattaaattttgcatcaggcaaaaccatcgatcgatgtatgtacgaagagtcttcatgtttgatattttattctgatgtcactctcctattcattcgttttaagaaaaaataaaatcagccaagcaatttcaattgttatttagatattacaattacattaccttttttacatgcatttataaatacgtatactaattaggtagacgtaaatgtgtttgatttttggggctctagctatttgcatagcttctaacatctaaataaattgtagcttgtcctcttctgcttgtgagtgagatgtctgaagctaaggagatgggccaaacccataacaaatcaagtccaactataaagcctggtcaacaaatacagaagatgacaaagatcaaaagctgtctctcatccgtacatgtacctgcaggaaacattgaaagagaaaggaagacgctcctctaaaactaattcaatcctctttcatccttatctaataaccaaaaattacatacatctgtatagtgtcgagagtgttctagatccttctccctcaatctctataaaaagaagaatgtaatctcattgtaattattattgaaaaacagagtaatattattaaaaggttcaaattttctcttctttctcatggtatcagagccattctaaactctcacaggtccaaaaatggcagatccatacccttttccggacaatgtccatgtctctagttctgtaactctcaagctcaatgactccaactatctcctttggaagacacaattcgagtctttgctatcttgtcacaaactcatcggctttgtcaatggtggaatcacaccaccaccacgtactctcaacgtcgtcacaggagacacctccgtcgatgtcgcaaaccctcagtatgaaagttggttctgcactgatcagctcatccgttcatggctttttggcacgctatcagaagaagttctcgggtatgtccacaatctccaaacctctagagatatttggatctccttagcagaaaacttcaataagagcagtgttgctcgtgagttcacgctccgccgtactctgcaactcttgtcaaaaaaagacaaaactttatcagcgtattgtcgtgagtttattgctgtgtgtgatgctttaagttctataggcaagcctgtggatgaatcaatgaagatctttggttttcttaatggtctgggaagagagtatgatcctatcactactgttatacaaagctctctgagtaaaatttctccaccaaccttcagagatgtgatttccgaggttaaagggtttgatgtgaagctccagtcctatgaagaatcagttactgccaatcctcacatggctttcaacactcaacgtagtgaatacacagacaactacacttccggcaaccgtggtaaaggtagaggaggctatggtcaaaatcgcggcagaagtggctactctacgcgtggaaggggtttctctcagcatcagacaaactccaataacacaggagagcgtccagtgtgtcagatctgtgggcggactggacacacagctctaaaatgttacaacagatttgatcacaactatcaaagtgttgatactgcccaggccttctcttctctgcgggtttcagacagttctggtaaagagtgggtacctgattctgcagctacagctcatgtgacttcttccacaaataatctacaagctgcatcaccctacaacggcagtgacacagttcttgttggcgatggagcatacttacccatcacacatgttggatccaccaccatttcttctgattcaggtactcttccactaaatgaggtcttagtatgtcctgatatacaaaagtcccttctatcagtatccaaactatgtgatgactatccttgcggtgtgtattttgatgctaataaagtatgcattattgatataaatactcagaaagtggtgtcaaagggtcctcgaagtaacggtctatatgtgttggagaaccaagaatttgtagccttctattctaatcgacagtgtgcagcatccgaagaaatatggcaccatcgcttaggacattcaaattctcggattcttcaacaactcaagtcaagcaaggaaattagtttcaataagagcagaatgtcccctgtttgtgagccttgccagatggggaaaagttctaagttacagtttttttcttcgaattctcgtgagttagatcttttaggtcgaattcattgtgacctttggggcccctcaccagttgtatctaaacaaggtttcaagtattatgtggtgtttgttgacgattactctcgctactcatggttttatccattaaaagcaaagtcagatttttttgcggtatttgttgctttccaaaacctggttgaaaaccaatttaatacaaagatcaaggtgtttcagagtgatggaggtggtgagtttacaagtaacttaatgaagaagcacctaacagactgtggaattcaacatagaatctcttgcccctatactcctcaacaaaacggtatagcagaacggaagcatcgtcactttgtcgagctcggtttgtcgatgatgtttcacagtcacacaccgctacagttctgggtagaagcgttcttcactgcaagtttcctaagcaacatgcttccctctccgtcattaggcaatgtaagtccccttgaagctttactaaaacagaaaccaaattatgcaatgcttagagtgtttggaacagcatgttatccctgcttaagacccttaggagagcataagtttgagcctagatcactacaatgtgtatttcttggctacaattctcagtataaaggatatagatgtctatacccacctaccggaagagtgtatatctcaaggcatgttatcttcgatgaagaaacatttcctttcaaacaaaaatatcagttcttggttccacaatacgagtcctctcttctcagtgcttggcagtcatctataccacaagctgatcagtcactcataccgcaagctgaagaaggaaaaattgaaagcttagcaaaacctccatcgatccagaagaatacaattcaggatactacaactcagcctgcaattttaactgagggagtattgaatgaagaagaggaagaagactcctttgaagaaacagaaacagaatctctgaatgaagaaacacacactcaaaatgatgaagcagaggttacagtagaagaagaagtacaacaagaaccagaaaacactcacccaatgacaacaaggtctaaagccgggattcataaatcaaacacacgatatgcacttcttacctcaaaattttcagttgaggaaccaaaatcgattgatgaagccttaaatcaccctggttggaacaatgcggtgaatgatgaaatgagaacaattcacatgttgcatacatggtcattggttcagcccacagaagatatgaatattttgggatgcaggtgggtgttcaaaactaaactcaaaccagatgggtctgtggataagctaaaagctaggcttgttgccaaaggatttcaccaagaggaaggtctagactatcttgaaaccttcagtccggtggtcagaacagccactatccgtcttgttctcgatgttgctactgctaaaggatggaacataaagcaacttgatgtgtctaatgcgtttcttcacggtgaattaaaggaacctgtctacatgcttcagcctcctggttttgtggatcaagaaaaaccttcatatgtgtgccgtctcaccaaagctttgtatggcttaaaacaggctcctagagcttggtttgacacgattagtaactatcttcttgactttggtttttcttgcagcaaatcagatccttctctattcacatatcacaagaatgggaagactttggtgttacttctatatgtagatgacattcttctcaccgggagtgatcacaatctacttcaagagcttctcatgtctctcaacaaacgtttttcaatgaaggatctgggcgctccaagttatttccttggtgtggaaattgagtcatcaccagaaggtctcttcctccatcaaactgcctacgctaaagacattcttcaccaagccgcaatgtcaaactgcaactctatgcctactccactacctcaacacattgagaacctgaattcagacctcttccctgaacctacttacttcagaagtttagctggaaagcttcaatatttaaccatcacccgacccgacatacagtttgctgttaacttcatttgccaaaggatgcattctcctactacagcagattttggtttgctcaaacggattctgagatatgtgaaaggaactattcacttgggcttacacatcaagaaaaaccagaacttgtccctcgtagcttacagtgatagcgactgggctgggtgtaaggaaacaagacgctcgacaaccgggttctgtacactacttggatgcaacctcatttcgtggtcagccaagagacaagaaacagtgtcaaaatctagcacagaagcagagtatcgagctcttacggcagtagctcaagagcttacttggctgtcttttctgcttagggatattggagttacacaaacccatccaaccttggtgaaatgtgacaatctatcagcagtttatctaagcgccaatcctgctcttcataacaggtctaagcactttgacacagattatcattacatcagagaacaagttgctttgggtcttgtggagacaaaacacatatctgcaacgctgcaacttgcagacattttcacaaaaccgctaccaagacgagccttcattgatctcagaatcaaacttggtgtagctgaaccacccaccacaagtttgagggggaatgtgagtgagatgtctgaagctaaggagatgggccaaacccataacaaatcaagtccaactataaagcctggtcaacaaatacagaagatgacaaagatcaaaagctgtctctcatccgtacatgtacctgcaggaaacattgaaagagaaaggaagacgctcctctaaaactaattcaatcctctttcatccttatctaataaccaaaaattacatacatctgtatagtgtcgagagtgttctagatccttctccctcaatctctataaaaagaagaatgtaatctcattgtaattattattgaaaaacagagtaatattattaaaaggttcaaattttctcttctttctcactgctagctcaccatcatgccaattatcaatagatgtgtatatttattacaatttggtccatttggatacagtatcgtctgtatcttacacgaatatgtattatatctagctagcttctcgctatatatagagggtttattaatagtaatacaaaaattgactagcaaatttcagccatatactatctgcggcggattctacaaaaccagttttgttttcactgaaaaactaacaatattaacaatgtagtttttatggggttttcggtttaaactcctgcattctttgtcaatgttactattagttgaattgtgtgtgattttgaatctgttattagtattttgaaaacctacattcaacgatacgtgtgatgactccacaaaacacgacatgtttcttcatttggataactggatctcatatcattcaaacaacctttttatggttgaccaatcattcattagaagatgattatatatatgttatacgtaccaataatgttgatatatttcgtaagctaaattaaagcaaggcatgaaagtttattttcttttcattacataagaaaaggtatacgaaaaccacgtgaatgatgcatttttccatgtcttttatcaatttttgatgtaaaatcatcgaagaagaaagatgaatcagctttacatatcaattcatatgataaaattcatgaatctcctttcggaaagagagtctttgtagggtaattggaggagccttgggaaatccatggggagaaaaagaaaaagttcgacttgagaaagtgatctgctttctttccccactataattgagttgcgtgaataatgtttaaaaagtatacaaaaacacattactttatttctttttattgattagaagagaaatataacctttttcccttccgttaattaaataaagttgtcgtcagctttctttggcatatgaagttatgaactttatttaataaaatgtttgtttttttcatgtgttgcctaaaacataaatcatcattctccagcataaactcgaacatgcatggacacaagagcttagccttgaacactcccaaaaccaattttttacgaacttagactttaggtaaaattttaattaatgcaatttgataatattcttaatgtggacctttcttagtaagtttatgagtcagagtaacgttaaagtttccaaattccaatcattcattgactgcttacatataatggggaaggacatgttcattactacaatttaatcttcttaatttcttgtgaaatagacttcgtacttcatttttaaaaaggaaaaaaaatgaaattaatcctgtttttctctgaatagttagtagtttatcaacttatttcttttctgttttgtcttttacggtaattaagtcgatcttgttttatgttcaaaacttcaaatactaaatacataaataccataagaactcttgtctaattcataaaaggacattattggggtcgcataaacatatgtaaatcagatcgagaaatcagaatatatatacattttagcttgatcaatttaattaatgttttagttgggaatatatttagccttgctttgggtccacccacctccatcaattatcattcttttatctttttgttttgacaatccaacagtggttgtgaatcatgtggtagcttcgcacctatacatgatccccacaaattgaatttataaattacgttaatctcgtaagaaacagacaaaactatgaaatgtcatataactaaggttccattcttcgatcagataaaataaccaaaaaaaaacaaaaaaaaaactacactcgatcacgcaagtaacaaaaaaaaatgtgaagttaaaggtttttttttactcaacataatactttactacttatcactttactcgttaatcaaacactcatactaacgactattttaaacttaagccatcttcaaattttagaaatggagaaacggcaattttgcttcgcattttggtctacactatatacggttttaagtcattttgctgtatttttatgtactcaagattaaactgcattcttctacactataattgtaaatgattatgaaactctgaatcagtgactgtctttttgatataactgtaagaaaacgatagaaagtgctttggagacttttttttgttttgttaaagggtttaagtgctttggagacttgtagtaacatttatacgtgattacaaattgtgatcatgatatagactttatggattataaaatttcgtgcccacacaatacaaatcactaaagatcccatgtgcccttgtctgcattcacttaagtctttttcgtttttattggatatcttttccatctagaaagatatatttagatgtgttgcaatttcacttttcatgataggcacagtctttatgtatatttggataaaaactgggacatatctaaaagtaatgttttacgataaatactatcacaatttaaatcgaaaattatccttcaaaacgaatatcaatatgtattcattgagagattttaaaacttagggattcatttgttggtactagcgtttaagttttcataattaagaactacggatgtatacatagatatatgataattttattttcgtagtaattgttatgataatctttgttcttttgaagtcaacaacatatattatgcgaatttttaaactacattatatgtttagctcactattttattttgaatatctcataagtatgtatatatacttacacattgttatagtgagtgtaaaaaagagagagacagtttagtaatgattgagtatgcagctcgtgggcacattattaaattgaatggtatgatggatatgcgcagacactgtcttgtgtgaactcaagaatcgatacagaacgacggcattaaaaaaaaagaaaaaattcaatataagacgaaaatgatgatggaaaaaaattcttttatttttaccaacgaaatgtatgcgatatgaactagtagtatttaattcactgtgtgaattagtagtaatatttaagcatgtgaatatgtttgtgtacgtattgtattgccacaacaaaacagcatgtcgcagcattgatttcattatcacctaaccgttaaatacgtcatggccctagacttaatgtattttagacttaatgtattttataccttattttgatatgtgtacggtcgaccccctcacaaaattgaaatattacgactatgcattgaaaaactatacacaactacattgtcaaatactgataagatcttaacacagaaacacatattatcactaataatgtaacgtgacaacattacattgctttacacacattttttttaatctatttaagatgattggatgatattgtcatttttctctataaatctaagatttttattgtctttataatctaaattcgcaattattacaacaaaaaattatcaaatctaaatttatttttaaaatccacgataattattctcattctatttcattggaaacaccaaccaattattttaaaaaacagaaaacatattaattaaaaaattgaattcaaattctatttaccattctaaaaaaaaaattatgcactgattctgtaaacgttgacaccgttaacgtagtcgtagatatgcactgattctgtaaacgttgacaccgttaatgtaatcacatcgaataaaagacatatgttgatcgtgtaaaggtataagatactcgatctataacatcgttgtcaaattccatgttgcatatacattatattgctttacacacatttttttatctatttgatcgtctgtgaattaatatgataatttgatggtattattgttatctttataatataaattcgtaattattataacaaaaaataaacagttttatcttaatatccacaataattattttcattctcgttgatttattggaaaagccagccaattatattaaaataaataaaaacaacatattaattcaaaaaaatttgaattcaaaaaaatttatcattctaaagtaactagatatgcactaattgcactgattttgtaaactttgaaactattaatgtaatcgtaacgaataaaagacacgtatcaatcgtgtaaggtataaaatactcgatttttaacggcgccgtcaaattctccgttacatattaaaagaattactattcctacttcacacgaggctttatatgaaaatgacaagagttaatcgtggccgttaacaaattacgatcaaaacgaagatcgtcaccatcttataacagaataacccaaatggtacgcgagctagagactctctagtagagagaaagagagagaaacacaaacacgcacacataacgagtgattttagagagagatagagatctggaaggtgacgtcgtaggagattatggcggcggttaggagaagagaacgagatgtggttgaagagaatggagttacgacgacgacggtgaaacgaaggaagatggaggaggaagtggatttagtggaatctaggataattctgtctccgtgtgtacaggcgacgaatcgcggtggaattgtggcgagaaattcagcaggagcgtcggagacgagtgttgttatagtacgacggcgagattctcctccggttgaagaacagtgtcaaatcgaagaagaagattcgtcggtttcgtgttgttctacatcggaagagaaatcgaaacggagaatcgaatttgtagatcttgaggtgacaacgaaagcattatttatcgaaactgaattttgatttacagattttgaaatttttgaattcgtttttccaggaaaataacggtgacgatcgtgaaacagaaacgtcgtggatttacgatgatttgaataagaggtttgtttaatttgttacagatattaaaattttgaatcagtaacaaacatttctataaaatgtctttgatttttttgtgtatagtgaggaatcgatgaacatggattcttcttcggtggctgttgaagatgtagagtctcgccgcaggttaaggaagagtctccatgagacggtgaaggaagctgagttagaagacttttttcaggtggcggagaaagatcttcggaataagttgttggaatgttctatgaagtaagttttttttttttgattcaaatcttttaatcgaatttttgaaactgataatgaatttgttgttaggtataacttcgatttcgagaaagatgagccacttggtggaggaagatacgagtgggttaaattgaatccatgaagaagacgatgatgataatgatgatcattgttttcaccaaagtacttattatttctcttctgtaataatctttgctttgatttttcttttaacaaaatccaaatgtagatatctttctctcgaataatcaataacatgtaattcaacttttgtttgtacttccttgaggtaattaattagattcgtgtttttctcgattaataaactataagtttataactctaagagtaattataattgttactgaaaactaaatagcttctattatttctatgtatcaattatcatacagtatttgattttttttttttaacaatgaaaagagagtgtagagcagaacaaaaaagggtcacggctgacgtggtaaaggaatataactgtttattgatcaggctttttcagtaaaaaagttactattttattctcacttggattggattgtaggtgctactctagtgattaactacgaacttgtttgtgctttacaagttattaaactaaaatattgtactatctccttgcattttacaaatttagctatttgaaattatatattttttaaaaataaaatagcttaaatatacacttccagtttttccctctcaatttctttcaacaaagtaactattttgagttgtattattttattttcctaatttatctatctaatataacatggatattagatatggttggtgtacctaacgcctataatttatactcgattagcaacaaccaaaaaaaagaagaagaagaagaagaagttgagtcatttaaatctctgtaagagaaatgatttacggtctttaaaaactagtcctggaccaaaaaatggacctaaagatcagaacttatttgtttagaaaaatgaagttagaatgaagttgagtcatttaaatctctgtaagaaaaatgatttacatagttaaagctactcctggaccaaaaaatggatctaaagatcagaattatttgttaaaaaaataaaaaatacagatagatatgattggtgtttatttccgggtcgctttctacgagtaaagaaatggtcaatcacaaatcttttcataccaaactctgccattattacataactctcttaatttcctaaaccaagaatggctttattattaactttttcctcctttaattttggtctctccttttctacggagtacttttttttgtttgtcattattatcactcttactttaaaaatactagaactcaagattcaacgagaaaattcagaggttatgattaaaatgtttaaaactgtcgtactgtactgatcggttaaagaaactgacacaacacaaagatgcgagaatgtacactaaaacccacgaggcaaagattttactcttttcttgtttcttcttttttgtttttgtcaataagtggtaaagagagctggagtctttttctccacttgttcgtttttatgagttggactctacgggcccaatatagagattcctttgtcaatcttgtgttccacagaacaacaagtccctttaaaattattctgagcccattcatatgatcatatatcttccttacattattatttatatacaaaatttcgagaaactgaattctattagaattggatctttctttgcttgttcacaattgacaaaagcttgtttctaataccatacgcatcttttattgattaagtaattaaacagaaaatttataagtattgttcttttcgaaatatggtgatgaactgatgatgatatacattttgatcttagtacatttgttcaaacaatgcagtacatttttttgactcaggtcctatatgtttcattacctatttaaagtgcatcatcatatacatcaccaatgataagttgataactacttataacgagagtagtcactgtgttagtaattaagtaccatgtttctatatactttgatcatctgataaacaagtgttcacaatcaggtttctattcctccggttatcatcttcaagggcatagatcgagtaacaagaaacataatcactgcaagacataagcgcaaacgattccgcaacttgatgcaactttggatacgatgaatctctttcatccattttcctaattattttgtctccttgttttatcttttttgccaaggatacaaatttaagggctcctactttgtaaagccaaaccttttcatttttaatgatattaacattcataacaaaaaaaacaagtgttcttcaacttcattttcaacgaatgagaggaataaatacttcagaacaagtcctcacgcacatactattttgattatgctaaatacactaaaccatcaaattaaagtgggaaaagaagtttaattggtcgatatgaatatatgataataagtggtacgtgagacaagtgcatgcagacaacttataactaaaagtgaataaaaagaaaaagtattacacacaaatcttcactggcattaaaaaatagagatgttccacaaaatgattgattccacaaacaaaacaaaaacttacaagaacaacaaaacacgtgagcgagaagagttgttgtaacttggaaccatctttgtccaaagaccttttagatacagtcaatctagattatcataaataatctaaattaatttctagaaaccaaagtgggagctctaaactttcttcatcttgtatctgcaacttgacactccctcgttgcaacatttcctgatcagtccaaaagattttcactagctcatattagtattggtttgggaatctccggttatccaaagaagaataaaaatttcaaaacagaggattgtttttgtttgtatacctgagattattttgtgatcttgacttaacacttcctcattgactttatcagtcttcttagatctaacatgggtcctcttaagtcccaaaagctccctccacgtgccctttgtggaaaaggatgaagaagacaacaatattggcctgagggagaaagtgttaccatcgaccatagaaccctcctcttcagtaagaagctcttctcctaaggtcctatggacgtgactggtctccttaaaaggtaaaatctttcctttgaggaagatttcatcggcgggaatcatcgagtaatcggtgactgagaaagcgaaatcagctgagggcatggagaaagagcttctcgagttgatgttgttgctcttagcattactcttctccgatctgatctcgacaaactcgttagaaaaagagattctagcagcaccattcatggagttgtgcatttctaagcgtgccatttatgtttttactcaatggcatatagaatgagagatctaagccattgagttatatataggataagaagttggaatgagattattaatgtccaactcatagatccatcaagcttgatctatatgactatattctatatacgaatatttgaccgagagattctagcaaaaagtgttttataatagaaccaaaaaaaataatgttgtagattatcattcattggcaaaatgttgttgatcttcgtatcttgaaggagttaaagatcacatggaggcacgtgagaaactatccatttgtcctctgttatttcttgttctattgcttaccatcaaacatactactaactcagtgatatgtcgacaaatatgggcataaaatgttgtattaatatctatttacatatgaggtaacgtgcagtcaaaggaccaaggttgtcaatcatgtgcttggaagttccattgaacattgtttatcccacacgtcgtcgtgatgcgactccgctcatgaatgattggtcaaaaaaacagtttcatctcattataggaaaatatcaacgcatcattgcttgaaccttttttcttagagaaaccggtaaacattatttcatggcttgcaatttcatcgtctaagttgaatttcatatcatacatagtctgctcgatatccaaaggtgttagtttccaccaatactttagttatttgtaaatgaaacgatttacttttaattttatgatgtatgtgaagtttagaagtttctaactcaaaatcaattagttataaatggattgatctatatattactttatagtctatatcattttcgatttctaattcaaaagcacttaaaatgagtggattagatcattttttttttaatttttatttcaggtatcatcacacttatagatgttggattcctaaccatgattttctaaaaaatgaaaaatcaagctggcaaattgtaagcaattagctgtgaagagtcaagacttggttgggttatttgcaaaatacttctatgtattgtttttgtttgtggctaatataaataaaggaatgggacagagattaggcctgtttattttgggccaagcataaacagagtgggcttttatcttcgttagggaagtaaaatttactatcagactcacagacagagtcagagtagtggctgagagatataggaaatggggaccaaaagaccactgaagaagaaattcgagagttgacgtcatagtggcacgtttgaagttcgaacaaagagaaacaagactgacacagaaagattgaaatacttgtcagtgcgccttcgtatttttggcttttacttcactgacaaataattatgctcctattttattattcagtgaatggtacagaaaacattggtatataattttcatgaagtaaacaaaactatattaggcaagaaaaagtggagacaaaatgatgaaaagggagaagaaatggtgtgttagtgaaagatcttagtgcaattcaaatttcagtctcttttatgggaccataatactctcatttcaaaatcaaacttcatcacctcctttcctcaatttcaggggttaattctagtgtttttttcattcacatgaatttggtttagcttctttcgtttataccaaagaaatctagtcaaatgttacatacaatatatattacaaatgaacataaacgacaaaccatcatcactccaagcactagataaaaaagagtaagagaataggctagagactaattaaacatccaaatctaaccccaaacaattcaattctaaaagctaactcaaaatactagattaacttatcggaccaagtagtcaacgccaagaggaaacggtgaggagaggcacattgttccaagccaaggagatgaaacctggctccgattcaacaagtgaatacaatgtactataattgtagttccatagtagcagcttcgcttggctaaccgcgtaattactcggtttaaccggctcaaatccagctttctccatcaacactctccattgttctttctcctccattaacccaaaccgggttcccggtttattattatcatcatctgatcggaccaaatccataatcctcctaccgaacaacactctctccactctcagcctttctttcgaatctcgatccaaattcggttcaagcgattcaaaaaccgcggaataaaaccggagagagttcttaacccggttagcaaattcaacccggtttaaactgacttcgtattctccaagcgtcacaatcctcgggtttaacgatctagctaaccggagcgccgtaccaacagtcgtcgctgtttcatctagaagcttataaagctcaagcataaaattcacaaccaaaacctcatccgggtcaacccgaaaacttgacccgtttagtaattgaatcggagtcagaaccggataaaactcgaaattgagatccaaaatcgccgcgaaatcacggagacggtttcccgtagcgatcagagacggtcccggtgagtctcctagagacggagcgggtatacccgaaatccggatccgggtgggtttaccagaagaacgggtcgctaaagcttgtaacagagcagaccattgaataccttgaaaaatcccgaaatcgactatgtgaatgttgtttgattgattcgtagcttcgagaattgcttgattcgctgttaaatgagcgaactttgaatatggacatgcgtcgtttaaggttttgtatgagagaatgaaatcttctagggatgacgacgacgatgacgacggagactctgtttctttatgagacagagcttctgcgaagtaatacccgactcgttgtatcgggtcgcctgattcggacacggattctttgatccgaattagtgtgtccggtttagtttccggtttacgtgcataatcgtggatagctttaaaaatcggctggtttagatcaaaatccggctgcggcgggggaggaggaggatgttgtggtgatggcggagatggagaccatatagcggtggaagctggtggcggagggagttgttgactcgctgagtcatctttgttgactcggttgagatatgaaggagcactgagtcgactcgggaatgagacgaatggatcatggccgtagattgggaagtctggattggtttgtgacgcatctccaccgttgatcaaactctccatccactcgtcggagtcaaactcctcggaagcgacggctgcgttttgatgatgctccaggtgtggaaagtgaaaacctgggtcgttggttacttgaaacgggtcggagaaacccgaaccgggaagagtaaacccgaaggatggattgggccaggggttgggttcttgttcttgttcttcttgttgttgatgttgtgattgttgttgctgcttctgtttgatgagttgttgtgctatagccattaagtttccgctgtcggtgcacatatacgccattctccgactcactttcgccggcgatgaaggcgtttttttgtctgttatttggtggtgattgagtaaggcccagagagagagagggatatgaatgaaaccggagagattttagtaggaagaaaaaagtaagaaagtgagtattttcattttgatttatcattttctttttttttgtcatccgatttatcattttcgagtactgtatttttaatcaattaccactttagtttaaaagtacaaaattacgttattaactgcaagaaatgaagaaactataaaaccaacaacaacaacaaaaaatgaagaaactaactaacatagtttactaaaaaactcagttttgtatttaattattttcaagaatttaataatagaaatgtaatttatcaaaatatcaattgaataatttctatatctcatgaatttgtagtttcgtataatcttacaaatttattcagaaaccttttgaccaaaaaataaaaaatacataggtttttttttgttaaataattattaccactctgttaatatgggtaaaaaaaagagttgacgttatgaaaaaaaagagagagtaaaacgatatctcacttatgggacccacagacacgatgacgtcatgtatcggcagttacgtatcgaagagtgtgacctcatctccaccgtctagaatcagatcaatggctttggctgaaatggtgaatgtgacacgtcgacaactgtcttctgctacttgtcacctgcatgtcgcctgcaacttttctgtcttttttcattttaactaacagtattataaaggtaaaaagattgatgtaagaaaagtaaaaagaattaggttattatcttctgctttcaagccgcaaaggtcaaggtttttcaaagctgtttcttatcaactaaaagggtcgttaaattggactttggttaacaaatttcagtgacttcattggtttagtttcagttacttttgtaaaaaaacctttcgacaagttaagctaacatcttgaatatgacttgagcaagcaaaaattaaacaatagacatgttttatttgtatacgcatgtcttttttatctcaacgttagtgttgtggaggacggcttgtgggtccgtaagtaggcccatatacaatggagcaaaagcgatttgtggcgggctctactagtatctgttgttggtggacgaactttgacgaagaaaatgtagtagccattagccaaaagctaaaaattacacaaaaataccaaaaaaaaaacacaagcaaagaagaaacaagaaaagagtccaaagaggattatagaatttaaaagtctttcaataacaaaccaagttttatgaattatcattcatacacgacgcatagttcgagaatttgcttatttgaggtttgagtgtggaagctctttgtgactttgcaatttctaaaaacctaaagcgaatgaaatagaaaagagcaatagcgaacaaaaagcacatgggaacgacacttgactctttgagacatcactcttttcatttcatcgttgtatccgcgtcaaaaggcctacttctccactacttataacttaaatatctaaattacattactaaacatggtatatggtccctggcccaagtctacttttgattttcacttttgacattttttactacaaagtgccatggactgttctaaattggtaatgatttcaacaaggagaatgaagaagatgatatttttgaaaaggacttgtctttgaaaatggcaatcccactttagtgtttaaccattgcacctatctgcaagtggacttggagaaaatagatagagagagagagagaatgagtggtgtatgaaaaggacatgagtaagaatgaaagggtttgatttgtcttttctttctatccaagtcatcggtggggtttcttatgtatgaacaaagagtggcattgagtcatccccaagaaagtctctctatatatttaccatttttgtcacattctttgcttttttttttaaatactaatttttagtttcaactcttaccaactaaaatttacctatttttgtctcctccttagctttttacacttattttcgtttgaacctttaattaaccaaaatatatttactatttgaatcagttaaacagaaattattaagtcagtaagaaaaatatatatttggtgacgattatctcatacaaaacagaaagagacttttcaaatgacaagtggcctgtccaaacactaaacttttgtaccttttattgaccagctaactcactttctcatccaaattttagttagttaaaacaaaaaaatctcaatgcttttcctcgttttctgaatattattcggctaaccagaaaagaaaaaaaatacttgcgggccaaaccacgaaaatcaataaacaagggcttttggttggtaagtctcgatttcatcaccgagggtgttcatgtgaataaacctatacttcaaaatatcgaaccatttcgtctttccaatatctgcaaaattagagacaatcaatcaaattcaaagccatattgttgttaacaaaagagcagtatgatgaacaattgaacatcaatataatttatgaattatctaaatcttctcatttggatgatttcagatcaagtaaaaactttatgggccgtaattatccaacaatatgatgggccgacctaatcgaggaacacggggactagttggcgtaatcagcctccaaatatttggaggcttctgtttttgttttatttaatcatattttatttcactgtaaataaatggataatacagtgtgttaatcaaccatatgtctatctgcactgtttttttttttcttttttcttggcattttaattaattacaattatataatttttggtaaagtacaattagataatttaacgtgtcacctgattacgtatttaaaccctaactcaaccacagatttttttttatcactctctaattgtctcgatcaatccgtcaaaaccatgtattacgagggagaagatttcagcggtaagatatcattatctatctttagggccgattggtaacgactgttaattttggttgtagagactttcgctgtaggaactttgacggtaaaaactttgattataaaaattttgactttaaaaattttaacagtatagactttaacggttaaaatctgataggtaacaccaaaactgtagaaattgtaactgtaaaacttataattttaaataatataaattatagcaaatataactcgaactgtgatataacaactacattcacacaaaaaaactttatggtaaattttttatacattcatatttctttgcttttgcatcaaatgtaatatttgatgttctttaatatacataagtggatcttaaaagaatataaattaaacagtaattataaacatttatcaatgaattccataggaaattttgtataaattacgattttaaaataactaccaaatatataggaaaatagattttaaaagaacaagaaaaaaatcaattataaatcaattagattttttcaaaaaataatttatttgtgaaatgttatgagagtttatatacatattagaaagaagaagaaaaaaactataaactttttatttctttatttctaaagtcacctatacgtgattttcaaaaaatattgaaaacaaagagtttaagaaaaaaagactttaaaggctttaaaatttatgaaaaccaaaaatgtttgattgggttaaaaaaacttttaaaacttctaaaaacttcttaaagtcttaaaagtctaatccaatcaccccgtctatctttcttttctccaaattgtttgttaaaatttcaagattcttgccttcaacaatcatcggaaagaaaaaaagattattttccctcatattttctacccaatagtacaatgacacgtatgagtctcttacaaactctaaaaactttaatttaaggatcgtcccttacattaattatcagttttgatttattttttaactttttcgtaagaattttatgcttaaagactcctatagaaatattattggaggtggtcttaggttcttagcacgcacaatcaaaaacaaacaaatccaaatgagaaagtttatttgtctctaaatttgttgaaaaccatgtttcgaccctccaagaaagaccaaggtaattaaggatattgagtttatatttctctatagtttcactaattactataaaatcttagtattcatccatctcgttttctatattgcagaagcgaagacgacattgttatgggacattgacgattgcccgagtccagatgttatccaatttggtgctattcatgcacattttatgattctcttcgttttcatggttcacactctattattgcttatggtgatgcgaaaaggcttttagatgatgcaagaccaaacataattgagttcaatcaagtacctttaggtaaattttattccacactctcttgatcgttctagtactttgtgtcttgaatcttaactctgtttatacgtatatactagcaagttgtccacaatgagtgaattatatatattcagttttatttttgaatatggaatgatatttacataaaattatatatataatttatctataattgttaatataacgctcgaaaataattaaaaatattaattttgaagtttataaattatgatgtgtttaaaaaagacactttagttgcgcaaaagtctgcaatgcactaaaattgtttttattttatttttgttaaaatggtttgtttcactctataaaaaacttaaaattttcagtattactttttattttaattttgttaaaatgatttttcctccaaagttgtgtatatatatttcttatagtgtaatttcttctgtttactattttaaccgagctaacattagttgatgcattgcattgagaaaaaaaatatagaagagaagatgaaaaccttcatgaaatttgagaatttgcaatatcatactttattaaaagagttttttgtttatttttttttatttttttttatttcaactttttctaatcgactaaccaaatggggacgtggtagtaaaagagatatgatatggagagtctctttcatttgatacaaaacacatctgtgtaaacaacttaaaccgtagtttatcttttacttatgttttagttgtattttcccttttttttgctcaattttattgttaattgtatttttcatataaaaaacaataagacgtaaattcaaaatcatgttattaaaactgatgaaaacaattaagtcaatccctttttttgtaagttttcaaatcatgatcttaagttttagagagtctccttcatacagatcaataccgctacatccttctgtaagtaccgaagctttggcctgaactaggacttggaaaagaccctgtcttcaaaagaggagacccattgcttggtaacgaggattactttactcgtctagaagaggatcctaaagatgatgagatagaagaagtaaaaacgaaaccctctcatttaaaggaataggacccaagaaacagtaaaagctcctctctctttcttctcaaaataaagaaaccattttatgaaccttcttatcctgagagctattgttattcatttagtccttttgacacctaactctttgtgtcaatgtaacacgataagaatcaagataaagtttggaaaccgtcataggaggtgtatccataattgacaggtttcttgtgttctgatgttcagtctccagcccaatgatttcccactagacacacacgagtgtttacataattcttgtgtttggtatttgacaatttgttattgcttcggatcaaaaacgaggtaaaagttgtcactttgttataatcgtaatataattgggccttatagaaagcccatttaaggtttaatagtgtcgacactaataatcaacaacatccaatacaaatgtccaaagactcaacctagctcccaatctatatacatcgtccactttcgaaagtcgaaacccttttctcaaacccgaactaaaaaacgaatatccaataatattatttatccaaatttttatatatcattgggcaaaaaaaatgatttaaaattatcaaaaaaaaaagaagagaataaaaatactttcatctttttttttttttacagaatacgagaaaccctaataggcaaaccgttaggaaaatcaacaaaaggaaaagcaaatggtttatcatcttctgctaattcccaattgaatttaagaactagatgatgaataaacactgccatttctaacttggctagctctgaaccagcacatagccttggccctcctccaaacggcatgtagttgtttccccacgtcgaaaaactaccacttcctgaggatgacgctccgttgttttgctgctcgtcacaaaaaaaaacgacaaaccgattttatagatcacaataaacccccaaaaaaagaagttggaagaaaaaaggaagaagaacacgtgcttgttggcaccacaccacgtgggtcattaatcatctctcaccacctcttaccttccccactcactataacatcatgactaccattattatcttatttcataaagtattatctcataataatcataataatactatatagtatatttctctaattcgccgatttgatagttgttataattaatagagttataaatctaagtattaaaaccagtcaacgtggcagaatctaacgcacgtacaagtcatcgggcgtgtgagatccgtcaaagccgtggtaccatcgtccgtcaaatcttaaattgtatcaaagccgtgactaataataaatcaacggtcacgattataagaatatttaggcagctcctacgtcattaaagacataccatcctactaattaattgtcttcacgtacacttacaccaacacgtctctttctctctcttatttttaatttatatgctttcatgtgatcaatgatccatgacgtgttaagatctaacttgaaagataataataataaaaagtttttgccagattaatagttctcgtatagtatctatagataggtaaatcacgtaggacgtatctattcatgcaatagatgaaaaaactatacactaattttcgatagttaacgagagaaactttttatttacctgttgccatctccaaggattaaagagattaggttggtcataacgagaattatccaaatgtacggctgagatcaccggtaacactttccacccactagggatatcgtatcctttttttccaacattaagaaatgtaaattattttaatatttttcatccaataagatttcaatattccggatttcattatttaaaaattttgtacgtaaagttttacctttgtaccgaacatctttgagtgctttgcgatgcaaaaacctaactacatttcccaatcgaagagtttcatttataaccttcacacacaccaaaaaaaaaatcaataattttggtttcatcataaatcatatgaacatagaataaataatgagaatgatagtaacatacacattgagtaaagtccattttcttgtaatcatcccaatttaattctgactctcctagttccttcttggccctcgcgatctcaagatgctcttccttcaaaagtataaatcaataaacataaaattagtgacaattaaatatacatacttttttcatcgtatattctaatagaataattctataataacttatataatacgtaacaatttggtagtaattaacttgtgctgttataattatcttaccctaagctcttcaacggctttagggcaagcttgcaagaagaagatagcgagagcaatggctacagaagaagtctcatgtccggcaaataacaaactaagaatgagatcgagaatttgctccgtcgataaattcgaatgtttcaaaacccatcccaaaagatcatcgtctgttctttgtttcctaacatgatcactcttactcatctctgcttcatcctctgttttcacttcttcttcttcttgatcttcttccttgatatccaattttctctcttccattttcctctcaatgaacttcaatatcgttgctcgtgactacacaaccattttagatattttatttaacacataaaataaaattaaaaacctataatgagagtttgtgactttacagcaaaaaaaaataaatgtacctgaagagctttatgataagcagttcctggtagatttagaggagcagagacaactcctttcatgaaagttacatactctttctttaattgctctgtttcttcttctccaggatccatactcattatatgcttcgccattagattaaacgtaaactgttcaattaaaaaaaaaaaagttagaaactcaaaagattcataaacaaaaaaatttagcaaaataaaagataaaaataaaaacctttttggcctcgtcttgagcagagaaaatagagttttgttgccaagaatcaagaacaaacaaagtatgtctctcaacatctttaagtagaatagttctaagacgtgcgtgacttaagaagttaagcgagatacttctcatatctctatgcatgtcaccaacaagaacaagcatcgaccatttcccaagaatcccacctatacttctaggataactacattcaaagagccttccttcgttttgtaatatgaatctattaagtccagcatcagctgatacgatcgttggttctccaaacaagttcgatctatatatcttaccatacctgtaaaataaacaacattagtcaaatttcaaaaacagaggatttatttttttgagtttttggaagatgttgttgtttacttggagacatgttgttgcatgaagtcaccgagtgttgtggcggtgtacggtttaagataaccgatggtttcaccaagaaatggccaaccggatttacccggaggtagattgaatctggtttttctatttcttctcttcaagagaatcaagaagagaagaagagacaaaagcgatgggagaagaagaagaggtaagagagtatgatgctctgtttcgaacatggagctagtttctctctctctctcactcactttctctttctaatggctttgtctttaagattgggaatcggacttctactgaaaaagggagcttctgtttgtaagagggggttttaaagaagtcagaaaatataattgttatcatcgtcattaaaatttaataaaatcttcttattaagcttaaacctaaccaatgagcttcatggcttttgtttctccgtgttcattacttttgttgcctcgttatgctccttttaatacttttatttattaaactcttaaattaaaaacaaaagttgcagaaagctgcgatgctgaaatagtttaacagctatttatatcataaatatcatggattaatggatatatctataatcaattgtctctggctaatagtactataactttcatccaccgtggtagaaaaaaaaaagtcattagatagatcgtacgaatccatcgtaaaagtgtttatgaaattttatctgatcaagttgtgagtttttaaattaataaacccattcgtgctaataatttttgataaatgctccagcagaatcccaggaagtccggtacggtctcaatcggtttaaattgggatttccaaaattacccttaggatatgggaaaagggtgggctcacgagtaggggtagaacagtgaaaatgtcagaaggacccctacacgagcgtgcggtcaaagacagagttattagattattaccgaactggacagtcaaacccgtagacttttggcattgtcttttttttgcccctcaatagtcagaaaacacatttactcaaatttttatttattttaaagttaatattttaattccgttttcattgttgtcccaattctgaatcgcaccatgcattattaattacacctactagataacatactttgagcgcgtataggcttatataattttttaaaatttgcttaatgtatattactacttccattccacaacaaaatagttttctatctgttatttcttgttccataaaaaaaaaaaatttggaagtttctgttaacaaaattttttttggaactttctatgcattgttattgactaaatattaataatttgtagatttcaaaaaatattaatggagatatttgaattcaccaactattattggttcataatgtatttataactaaatataaaaaaaaatattttaagaacataggaaatacattataggcatcatattttaataatattgttagaaattataacatttttcaaaaattttgtctttaaattaaaatgtaatactcagctgtttcttctattgatagtagcattgaattcctaatttaatatttgcagaaaaaattgactatcacagttgtagaggctgtcattatggcaacaaaaacatacggtaattaatctatgagtaaaagggttacattttcaaaaaattaaagtcattaggtttatccttcatgcatcgcgaaaataagacaaaactttttttacctcgatgattaatatttatacgtaggaagaaacaagattaagtttaaacatccaaagtatgtatttggaataatcacatactagtatctaatataaatattgtaatgttacaagttcgctcttattaaattccaactaacaataaatatgttaaagatgcattaaagaaagcaatttaatagttgcagatggttacacgcttgtagaggacttcgaaactgtaacccaaaagatctatgcattttagatcattgaatggaatccaagaaaaatcgttttctttttttcttgtttttgtttttattgttgaccaaccaagaatgatatttgcagtgatcgtaacatacggtcccataattattaccacgcgtgtgaatttcatttatcgacatcacataactattctttagtctctagtatagcatacgtgaaaggtatagcatacccatatatggatatgttaacttctcttaagtttgttttttctgtaaggaattatgtatatgttgaccactaattgattaacatatttgtttaccactaaatctatatttacataacaaccggtaattccaaaattttctaaaggatttcaagctatattcagtttgtaactttgtataaatagcttgaacgggtcctttatgctttatgctagtaatctcaactagtgacgctgtaaaatcgtatttaaggttcgagtccagtgtcccgtaatgtttgagaaaaagtttattcaaaatggtcccagacaattgttttgtgatatatcattgttatcatatatccgcgataatatatagttaagagaaacgaaacaaaaagaaagacaaaatatgctttaaacagaagattatgcaaatacctggaacataatattgagatcagctaacaaataaaatatttttcacaatcgttatcgcaaattttaacgaatatccagaaaatccaaatagggtcgatattgattgtgagagaaagctggcagggaccattattccacaaccttttggttgtcatctcttattctctttgataattattcacatactccatgggtcactactctttcccttttcttattttcgtttttttctcaatactcttgttaataatttgctggattagcacaagaatcataatcatgattggagtgatcgataaacggatattcacactcgtatttaatttaataatcaagagatatgaattcgaaattttaattggtaagaaaatcttcatagtaatcaaagaaatgatgcatgtaattatgatcaaataaacctaatccagaaccaaaaactatatcgaaaattgttttgtttgtttgttttttttttttttgggggggtcataacgaaatatgtttacacttcaatcaattgtctttttgatttactcatatacatataacaaaagaaacacaaaaacttaactgtgtaatccaaccaaatggaatcgattatttcctttattattataaattccaaactccatattttctcatataccaaagatagatattttgttataacaatacaatgtaaagataattaattacttgtaaatattttaaatgaattttaatatttaattatcttggaatccaaattgagaaccaaactcaaatcatgtgaacagaataaccagaaacacgaaatttatattgtagctcaaaccgaacccaacaatataatacccacatctatgtgactacgtcccgcctaaatcaatctcgtacgatctcaaacaacatggcaaaagtcacaaagctactatcaaaatttttgttgcgttaaaccaagtatttttgtctccggtttcgtaataagttgcgaatacatgtgttcgtaatttatgcatacgtgttaataaacgcatgtaatctatacgtacatgttcgtaaaaaaaatctatacgtacatgaatgcatggatcatgctgtgttgacttcatcgtttcaagccgtattgacttgtaacctttttttttgtcggcgacttgtaacttaattgaggacaattgtaaaataaaaatttgaggaatattaaagcgacgttgttttatatttgccactaccttccactatttgtggtatacgggtatgcctaaactatatgcatatatatgttcataactcttgaatactattttatatttatttataacgtccattaagttgaatttaaaaatcatgtggtgagacaccaataagctacaaaaccgataggataataattgtatgtatagaatatatttttttgtgtgcaaattgtatgtatagaatttgatcatcatgaaatgaattcaagtgttacctgaaaatccttttttttttttgggtcgacttatttggaaatcgatagaattataattatttggaaatatatagagagaatgataatgggggatactttgggcacgtccatgtgttcgcattattgcagttcacgtgcagttgctcgtccaccagctttctcccaatttcacatgccgttttctcgttatattttgttcttgtgcaaataagaaaacaataccataataattttattttaaattccgttttcctttacaaggatttatatgcaaccaactgtactagttttacgagtttcttcttaacatgtgctaattaccaaaacgaaaaacatgtgtgttttgcatatagaaattcgttaaaatttgcgataacgagtgtcaaaaatattttatttgttagctgatctcaatattattttccaagtatttcataacattctgtttaaagtatacatttttctatctttttgtttcatttctcttaacttgataatattgcggatatatgaaaaacatgtcttagttacaaaaaaaaagcagtaggtcaatttttttccctattagtaccaatctataaacgattcgtttataaataaaaacggttgaaagttactatgccaattaaacataatgtgtagtaattatgaaattttcaacttgttttgtacgttgaaaatattttgtattaatttttatatattattttctttacttttaaaaatttatatagtgtttacaatgttcattaatcaacttggcataaaaatgctgacataatggtacaatttcttgtttttcgaacaagaaaaccaccctttacagtcctatacatatttttaacgtattcgttttaaggtaatgctaaattttataaaataaaatatactgaattttattattcaaaaccgatttcaaatactgtatattgtagagatagaaaagagaaaataaaatagaaaagaagcactcgtgcgggtgcggggggacgtaacggcggcccaatgattgccggaatggggcatgcaggcggtgggagagagacacgtggcaagtcacacgtgtggtatagtgaaagtgacatgacgagacgagagtgggctgtcatataaatgctctcacccaccgtttgctttagcattttatttttgtgtgatctgacttcactcttgtctctctccttaaaacccaccaccacctgtctctcatcagaaaagtcaaacccttcttttatttattcctttaatacaaattttcggaaaatttcacaaactttaagaagttttttttttttttacaaacctttatgattcttctttcttattttaaggacactttttgttgaagttgttaaatcgaaaaatcaaaatcataaacataaatttctatgttccaaaagttatttacatcttgtagaaatttacgattttattatgcagtatgtagctagttaccaaaaaatcttagtttcttttgttttatagctacgttgttaaaagagttttaattttattgttaaattatatttaataaacgtttatacaaatgaatatttaataaaccttctatttacgttgtcttgatgttgtcttgatgtaaaccatatttaaattgcatctgcatatttctcgaaatctcctttccttagagtgtttaaacggttttgaaaattcttatcaatcaattgaacaaaattgctctccatgtctcctgtcatttcttttcctctaaatactttttaatcgacaataaacagttttttcagtcaacatgaccacacctgaatagtttacattacattaaagataataatacaatttttagagcttttaacaaatttgaagtcatgaaatacaataatctgcgctgtttgaaagcttggaattcgaatatacagttttagttttataataccagatcaaattcaaatatgtttccatagtttttttttttttatgtgcaccgtttccatagttttcttcaaattagttttctctaatgttttttttttgtcaattactagcatataattcgatatataattatcttttttgttgttgtatgtctgtttcatttgattctctaaactcggaaaaagacaaagaaagtgaccaaccaagttatagaccgacttgatttaaatggcgcgatctagtggcgcacgtagctagtatattaatcttggattcaattatttttgtcgacgatccataaatttgatatgacttaacaaaagtcaaattttgttgactgaactaaaaggtttagtcggatcgagagagatagagatggctagaaacaaatgggatcatcactatctctatcaaatcaatgtgacaaaaatctcaatcatacatatacttgttaggtacgtttctttattttaattcttgtctttgttctctctagagattagatcgattccaatcactttggcttttcttcgtatctctcgagttctcgaccgacaaatatacctttaaattaatgcaacattttatttttacgatctctgtcatatcagattcttcccttttctctccttcgtgcacacgaatggatagtatgtataaaccagttctctacctatcaaagacaaattttgttttggtaaagcgtagttcgtccaaatatgatattttctttcgtatttcaggataacaaaacaagtggacaatcgacttactcaacatggaattattttactctagtttagtttctttttaacatattttttgtttgtttgtttggtgtaaaaaaagagtaaatcggagtaatgaatttttgtttaatatggttcagccatattagaaatttaaaccaatcacacccataattaaatgatcgaaatagcaaatgttataagaaaatcgaataatataactaaataaaaatcttaacactaaaataatgacttgaccgtcaaaaaatgataactgcaattagtagtttgataaattttattagtgatcaccatattagatcacattcaaaattaaaaaaaaaaatatgtgacgtaagttgtaaaatacaaaccaaaagatactctttgaacataaatgggaatcgtgtatattagataacattagaaaaaacagtgaactcaaaaactattcatgtactctatggtaagtagcttcagtctattaccactcatacttcttatggatgaaattacttcatgatcacttacacataaatacgataatggcaagtttaaatctgattacaaaaatagaaatttaggtgaagatatgaagaagggtgcatgggggttcccccacatccacctgcaaaagttatgattgcatttcaatcattgcccacgagcgcaaccaacacgtcgctctctttcccttcaatttcatttttttatttcatctctatcggttttactttgctcgatatataagtttatatgtattacaaatttctcatgctttgaatcatatcgtcccactactttttggaattagtcattgctcacaatgtttgactcttttccttctattctttttgtctttaccttctccgtttcagaaagggttttgctagttatgctaaatgaatgattaaatcgaaatgatacggctagattttttcttttctacttcgaaatttttcttgtaggctttttaaaaatggaaaattgtataatttctgaaaattgtattgagctaacaatttttatggaatgatttgcgataaagcacatcacaatgcagagtttattttgcgtataatatataattttacactagttgtttgcatgaaagtatatattttcttgagattttcttttcccgcagtaaccatttactcgctctttatagacaaaacataattatgtaattagcaaaacaaaacataattatgtggagaaaaaacctaagaaatggaaagaggaggctaaacttaagataaagccccatgaagcaaatgattttgaagtaaaagaaacaaaagttatgtgtatgtttggttaatggcaaacattagtaagacaaattctagattgtttataaagaaacaatttaaaatcatggcttgcatttgactgtagtaaaaaaagactttacaaactacaatatacataaataaacgacaagcattattataatcaaaagaagaaaaaaaagttgagaaagaagagaagagaagagtgttgagttgttgcttgttggatcctctttaagttttcgcatggggttaacattatagcaaattctccttttactttcggctctggtccctttccagatttcatttttgttattatcataattagtgtttttatccaccgatcttattcttatattttatttgtcattgttttttataagcatttctgagatataaagccagttgggctgagatgtgttagcgattgttacgtactgctcatgaatgtggatgggtcattaaaccaaaaaaaataaaaaaatgttgatgggtcgtcactcaaatattcaaattcatcttatgtgttgttacttgctattttctttcatcataagcaaatttttgtttgaacgttgcctaatattgcttacaaagaaaatgaaagatgtgtaaacattcatatgtatattatattatatgtctacacattaatgacgttttaaaagaaaatccacatgttaatacataaattattcggtctctagatgtatgaaaatggcattgacactcccaaaagaaaagagaaacattcaaagcgctaacattgagtaactacgtcaatcagaacgatcattaaccaaacaaaagtgtaaagatctaagaaatcatatggcttgctttttatatttagaaataattgcaaatctattttacaattccatcacgaatacgacccctgagcatgtgtcccaacctaagtaacaagagtcgtgttgtatttgtatataataataattctaaaaatagatacagatatgtgtatataaaatactcaaacgtacgaagtgtttgaccttggattttagtaatgttttctagcaaatgtgaaaccaaaatattcaacaataatgtcataatgaaaaccattaacaaattccattgtcgtccagcggttaggatatctggctttcacccaggagacccgggttcgattcccggcaatggagccttttttttcctcaaattatctcaaaaattcacgactatcaatatatcctctctctaaacatatcaatctattatatgctaaataaaataacatttcaatcatgttttcaccaataagtttaataattgaccgtttctaggcacataaatcatcacatgtatagtagtactgcataagaaataatcaataaaacatcacaactttaaagttggtttgattttgattaataatatgacaaacttcaaaagagaaaaaatagcaatcaagttcagaggtaacaaacagaattgcatcaagttttgatttagaataaacaaaaaggattcttaagtttttagagttttaaacagccgaatgaaacatcaacgaacatactctcgcgattctgatctcttagaccgcttgtactcacgttcatatctgaagtcatcttcctccattttatcgtagcgatgactgtaccggtctgtgtccccttgatcgtcttcatagtagccacgagtttcttctggctcgccacggtactctgcatctctctcacgggaccgaccaccaccctcatgctcatattcacctccttcataatcccgctccttctttctactgcggtctcggtcatgatcccttgaagtacgatcccgtcccctgtcacggtcacggcggtctctgtctcctctgtcacgggtccggtcacgatcacgtctgctgtccctatccctgtctctgcctccttggtctcggtctctgtggtgcttatcctctctcggtctgtcacgagacctctctcgaggttgttcgtgagacagctcacgagacctttccctttcttttcccttttcccgagatttctcactggagacaaggtaacaacattatcagcacaatattagtcacaaggcaaaagagtttggtacgaatgaaaatatctttaccgctcttcccgtggtctcgatggctcctctgactgggaggttcttccttgcggttgttgttccccaacaatttcttcaccaccacccactcttgaggtcccaagtccaccaccaagcctgcgtggacgccagtttgggacggttctacctctctccacatcaaccaaaactcttctgccgtcaatcttttgtccatcagcttgcttatatgcagctgtaggaagagtagcaaaacacaatgcaacatcagtataaagagcaaacatctcagggagataaaagagggttgaaagaaaagagatgtgagggcacctttcatgtcacgggtgtgcatgtactcaatgaaagcatatcctttgggtttattggtcagctgatcagtcaccaaatgaacctgagaagtttcagaagaagacaattaacaaatcaaatctgtgagaacaaaatcagattcaagataaaagtgtttcatatcaaacaaacatgcagctctataaggcaggcaacctttatgttgtgtccaaatccgagaatgtcaccacccacatcaagaattggcagaaaaatggatgtattgcagcaaaattaccatttttgaagagtctaataaaccaccccttaccagggtatagaaacttagataactaaaaatgtattaaaaagtgaaccagatcaccttcatagtagcccaagtcccagatactgaatatatatagatgttaagataggaaaagagagaagggttttcgataatccaaccttggttgcttgaaaataaagcatttgaatggctttgggatatgggcagataatattttataagttgcttaccagcaggatgagttgagctcattatagattcagaaaacaactaattgattaggtaaaccgtgtgcctataaccactatatgatatatcattgtaaaagtatttgctctctgaagggacaaggaaataaaaataccaggccaaatttaccgaaaacatctcaaacaaacaccatggagagaggagctgtgtcattatatgagaagcacttatgcatctatatattcagttattgagaaaggtctaagagacttgatggctttacacagtctaaagaaggcatgcaaaacaaagcaaatgtagaatggccttttggtctagcagaaaagatgcaaatttataagggactgaaaaattctaaccttggaagacttttgtagataaaataaaacaaattgagcaaagagctctagagagggaagccattacacaaattcttaccgaaccagcaagggaatgctcagaataacctacccgtttaattggtccataagattcaaactcccttttaatcttactctctgaggattcgtagttctgcaagacaagaacagaccaaagttaagcacaacataactcagatgtctaacaaaagtcattcaacagtaagaaaaaaagaaacacagcttacaagtcttgaaacgaacaatgtcttgtatggatctccagtagcatttggatcattattggggtcatctgcatataaaaaaaaaacaaattaactaagaattctcaaacctaagagggcattaaaaggaacacaaataacatatagtagattacatttctttaagtcctcagcagccttttcaacacctttctccagtcgcaatttatgaattctttcccttttctgcgactggacaatgaaacaaaacaaagctataagccactgatttagggttaaaatatggcaataatcgaaagagttaaaggtgcatcatcatacaggtaattcaacttctggcttaggtggagcgtattctggatccccaggctcagcaaagttacttacaaactgagccatacctatattcaatacacaagacaaaatcaaatccaaagcaaagaaaacataatcagatatacaagttgatacctgtataaggcgggcactttctcttctctggtggtggtttgtactccaatggcggacgtggctcaaaaagcttcaagagattgtttgttaagccagtagggtggctctgacccatctgcatatcagatagatccattatatcagctttaaagcaacaagatatcaatcaaactgattcaaaactataaaacaagctcaagaatcaagaccaatataatcaaatcatatgacctaaaatcggaatctcaattcaatttagaactagctgatgagtgttacaacgcaatcgaaaatagaaccgaagcaagtatcaaacgacttaagagtattccaattcattagctagaaacctaatagacaacgaaactaaaatctagagagtaatcacgaattcagcgaatttagagagaagagacgaaccagcttaagctgaagaacattggctctgttctgaactttagcgcgagcttgaacagcggcgtttggattacgcaagaaaggatcgccggagtctcccatggcgacaaaagggatctcggagctgtgctagggtttttcgtgaggaagcggatggaggatttttgcagagagaagaagcaaaactaacaaaacccaaattcaatctctaaccggattctgattattaagaaaaccgagttgagatccaacagatcacgatacgtaaaacgatgccgtgctcgtatatctcggtcacactttaacccactcgctgaacaagagggttatcagcttcaattacctttttttttggattttacaattttttgttaacatgtcaaattattggttttgtaggcattcgttgatctttggctcccatatttttctaaaatccattaacaaaaaacataattaaaatagattccaattttatttatttttacaataacaggctctaaatttttaaatattttaaagtaaccataataagaaaaattaagcatttccaaatgaccatcactgattcacttccataggatgtggctctccatccaatgattttgttaagtatgatggaaccgaggttggagatctattgaacttgacgggcacaccttttaccattggtctcgtgcgctaacagcgtaattgttgttggttgcaacatcaaagccttttgagaaaaaatgagccaagaatagttggttgcgtctccatttgtgcactacagcaccagaagcgagaatggataaaaaaaggttgcaatggctatagatgctgcagaaagaaagaaccttatgtgatcgggcatgtaactggtctcttagtatacaaggggatagtagaaacacaacaataggcgagggtgcaaagtggcaattttaacagacgagtttgacatatacccttcctcaaaaattagtgatactcgatggatttatgcgatgaaacgtacgatagtccacctacaatggtcaattcaaactgtgaatctctcatctgtcgggtgctcacatcaccgttgcaagtgccatatataacctgacggattatgagtacgagattggatattcagtttgtgcatgttccagtggttacaatgtaacccataagatcttttaggtggatgcaaagtgagaaactgactcgttctgttttcttgtattgtggaaaatgcttgcttattataattatgtggtttttcatctacagatatggacgagtgtagaatactcaacaataatggacgtcacaaatattgttgcgaaggtagcatgtgtgttaacactcggggagggtaccattgcgtgttccacaagaagaagacgttgccaattatcatagattcataggtatgcaattttatcattcagatttatgtattcatataatgggactgatgactccccttggtaactgcgtttggccatcgtagtagaaattgttggagccttgtcgcacctgaacttaggcgccttattggggatatatgttatccgattaggattagtacaatatctttgatgatagagtttctaacctatattttagggatttatgtttatctcttgatagagatcattgtatataaataccatagtttgtgaatcaataaaatcaagtcagttcaataccttattctacatggtatcagagcagtcgatctttgtggatcataattaaagcttccgcattatagattttgtaatcaagaaaagattatgaagatggtgatcactgaaggagaagacggtgcctccgacggtggaaatgaaaacgacgaagatgtcggcatgttaagggatggaggttacgtgattgtttcttaatcacatgggtattatttttccaaaactttaagtcgttggttttctatgtttttagtaggattggttttggtttttctttttctttttatgttactggaattattcttgagttaagaaattttcagagtttttgtgttcttagtaagagagtttggtaatagttttaccgttacgggggagtttggttatggtttagccattagtagagtttgtggaacattcatgtttttaggtcatgtttagtcccgagttatagaccgtccaagataaagatgattgtttgtggagcagcataatttgcgtacacgggatgtattcccttttaccaagaccgaagacatgatgaagttccaccccaagaatgaagtttataccctaagatgtttatttacatgatttgtccgtcctcgacatattgtccacgacatacgtgttccgctttgtgattgcaaagtttgtgttttgcgtaccacgtttgtcgtgcgggggagtattggggatatatgttatccgattaggattagtacaatatctttgatgatagagtttctaacctatattttagggatttatgtttatctcttgatagagatcattgtatataaataccatagtttgtgaatcaataaaatcaagtcagttcaataccttattctacacgcctctatcaaaatctatcacatagacataaagagatctaaatatggatggtagtattttcgttgtgaagaagtctacatgaattcttaaaaatgatatcaatcttcttcgtgtcataaatgtaccatggcccatcgtcaatccaatacttagtcgcgacaggaccgctcatccccgaatctggattatccgcgatggctatattctcgctgtagggtccttcggagagggccacggcgcagtcatcaatacatttgttagcgatgctttgtgcataggctgcaagaaaacagttgtgtttggtcgatttgtatcatactcgtttttcttgccaaaagaaaacagttgtgtcaacaatatctagagatttcattttacattgatatccaaaatttgtctgttttgatccttcaatttgattttctcctaccttttcaaaagttgtttagccttaactgttgccttgtgtgttatcatgtaaccacatctatcgctaaggcaaggaactaggagaatttgctgtcagaatgtatcattgtgtgtgtgtgtgtgttttatacttaatacttgtatatacacaatttataaagtattcaagcacatgtataaaaacaatcgtaacttgaaaatttcactaataaacttatgtagttttttgtttgtgtaagaagaaagcacaaagataagtaactaatgcttgagattcattatcgtaaacatcaataggaaagttgaccagggatattctccggaggaggatcattctgacacctcacctaatcacgtttcacgatctgagtatagtcatcgcacacaaacatgcacgaattggtgtcatagcttaccatatccaatacttggttgccgcaggaccactcatcccagaatccagattttctccgaagaacactacgacgcagtcatcgatacatttgttagcgattctctgtgcataggctgcaagagtctcgttccaatccttgacgtattctacgttgtgagcggcgagcatttcttgctgttcgatatcgactcctgggcttccctttggcggttgagcgagggtaccacgagccaggagggacaataatgcgactaagagaagggtataaccaaaaaaactccttattctccatttttttgctcttttgagaatattttttatttcttggctagtatatatagaagttgggttcggtgggctaaaaaaacaagcttggaaacttcaaatctttcgttaatttactaaatagaaaagttaaataatatcctttactctaatgtgtcgatattaacattaatccacatttttttttgaaaaaaatgttaaattatatctttagaaaaataacgttgttacaactagtgcatcaggcgtttgataaagaaagtattgaaacttagattgagtttgctaaatcttaggatcggctttgaagtcaagcttggaagcatgcttcataacgacagtccttctacctttgtttggttgtgatctgatttctcatttatatatcaatccatttgattagttggcctgcagtattcggtgtttcactgtgtctccgtccatttctttccctccaataatgtatgcagtgatttggaagatatacttgataataaactctcgattcgacaatgatgattcttggatacatgagtgagaatctgagaccagccgttggagtagtgtgtcttaaagacgcctttggcaagcgctgcttagacttccgaagcatagcagcaagagaaaaagagatggtcccgtgttttaatgcagtggctacataaaaatgcattccctcaatgctcctctgtcccacttaagcttacgagcaccagtggcgagacggtcgtgggctgccagccatatcaacactttttcttatacgacattacactttttcttacgagtgtttatattttattgatctgcaatgtatctgttcgtccatgccaaatcaaatctatatctatcatgtaacgaagcatatataatcataatttcaaatcttcattaataaacttattcgtttgttattataacttgtcatagatttgtttttggtccaacatgaaaagcacaaaccgatgtcggattgttataaccgggtcacacttaaaccctcttactgaacaagagagtttatagagctcacagtttaccattttgccgactagttgttgtattgtacgttatgtagagattgttttttttttttttgtcgtaggttatgattaccaaatgttctcattaaattttataatccctggctaaattgcgaatatggtcaatgaaagcaattattaatttgacactttatttatacgacattacacgtggttaaccaaaacactggtcactaggaagtggacctggaaccgacccattatccaagaactgaataccaaacaccacaagaatggctagaaccgacagatacgataaaccctcgaccgcacccaacaaaccaaatggcccatttggcagacctgacccagtttttgttttagtgtacaaagaccagcccacgatgccaaccaccaccaagtagctcacaccttccaacgctccgattaaaccggccggtccgggaggtaagccacatcccgtggtcttcaaagtgtagagtgaccatccaataaccggcgtcgacactaaactaccggctatagctgccgtctccagaaatccaccagtgtcggtgttgtccttggcctttgcaacaaccctacctaacggcttaattgatcgccggatcaaattaccccggtgaaacgacggtggaagagaggcagagatcggagatagaagaagcattttaagagtgtgagagataaaagatagagagagagagagaaagattggatgttgaactctctcaccagttaattaccacacaaaatagcaaaaaacctctcggcataagcttttaaggagagccttgacgaccgtttgatcttagtgcatcacacacactacgacaatcctagcaaaaccatcctgaccaataatgatacgacatgtgtaagtgtaatggatgtaaaacaaaagacgatataactcaaaagatttatccacataagcattcttacaagaccctctaacagagaaacaaggtctcgaaactcttcctttgtgtttttttgtgtttttctttccctccataaagtggggtttctaaaagggcggtaaatccaagctgagtaaccgtcatttgaaaatctaccagcctgaccataactgacatttgaacattcagatatagccgcctgaatcaagaaggagccgagcttcttttccatctaaaactcatcaaactagagattctgatctgtatgttcaacgttcctcatcatcatcgtcatcatcctcaccgtcatcatcgtcatctcgttttctctttgggcgagatgatgaagccaaggactggtcaggaattggcaggtcatcttcgacttcttcttcttcatctggatcattgtcctcattgatcggctcgatgtcattacccacagcatcatgatcttccacttgagaaactggctgaacaaggtacccttcaccagattcttcatcctatcaaattcatcaaatactaggttagcactaaacacaaagcaacaatttgacaaatcataacttcacgcatggaagcattccatcacaaaaaaaaaaaaagagagtcaagtttggctttggttgtctaacatgataccttatggttaacacgacagggtacttcgtaaatctaacctgatattttatgcagcaaacaaaacaatgcaagaccagactagtattctaaaccggtagcaaaattagagacgatactaaagtcccctcttatatgtcctccatcaatcaccaaagttctaatatcgatctctgaatagcagcaagacagtgaacttaggcacaaaaatttatcaaaatgaagtagtaagtctatcaccacctatctgccgcaactacaaaccagtgaaaaaaacaagaaaattagtgaaacccaagcacaacattcatatctcaaaacataatgtttgaagtacaaagtgtcacctcctcttcaacatcatcatcttcatccgcaaactctccatcatcctcaaccccttggtcatcttccccagtctcgccatcaccatcttcatcgtcatctccttgttcatgcccatcaatctctcctgcgttcatcaacctgcttgtgctccctgacccaccaagaccacgatcagcattatcaacttcctcttcctcctcatcctcttcatcatcttcttcatcatcaaccccatcttcctcattctcactatcttcaatctcatgaacctcaaccacatcattatcttcccctacttcctcctcaccagactcactatcatccccatcatcttcccttacttcttccccattaacagcttcaagacggaatccattagcccgataactcgtcccgttcactccagtagcctgctctgactcatcatcctcagcatcactctcttcatcctcatcaacatcaacaacaccatctaccctttcactatggccattactcatccgaggagcctctgctctttcatctccatcaatctccccacttccaggatcctcctcatcaccttcctcttcttcttcttcatcctcttcatcttcctcatcatcttcatcatcagactcaggcctctcattcccttcagcatcagtcttatctaaatacttcaaagttttaatcaacccaaaaaccctagatcgataatccttaagcctagtcacaggacactcatacagatcaagagacacaagcttcaactccgccaaaggagctagatcctcaacaaactggatccggttattagataaatccaaatcacagaacgaatcaagcccagcttcaacaagaaactctaaaccaacagtgatccgattatcagataagattagcttctgtaaattaccaagtctaggaaactgttccagagaagaaacaccgatgttagctacagaaagatgctgaagattctgaaacttctcgagaacactaggtggtggtaaacgtccctgaacgcatttcacagcaccatcaagtgttagcgttcgtgtagctaacctatctgtttgaccatctagagccgcttctacagctctttcccaaatctcatccatcaaaaccaaacccaccttaaagctcacaacacaccttctctctgaaaacagagaacagcttcgaaactcgctgagaagaaggtatcacaacagagcgaagaaaggggaaaaagagggttaaaacagaagaaattgatgaatatcgatgaagggtaagagatgatttgaagaacccagaatcaaaaactctctcttttgaaaaatttctctaccggaaaaacctaatttgtacggtcaccaccagtcgccactaaaacctcgtgaggaagacgaaaacctaacattgttttgttctttgttgggctcttaattgattggggaaattcggttcgggtcgggttaaaaagtggggacgggtgggttgttttggagaattttgtgtgaattatttaacgtgttgataaaccgttggattaaagtgtttaggatcgatgacgtggcgtaatggaaggtgttgattgaattgttttgttttggttgtgtagaaggacgtaaggaggatttggatctggacaatttcgacacgtctctgttgtgtgcaactaatagtggacccctttgtttgacatatttaccaaaaacgccattatcggccttttttttttttttgtcaaagatgaattatcaaatctacaaaaacattagtggatcattagaaattgaaacacatataattctcccaaattgtatgtttggtaaaaagtaattcaacatggttcactaagctctttttttttgttacaagtctagatcattttaacgtgttaaaccatttgagtcaatatgtgatttaaagctctattgggaaatttgactcgaaatagtttttgtcgatcgaatatagagaatcattgtaacttatgtatacatctacatttgtatattaaaagagaaaaataaataattaaaagaaacaagaaaaaaaagaggaatcaagaaagagttttacgtagtcaacattagaaatttatatctacatgtgttcgaaacttggcaattgataattgagattctaggtaaacgttgccagtagaatgattttaactctcttggcatatataaattattgcacttgtattgtttttaagaaacaatatagccgtttttgtcagtaagaaaccatataaaaatgttaagtctcatggctgcttaaaatgtttcgaaacttttaaagttattaatagtcaactgcaagcagtagatggttggaattggatctactagtccatgataaataaataaataaagtaattccggttttcaaattggtttggaatagaaagttaattaatcaatataaaatccccaaaccttgaaaatcaacctcgttgacccatctttatttcacccgtcgatggtaatttgtcgcgtatcggttatagacaacaattactaatattcttccaccatatgcaatgtcaacaaagttactatgaatgattgatttagcgttagttttttttaaatcgtcgtcgtattcatcggtttggcatagacactatatgattctcgaaccaatgaactcgttatgtaatgtatatttgtctcgattatgattatctaatttttgttcaaatcaacaaagtactagtctattgttagaagcgttagttacgttagttgatatcatagccatgttaagctagtatcatcctcgacaaaagtaatattatcatcgatgttcccgttacattagactcttaatacatgttaattatgaatatccatatattaatatgattgtatgcttcaagaaaataaaaagatcatgatttgataattgatactacacttaaagtaattatagttttttttatttttttttattttcacatttccaaacatatgtgatcgaatacgaatggcgatgtttaagatgctaaatcaacaagatccttacacaaaatcgaagcaatttttgaggagtatgtaaacagtgaccgacttgaataccttcagtgccacgtttttcctcacttggacaaacttgttcttcatttttatttgtttggaccaagataactcgttattcattacgagggctttccacggaagaaaatgcactacctacaaaagaaatggaataatataaacttgaatgggccctgcttgggatatcaagacttcggcccagcaatgtccgtgcatgcaaatattttgttaatcactttttaaagtagcatttggattatcgcttagtatatttgcattcccatctattactaatactacaatactaggagcaaaagttattagttctttaatttgattgctagatagtgctggaaactttatttcaggaaatggaatttctaggctggctaaatagtgttctggattcttgagggaccctgttacgcctaaaaataatgttgtttttttgaaggtcatcaaaataaacattttataagacagtaaaaaaagaaataagacaattatatttatgtagtcaaacgcttgtttttgctggatatataattacataaaagttgcatttatcctttaatcaattgccaaaaagcaagaaataatatcaatccaatcttataaacaactatattatgaaaaagatgataattattgtacgcaagatgttatacgacacacgtaatttgtagatacacaaaaaggtcaaggtcaacaaataacacgatcaattgcattaaatgtgtactagcatggttatcagaaatttttattgataccatggaatcgatagacgacaaaaccaaccgtaatttcaaaatttccgtaattgtttctcttctcttttcttgttttatcgacgattatggaaattttttttttttaacggagatgtttggtccgacaacgtgacggtaaatcctccactgtcttcgcttaaagacaaacgacaattaatctttttaactcctcgtttcacttgcaaagttatttcatcattttagtagtttactctcattctactaaatttgtatttttattgtaacataacggtcatatcagtatttggttagttgattatgtgacatgactatggataataagacttgatatgaattcccatatataagaaatcgtcgatgacataaaactactttatctactaacttcataaggcaaaaatgagtagataattagattattagaaagagagagacaatgagattgatattttttatatgggagtccaaaatcaagatagatatacttgaaaacactcgaaccccacaaggatcgacaaaatatttctttttaaatagctcaaaaaaattatttaaaaaaattcaaaatctttttaaaatatccaaaatgttgaaaagttgtaaatcgataaaagagaaaaataataataattgtgccaatagagagaaagagagagacagaagaagaaagaaaggttcctttgtctcggaacaaccaaagagccaccacccaaaaaaaaaaaggttcttagctttttttctttctttcacacgaaatctcacgagacgccttatttcttcttctctgtctctttccgacggcgtaactctccggtggaatctcagctctcttatcagtagaagaagttttggtctttaaatgtaatttttttggttttgctttaaatttcaatcgttgttatcagaaaaagtaggtagcaaaaaaagagattttttacgaaaagcagattgactggtagctgaaacaacggaggagaattatagaaacgagtaaaaaacaaaaccctaaaggttgaaacttggttgacgaaaaaaatgagctgatttttttttcttcatttatttcattcttaactctttttcacatatttaagaatcagtaagaaacaaaaaaaaacagagtgagactaaaaaaaaagatgccggtagatttagataactcctccacagtttccggtgaagcaagtgtttcaatctcatccaccggaaaccaaaacccacttccaaactccaccggaaagaagaaacgtaacctccctggcatgcctggtaaacttcaaaaatccaaactttattataactcaaaatttctcaatttttgttaaagttttgtcctttttatacagatccagagtcagaagttatagctttatcaccaaaaacattactagcaacaaacagatttgtttgtgaaatctgtaacaaagggtttcaaagagaccagaatcttcaacttcatcgtcgtggacacaatttaccatggaagcttcgtcagaaatcaaacaaagaagtgaagaaaaaagtctatgtttgtcctgaagttagttgtgttcatcacgacccttcacgtgctttaggagatctaactggaatcaagaaacacttttgtcggaaacatggtgagaagaagtggaaatgtgataaatgttctaagaaatacgctgttcaatctgattggaaagctcattccaagatttgtggtactaaagagtataaatgtgattgtggtactctgttttctaggtaaagtgtttgccttttttgatcatacataagaaaaaattcaaaattcaacaatctaagttttgagtgatttttgtttgcaggagggatagttttataacgcatagagctttttgtgatgctttggctgaagaaaatgcgagaagtcatcatagtcagagtaagaaacagaatcctgaaattttgacccggaaaaacccggtacccaacccggttcctgctccggtggatactgagtctgctaaaatcaaatcctcctcgactttaacaattaagcaatcaggtaaagagtctcttgtagtgttctagattgggaattttttggtgtttttggattcatttttgtcgctatatttctttgttttaagctgaaaatgaagatggctaaggtaatctctgttaatggtcggtggtgttcttggagtttagttagatgttttgtccgtagtgtcgtattattttatctgttacttgattaagaacataattcgtttggtaagtttaatagttgttcaatggctgattggttctttatgataaacaaatcaaagatatgattgatttgctttttgtttgtttacagtttattttttcaattcaaaaagtatcaaactttatgtaaacgactaatgactcttatgatctacagaatctccaaaaacccctcctgaaatcgttcaagaagctccaaaaccgaccagtttaaatgttgttacaagcaacggtgttttcgcaggcttattcgaatcttcctcggcttctccaagtatatacacaacatcgtcttcttcgaagagtcttttcgcgtcatcttcgtccattgaacctatctctttgggtctttcaacaagtcatggatcatcctttcttgggtcaaaccggttccacgctcagcccgcgatgtcagcaaccgctttacttcaaaaagcagctcaaatgggagcagcttcttcaggaggttcattgcttcacgggttagggatagtttcatccacttcaacttctatagacgcaatagtccctcatggactaggattaggactgccttgtggtggcgaaagcagctcgggtttaaaagagcttatgatggggaattcatcggtgtttggtccgaaacaaacgacattagacttcctcggtttaggtagagcggttggtaacggaaatggtccaagtaacggactatctactctagtcggaggaggaaccggcatcgatatggcaacaacatttggatcaggagagttttcagggaaagacattagtagaagaaaatcataagtagagtaaatgaatgtgtttgagagggttttagatgttcttgttcaataggttagtgtgagaatttgaaaacttccctttgaaagaaagggttcactatttaatatatatgcaattagttaattattctgatttacctaatttcgatttcttaaacgcaaagaaatctttagtgacgagtgatgatgatttactcttcttatctaataaattccttcacaaatgcaataaatggaattgttttgctttcgtttccttaatcggaataggtaaagagagtgagatttacttctttatatagaaactctttccaaatcttgaataatagggtcccatttgtttttttgttaaaattttcggtggaatattgaaattttttacctttcgaatttgacatttgatttgattagatattcgatagacaaaaagaagaaagagattcggacaatagatttttttgctgtgccaatcgtatcgtaggaccattattgataatcgatatagtgacgtgttattatcacgacaggacaacactaagccgtttacaatctcctaatacgacccattacgttaatgaaaataggccatcgttacttgggggcttaggccataatttataagcccatttatctcagtttaggcccaaagtttctcaatatatctaaatatactaaatcagcagtcacttttccagtaagtgatgcatttagtgattgacacatcagcttattactatttttttattctttcattttcacgcaggatttttatgtgtcgtttttatttaactttgtttttttctcaaacgattttctctttcatccccacgatctccacatctccactttctctcttccaaaaactccatgactactgtgtaaaatctcaaagatgggtttctcaacatcattaatcgattactcagaaatcaggtactttgttcatctcaatgaatcaatttaccatcttctatttctgtttgtaattttgttttatatatatagaattctccatagatccgaaaatcatatatccttcttctagatttctatggcttttttttttgtttttgctttgtttctgctttatttgactgaattcgatttctctcatacatctccttttttccataggattattctttaatacaatcaatgcctatgattctcccgtctcacaaacactcaaggaacaacgacaaattttggtttctcatctgaacagttgccttaaaacaagggtgagtttaatatcttaatcgaagctcaaatgtttttttaatggtaaattaattctcatactttttactattcttctttcatctcttattttacttctttatatctacaatttcttttttgtattaatacaaatacttcaattttaaagtcatctcttattttacttctttatatctgcaatatctttgatattgtttcaaaggtagcgtctgcgtcatgtacttacttacttgttcacattttacatttttttttagacttccaagctttgggtgtcaacgaatgtttgtaaactgaattactgatgatgagaagaagaacacattacaattggttggagctaatgatgaaataagcggacatgtatatacccagcataattttcgtatttatactctcttatatttctaaactcttgatttgttagttactgtctatcgcaattgattcattgggtagaaaagttgtaccttctttatatatttttcttaatctttgtatattcttcagtcaatgataataaatttattgtatatttatgttgtctgctttattttaaaaatcttagttaagagttataacaaatataatttaaaacaatgttgtccctgtatagcaggagtcaaatgctagtagtttactgaattagatgatacgaagaacgattattataatagttgttttatttttgacaatcacttgttaaatttcgaagctttttagtgattgtaactttgaaaaccaaataccctctaattacaaaatctaatgttgtccattaacaaagttttatatattgtggtcgattagtctagacttcggcctaatcagcttataaggtaatccgataataggcgctccgactatctcttgagtccttatatttgttagaaagccatttcaaactcggattaggcaatgtgatggtcttctgggaagaatttcactacgcatttagcactctgatgatggtcgaatcatctaatagagtatataaaaagaaaatttagtaaaaaaagataaaagcaaaagcaataagagttttccaacacatccaactttcaaaccaaatgcttctagttttctttgaagcacatgtacaggcaagaagactactacattattttctcaatccaatagaagctgacatgagcttgaagctctagccatataaaccaactcattgagttcccgcgaacgctcttccttcggatacaaatatgaagcggcagagaaagttgcagtctttaactgtcttgcattctttagaatgtacgccactacttttttctcttcatctcctgcgttgtaatatttccactcgaaaatattgagatggaacaacaaacattgaggaactgaacttggttcttcccaatgttcttctattggatcgtctaagtaatcatgttcctcacacttgcactaaaagaacaacaaattataatctattagaaccttaaattaataacttaagaaagtgagacaatccaataaagaaacagaatgtattaggtcatgtaaaatgtttacttcgtagatcttgagaacttgtagtttaggagaactttggagcatccaagtaagtagatcccaccacattagagcgtctccacataactccaaatgaacaagctgatagaactccatatggttatgaagctgcatagagattctcggaaacataagcacaatacaaatgtcgtgtatcacaagaaaacataggtttggttttggttacgtaccgtcgtcgaaggagataaacataaagagagacgcttgactgatttaagaggtcccaatagcttcttgggatttctgtaaatgactttaatattcacatcaaccacctcaggcatattatctctcaagcacaagtcgccatagaagtctacaaagttgaagtacttcaaagctggggcattgaccacaaacgtaaagtcaccgtacagttctccagatgtatcaagaatagataagctctgtaaagtaggtatttctacatagaaagaccgcacatggaaactgttataagatttgtccaacaccaactcttcaagaacaggacaacccgacaaaagcctgcggtgagactttttggttttgtactctacacacacaaggtgtaatgatttcaaggatggaaaacaaacatcgataggaacattcagaactaccgtggaagcgagtttcaagacctcgagtttttcatatgtataaagactctttggtagtttgattgacctatgttccctgaaatatccttcacaatgtgatatttcaagttcacgcatattgcgaaccattccgattctgatccatgttgctatatcttcagagctacaacaaggaccaacgttgaacttcactgtttctagaacctgagctctattcaacaccattgatttgtctacatacttgagaaatctcccgtaataggaaggctcaagttcaaactcatcatcaaaacgaagctttggaaccatcatccaaagaaacttccaacgttttgacaaaagcattgtgacgacaacatctttggtaggaagtgatgaaacaatcttcaaaagcaaatcatcagacagattactaatcctatccatatatggaaacaacttctatagactgaaaaacctttcagattcaaacaaagatgtatatgtgatgattactacaaaaccaacaataatacaaatacccatcgaagcaaacacaaccctataacaaactcaaagagtaaccatgaagagaagaaaaaccaaaagctaacgcatgaagcagaataaaaaagacagatagattaaagtgagattctgcttcgatttcataccaaacggtgatgatgagtgtagatttggaagtttgactttgaagagaaggtggtgaaagtgtatttgctccgtacgtcattaaattaaaacaaaccaaaaaaaggggaattgggctcaacggtaatggcccaaatttagtatatatataaggctcaaacgaattttataaaatggatacgtaattaaaagattgaagttattgagaattaatgtgtagtctttctttgaatcgaaaaatccttgtataaatttattatatcttgaaaaatattaatgagagatttgaaagagtctttcaccaatggaatgctctaaatgtatatatttacagatttctatgtatgtacttttatctggttataaaattaaatcactagatatggggaatttatttaaaaaatttcaatagatctctcaccaacgaaaatggtcttatcggatagtttactacaacgatattacataaaatatagttgaagtttccatgaaaagatcattaaagaaggatgagaatgcatttattaaaacaacaaaaacaacaagaaaatagaacaaacagtcttttcttaaatctgtcaactttctatgggtaagcacaaaaagtgatcatatgcatctcaccactttgaagaaatgaacttcttgaagaaaggaagtatcttcttcatcacgttctgcttgatcttcttaggtttcttcagcttgatatagcgctttggaagcagccaagtggtctccaattcctctatctcatcatcataagcttcatcttcggtgatcgttatctcattattacttctctctgagcagaatctttttagcaagctttccagtgagattgtaatatctttgaattcgagacgagtctttgagtccgctgcccaacaacattctaatatggggacgacctcatcaggaatattcgataggcttggtctcttgccctgaaagaaaaaaaaagattcatcatgttaaaatcttctccattaagtaaaaattgttgatatgtatataacttttacctggttcacaaaatagggaatagaaatgctaggtatctcactgaaaggtgttttgtttgtgagcaaggaccagaaaatcagtgcgaagctatacacatcgattttctggtcgtagtgttttttctccccaattcggagtggctcacggctgcatacctgtggatacaaaacatacaatcattaatcatgatatgttctagtcaaatatttagtctagaaagaatcattacctctggagccatccaacggtacgtgcccgcctcacaagtcatgccaccaagagtcttttctcttgcaagtccaaaatcagccaacttcacatgtttcatatcaccagttaccaaaacattccctactcaaacacggataacaaacaattaatttgtttcactatctacaagacatgatgctacaagacatgatgatgtgtaaaatggagtatatttacttggatttaggtcacggtgaatgatgccttttgagtgcaaatactccatggctcgagaaatgtccaaagcaaagcttagtgacaccttgagatcaagaggactcgggcgagagttcaacatgaacctctgaagagtaccacctcttacgagttcggtaactatcatcaattgtggctctatgcaagctccaacaaactgtacaattaatgttgaaaacaccaaaatatttattactcattatcgtaacattaatattataaaacaccaaattatttatttttgtttgaaacatcaaatgatttattattttcatttttaccctgacaatgttttcatgtttcatcgaggatagtaccagaacctccttttgaaactgttgtttgtcctgaatgcttacagcagatgttttacccggctgcactatcttcaccgccacaggaacaatgtttttgagtctataaatcattagagaaaatatatgaaacttttgattagcacaaaagccaaaaacacttcatcttatgagattaattccgatttttctattaatggtttctatgcaacatcagattaattaattcactcaaaaataaactatggagtagatgtagatctaatgattgcctttttacatagatttctattaagttaggttgcctcaccaaaacttcacatatagttattgcctgaataaagttttacagttgtttcggatattaagaattaaaaaaaaaaactgaaatgaaactagaaatcagcaaattttatttggacaaaacctaatgatttttttttcaaaagatttataagaaacataaatacataaaatcttaaaaagagagagagagtgatgaaacacaccggcctttgtaaacgatggagttgcctccttctccaatcatctctcccctcatgatgtctttagggttgagaagcaactctctgctgatattgaaatcgaactggttatcagactcatcattattgtcatctgagccaaacgctgacatgaaaaaagggtagttcgcattaagcatcatcgtcggagaaatggccatggttggagctcgcttgtacttttgatgagtagaaatcatagtgctgagtgaggaagatgagtgaggaagactgtgaaagtgtttgggttatatagaaatagcagtgctgagtttggggctacttaagtaatttcaagaattgtattttagagggcataaacaaagaaagatattgttatgtattaattgacaattataacttgaatgggaaaatataggaaaaatctaaaagtaattcttatctcttaaatgtaatttatttatttattcaccaccacatgtaatgggtttctcagaatcttatcttttaagtaattttttgcatatatgtttaacagctcatttttcctttttgtatttaaccatactatataaatatggactctatacggaaactaaacttatctaaaatttgaaaaatatatattctattttgcttctaacactatttaggagtttttttcacaaataatacttaagagttaggacttcagtttctatccaatttgttaaataaaaatgggtaagacaaagataaaatgatatatatatttagtgcaatgtaaaattatagtcaaccaaaaaactgttttatcataaatgtttctggaagatataccaacagaattctatggcctagttggcagttgccatgagtttgaaaccaatagtagagaccactttcataggtactttgcgtttgaatgattttgagcttgtttcatacacttttgtcaataatgtgggtgagcttttgagctgagatgggaggtctctgcatattcatccatttctttccctccatatactacgcaaagtgagatcaaacgtatacctaagaagggacttggggagaattgggtgggtggaaccttgtagttggatgatgatgggcgtcccaacttattgtgaatcggctttgaagaatatctcggggaaaatatgattagatttgagctgagtagctacaggtcaatacctcggaaaaaattgtatatatatattaagaaaaaatatattttcatcgccaataatttttgtgagaaaatataaagtagcgaacttaaattgaaaaagatcgctaccaaataaaaataaataatatttaacgatcgatgacataaatagaaaaaatactaaacgatctacttactaatggttttattcaatattcagttaacataccttttataatataatttttgaaatataacggtctcaatatcataaattaaattattatacattaaacgatatatataatcatatcgtactattttctattttattaaaatgtcaatattacgactaccacaataaaaatcaacctttttagttcttaactaaactttaattacgttaataatagaaaaaaaaacttgttctttataaaagtctcaatcaaaactgcattcaatcttttattcaacatcattttttctttcctaaaacttttaagtagaatgcaatacatgaactttctgaagatcacccatttaagtattattctcgtccaaatatgtttaaatccaaagttttgatgtaatatgtgcattagtgctggtatgatgatcgcattcaaatttaacatcggcaaaaaccaaaaagtagaactaaaatttggtttcaacaaatatcactataattatcataaatgtagggttttcgaatagacatatctgtatatacctacacaatgtgcaccctcctttaaatgttagacatttcaactagaaaatgttagagaatgttaaaggagggtgcacattcagaaaacgttacatttcaactatgattatcatttctaatagaaaatgttacatttaccaaaaccaacttgagatttagtcagtacatactctatatagttacaacaaggatatattttctgtataaacaaaaatagttgaaatgtccatgaaaagaagaacgagaattcattgctttaggaaaaatttcctcacaaaaaaaaaaacagaaaaaataacaagaaaacacaaagaagaaagaaagaacaaacactaacagaatcttcagtcttgtctttccttaaatccaccaactttccattttttatttttatggaaagacacaaaaaataatcatggcttgtagttgtacaaccaaaccttgaacttcttaaagaaaggaaatctcatcttcaccagtttcttcttcttcttcttctccttaggtttcttcaccttgcaaaaatgctcttgaagaagaggagagttctctgattcctccatctcaccttcataagcttccccatccggtagtgttgtgccaatgctactgtctgagctcattcttcttagcaagtttgtcagcataaccgaaatctctttaaattccggacgcgcatccgggtcttgtgcccaacatgattcaacgattgggacaaacacgtcgggagtcttcgtaagtattggtctccgaccctgtaataaaaagatatccaacattttaaaaccttattccttttaagttaaaaaggatgatgtgtttttatcaaaaaaaagttgatgtttgactttacttggctaacaagatagggaacaaagaggctattaggcacgtcagggaatggttcttcgttcgtaaccagctgccataatactatggcaaagctgtaaatatcagccttatggtcatattccttcttctccccaactctcagcggctcagggctatacacctgtggttacggaacagaaaatatttagtttatatgtttcgaaatagaaaactaagctcaaaatgatcactacctcaggagccatccatttagaggtgccagcctcacaggtcatgccacctctagtttcttctcttgcaattccaaagtcagccaatttcacatgtttcagatcaccggttaccaacaaattccctacacaaaacacaccaaattatcaaattttgtttctctgtttacaagaaatactgagtaaaaattggcgcatgtttattgtttacttggatttaaatcacggtgaatgatgccatttgagtgcacaaactccatggctcgtgaaatatccaaagcaaagcttagtgacatctttaggtcaagaggacccggacgagagtgcatgaacctctgtagagtgccgccttcaacgagttcggtaactataatcaattgtggttctatgcaagctccaacaaactatatatacatcatcaataatcatgtttatttattttactttacttttcaaaaaaaaaaaacatgtttaatatgtcattattataacattaatattgaaaccaccaatataaatatatatttctcaattttcaccttcacaatgttgtcatgtttcatcttggatagtaacagaacttccttttgaaacgtttttttgtgcgctttggttacagcggaagttgtactcggatccatgatcttcaccgccacgggaaattggtttcttagcctataaatcatgatagagaacatatgaaaacttagtgatgattaaactgattaaacgcatttgaattcatcaatataatatagcgagagatgaaacacacaatcctttgtagacgatggagtaagctccttctccaatcatctctcccactacgacatcgtttcggtcgagaagcaattctctgctgatactgaaatggaatggctcgtcgtcggactcattgtgagaaggatagtttctgaaaatcattcgagatatcattttgaagaatggaagtgagtgaggactaaggatgatgagtgaaagaggaagagttgtacctatttatagtactacaaatgtgggtggtaattctgtaattctgtatgtagtctaaaactggatggttatgtgggagaggaaaaactgaattttgtttcatgtatattaattgacaattaatggtaaaagaagggaaagtattgtttacccaattagcatgaattgcatgacatggttttgttactaaccttatctctttaagtaacttttttttttataatttattcaccaccatatgtcatgattttcttgtaatcttatctttaagtaaattttttcataaatatgtttaacacctttctttttaatttttcatataaccgttactctatactgactatacatatacattgtggacccgatatgtaaatatgcaactcttttagaagaaaaaaaactttatgcatgacgtgcacaaatgtataccacgagaaaaaatggtaaaattggaaaaactacattatttttcaatttctatttttttattttataaaatatatatatatatatattaatgtatttatttgtatcgccaataattttaatgataaaatagaaggtgacacagttagaatgaaggcgataaatatttatttttttaaagtgttctatgatcataagtattaaaaataatagattcactaatagtttttgttttctttagttagctaagaaattatgtgccgatacatcttgtaagtctagcccctacctaatactttataatgtatgtagtgaattttcttctatttttattattaaagattggataaaataatcattcaagcatcatagtccatagtaatcttgctttgtttcgcaaccaagtaagacatctcaattgcgatatcatggcgaaatgttttcaaactttcacgtctatgttgtatcacatatccaatttatgccatagacttggtggagtgcatatctaaatcccacaatgtacgtctaggatatagaagagctcatgcagtcatgctaatacaagttggatatgtgtattgtgtatatatgaaagaattgtgattttagggaagagacacaaccctgcgtattgaagaagagaggacttcaaaattataaagatgagtactaaaattttctaccttaagaaataagaactcaaacgaaaaatacatttagacttctttcctcctaattttaaatactattcgatcgttgtaacggaaacaagacttaatagttaataacttaatatgggttagtttgggtcaagatttagaaacccatcagtattgtatattactttcacccacaaaaactagtttttcaaagcattagttgttcagtaaaaaggagactagtgttttacaatatacaaaagctgtgaaaatatgttttacaatttaaggctggtcctgttccttatttcctttgttacgttttaaattcttataatttttacgaagattgtaacgagttttttttttttttttttttgtaatgtttcaacagaaaaacgacggtttacaacagttagagtttgacccccccaaaaaaaggacggtttacacatatatagaaatactctgaaaaaatgagaagaactggaataacaaatagtggaaaaagaattgaaaaaaaaaatgattgaattaaaaagttatagtcgaagatcactttagctgcgtgttccaaaccaagtcaataagagagaatcatatatacaatttgaatttcctaaggagattagtaatgattagctaattaaaaaaatcttcatatataactaatgcaatttttttggtgagaatataactaatgcgattatcatcatcataatgattttgtatatcatcagattcctatactcatgaatcatgattttaattcaccgtttcatattgacgtcaagtattaaatattaatcatatacaaccatatttgttaccgttaaataaccgaagacttagcaattaaaaaaggagctacttattatacaaattaaacactaattatttattttacattgtaaaatacattactgatagggactagcattgaccaaaacaaaaccacgtgataccatgtggcaaccaagactcggaaactatataatacaagatacccaaaagggtaaaacgacacgcagtttataagtaacatactataaacggtaagcgttcctaggcaccacgtgccatgcacctgacacgctccaaaagatgctcgctctcgtcggcgattcttgacaacgattcatgcgccactccaccgtcgcaactcagcgattcggcagcggtctctttcagcttctttatcttctttctcatctcagcaccttcctcctccaccatgatctttctcaccaacgcctcgatctccgccctcgtaatcactccctccgacggtagtttcttagagcggacggcaacgccaagctcttcgttgaggagtgtcgcgttcatcatctgctccgcaaaaagtggccacgcgatcatcggaacgccaccaacgacgctctcgagaatcgaattccaaccgcagtgagttagaaacccacctacggcttggtgggccaagatctccgcttggggagcccaagaagagaccataaagcctctctcatgagtccggctaacaaaaccttccgggagataatcaggtgtaccgtctcgtattttaccactgttagcggataaatatgcactgcaagctgaaccgtccaccgggggtcgaaccacccaaacgaaccgttgctgactcatctcaagtccccaagccaattcggttagttgtttagccgagagagagccaccgcttccaaatgaaatgtaaagtaccgactcgtccggctgtttgtttaaccaatccaaaaccggatgattagttttagatggatcaaccggtctagacaaaggaccaattggataaaccggtacaccagcaattcgacccaagagctttgggtcttgaagagatttcaaagttttgggctccatatcatcccatgtattcacaataataccatcacacgttgggaaaaccgaaccgaaaggaacaaattcccggtagagttggctgtttgggtcaaggaatgtttcaagtgtatcttcaaaccgaaccggttcacatccaggcataaccataggttgcttcttgattatgtgctcttcttccatgtctttgtccaacgttgggaaaaacaaagccaccgcgagaaaacgtgcgtttgaagcgatgaagatataagtcaacatgttgaactcaccaccgagcggtatcgcgtccaaaccaaacaagtctacgatcagagccgttggtttgtgttgcatctcctctatctttgaccggatggtaggaatggtctcacgcatcatgaccaagagcttgatcccaaaaaaggctgatgggtcgactaaaccggagatatcgggcgttgggaggccaacgatatcaacaagggccgcgtcgcagcctggtgagttaaggaattgagattgagctgaggctgcgtcggtttcaaggacgaaaatggtgacatcgaagccgtgggaaccagctaagcgttttccgagctcgatcaccgggatgatgtggcccattccggggctagcgaacatggccacatgtggttttgtaatcttcatagcctagatcactgaacgttggccttttttttttttttttttgttgttgttgttgttgttattgtgtcggtttactctctcatagttgcaagtgagttgaatatatagaaccaaaagactttataactcatttgtaagtatctttaaagtcttatctatatatcactttcattttttttgttttatttttgatatcatataccagctttaatcgttttacaagaaaagtaaatataaacatggaagtgtaaatgtatctaagttaattgcatccatatcgtgtatttatttatatagaaaagaattgaccacataagttgtcgcgtgaatgataaaaatgttgaatgcgtcgaccagaagataataatggtaagcttccgacttgtatatgtatatatgtgaattactagctcataggccataatgcatcatatatagtatgtcatgtcatgtatacataaagattcttagatgagtttcttgtacttattaaactgacaaacacatcgctaaacaaattcgaaacaggccatcatcgatacgagttatgagataaaaatgttagataaatactgaagtactgtacaagaagctaaatctttgtattattatctttttaaaaaaaaaatatgcacttgatgtaaaaacgttggtttttggggttgaataaattgtatattcagttcagaaaaagaaaaaaaaaaagagaaagagagttttctacatgcttgatcacattctcaaataaacgtctctttatgaatttcataaatgatgtaatagttatatctttattaagtatagaattcaaaaaaaaaaggttgagttttataaatttcgtgaattatgtcagcaaaatgtattactatatacttagatgcttgaaccatgccactgctgtaacgttgaaatttgctaaaatgatgttgcaatttgctcaaacatttaatgttatttgacttatcgcagtctaggtcctcgtcatcttgatattttccctcattttaaaataataagtcatctctagttttgaattagttttcgggataaatagtattttctctattttttaatatttatgtttttttagagaaaacatacatactaaaaaaatatatatcaaaaactgattattaatatattattttttgtaatttatattttttattaattctaaaccaataatattaaattatttattttgaaggttgatattcatcattaataaccaattaatattgcatacaaaatttaaaaaattaattttcttaaaacaatttttttctaaataataaaataataagaaatagagagagtatatatctcattcatgttttcatttttgaaaaacgtgattgcgattcattcagcttttacggtttagtgttttgaaaacgtaataactagacaaaacaaattaaaactaactttacaacgttttataatttattctacaaaatctatatctaattcagtttgttcctctaacaattattcaattatttcctaccaaaaaatcttcattctagatatatttctattaaagaacaaaacactgagtttaccccaattgaatctttacatctaagattgctagtttgctacacagcataatttgattaaactcgaatgaaaaaaatatctcctatttattctttgaagtgtacaattagttaaaaacttaaaatagttgacatatcgcaaccacattaatgctcaagttcttttttttcttttttcttaacatgcatgacatcgttttgtaagatgctatgagatttgagtttagaaacaataaaattacataaaaatatgtcgtagaaaattgtattgcagaatattattagctagtgtatattgtttcttaatgcaaatctcatatcatccttacaaaaagatgagactatgcccatccgagtacaacatgcttgcgaaattaaagaagttatcaccactttccctgacaccattgactaactttttaacatttttctcaatatgttccgatttcaaattcatgtaaaagatctatacatttttttttcaaaactaaaaatacatttcagcatacgacggaaacatgcaacctagtgatttatactgtaaaacggttgtcatgtatcataacttgagttcaaactcgacgacagtgttgtcaacaatttaaaagctacattttagtatgacatgccttgttcacatgttttgtaagcggaattattcaactaaatttatatgatggacaattagcctctcttaatacatatacataaattttatataacacatcaataaatcatagttttagtttgaacagattaatggacttcctttttccaaaaaaaacagattaatggacttccgatacgctcatttttatgaactaataaaagtacttctacattacatagactgataaacctgaactcatgtcatgtttatggggcaatgcatcttagagatcagacaaatattatcttagcatcaagcgtccccagcctcataataaaaatggtttctatcaacacttagttgacttgtatagttggagaattattcaacatttgattttttcaaacaaaatcaatcagcaatggaatacgtgagcagtgccgtattgagacagaaatatcagcttctcgtcatgggccagttgaatattggcctactaaatgccggattacataacgacaccgtgtcggatgctaatagcagccgaaaattttacgattttttttctttttttgcctgatgaaattaacggtatttctctggagttacgtaatatattttctataacctcaagtagtggttatatataaaagtcataatcaaaaaaaaaaaaaagtcattatcaaacattacatggtccaaaaagcattccatattgatagagcatttatgaaatagtttcggccccatatgaagattttgataatttcttttgacataacaatttggatcaatactttcattaactggactaactcaagctgctaaatgcgtcattgtcttattgattatctagtgcaattttgacgaatagtttcggcccattatagtctactaaatgacatgtttgagcccactgagatggcgaaaaaaactaacatactcctttttttttcttttgtaaactatgtatttattattttatatgcaagaaatgtggatatccaaaaccaaatggtatgtggaaccaaatttgataataaaaaagagggtatatgcactagatgaccatgaaattcataatattatagaaactaaccatggacgtatagtacctgtcggaaaccaactttaaattactctcatatccttataatagggttttggttgaggggacaaataactttataggcaaatagctttactactaaagctttcataacctcctcttcccttacaacaataaccaccactagatctgtaacaccaccgcctcctccgtatttagtattactagatctgtaaacactaccgcctccgtattcaccaccatcatatccataacaccaccgcctcttccgtattcatcaccatcgccgtttacttttgttgacatgtatttttattttaaaacattgtatttttcaaaatttcttttaaataatacttgttctttactaaaattacaatgatctgtgtgtctcaattcaaacgatagcatgtaatttttgaataattcatgctatttttctatttgatatgtatattttcctaaaacgtttgtattttttgataagataatattttttaaagataatgtgcattttactaataatccatgttttctactaaaatcacaagtaagttactgattcatgattcatgtttttttttataatcacatgcaaatttgtacaatcacatgtaatttataaataacacatatgtggtttgcttatctctgttgaaaccatttaccatattgtcaaaacaataaacctacgttctaatgtaataaaaataaatagcatgtccttaaatatcttatgcaacacttctatactcaatcacaactgtttctaaatggctatcttttaactaagtttttttttacgtatacatttttaaggtataagagatattgcatgtgattttaataaatagtggtctaatattgcatgattttttaagaagtagcggtgtaatcattacttcatattgtcttttgttccctacatgtagcagctattgtcggaaagaaagagtttctctcatctgtaaaggttaaaatagttattttgcaggctcaaaaaagttatttacccaacttttctgtacaaaaactattttcttaataatgctgtcaaatttggtcatcctctaatattaccctaaaaaaaataacatgaaaatgacccgaaaaataaatagtgtgagttgtcgccgaagacaaaaaacacattcgtttcaattcgtattagagtgtatatagttggtttagttatggtttagattggttagtatctttggtttagtttactatgtatttaagtttaatcatgtatcacattacgtttaatgaagatttcacgattattgaaaattcgtacaaatataaaacacaattgttgacaaatatatataaaccaagtgaactaaaaccagtcaaccaaaacgtaacaaaccaaaactaaaaattaaatcttcgtaaacctatgaaaaagctaaaataaaatcagtatttatgactgaaaaataaataaaatgtgaaaattagatttaagcccgaatcaacaactaaaaaggacgatgcatcatacacaaacaatctacgaaaaaacaaaaaggttaatgatactgccttttacaaatatatcagtctcattcaaacttttataaatttccttttaaacgtgtataaggacagaagtctcaaaccacatgaaccaaccaacttgtcatgtttatagcaaaacagaattgtccaacaataagatcaagtcacgcaacgatagattcatatagtttttttgtgtgtttctcattcaatttctcaaaagataatatcaaaattacaggtccactaaaaatggtgtgtttatatagataggcacattgaaaaatcatgcgtggttagagatcacattcacatgaccccatcatcacatggggagtggttactctcactttcacacacttgcatttttcattatccaccattacatataaaaaaaaaaatactagattttgtgaaatgaagcattgataaatgataatgactgtacaaaatagtcatgaagacaaagaccaatctattagctacgatttaaccggaaccaatctcgtaccggacccgactaaatagttaaaccacgatattaacctagccgcgtcctttggtgttgtgacctagcgtcagctccaagtcatcgataccaacatcgtgaatcttctcaccttcccacggcttcaccgacacatctactccgacggagctaacgctttttccgaccaggttaaatgtcggcgacggaggacatgtctgagaaacgttaaccgattggaaatttccccatcgacaagaatcaaccgtcgaaacatccgattcatcgcattctggaatcgatgtgtagtgatggagacgccgtgttgggcttgacggagctgagactgggaaattactgctttgccatctcggaagtctcggatttgatcttctaggtgaagaaatcggcggtgtaacaggggcactattggaaattcgtagaggagcgaggtttccagacgaagctaggttttggagatagggaatgagataagtcgaggattgattcgggtcaaaccgggtcggacttgggtaagatgacgatgaagggctagcttgatacgaaggaattgggctttgaaaggccgatgattgtggactaagttggattgacgaacacggcactgttgtttctgttggtcgagaaccctgacggaaaaaaaagtcaattcaatgtctgaaaattgtttaaaaagaatcaaaatttggatgaatctgaagttaaagttgaaacctttcgataagtggtgccatcttcatgaacgatccaaccagcttcaagacaaagagctttgaggacttcattgttgtcacagtgtttaggaagtttataattgccttgagatctaagtccggtgaagattttagctgctattgctcttcttcttctttctctcttcttgttgttctctctttccttccacgtcggcatcctccccgtcgccgccgttgatcctcctcctgatgccgtcatcttctatctcccactttctctgtttttgttttttacttttcaatgtctgggtttttgttgtgtttgcgtaattctcgaggagagaaaaaatgactaaagaattttccttcacgaggagaaaagagaggcaaaagttaaataattttaatagagaaagtttcgtatttatatgatttgttacgtatattatggactaaccatattagtcaaaataaattttgatgtgattgtatgtttgtaactaatttggcataataaggaaaacaaaaggtgaaaaggaggtgagaatctatgacctcacgtactgattttgaagttgggaagttttattattaaaaaaaaaaaaaactactttgttcatctgacaatgttcggtggaaaagggataataatgtctttgagtttggtttcttcgccgtaagatcacaatctgtgtggtttaatccaacggacaaaacatgtcgaagaagaaaatggttgatgaatgattggttaaaaaaaaaaagatgccatttgggtttctctggtaattgtggttcataaaatgtgacgatgaggttaaaagtttgaacggctcagattcaatggtccacactacacagcaccttctgctccagtcaggtcaacatgggaatcatgtatatgttacgtaccagagatttgtgtgccctggtgtgtgtgccacacacgtgcgacacagaaacctcgagccggaccggagctatgggacccattaagccttcgagccctacaatgcacgtgactgtggggatcaaaaattttagtatctttttgtatttgtcatgaattctgtctactacgatagtatttctgtaactccctccggttcgaaaactgtgatccttattcttaattctcggtttagaattagttcattgttcataatcatttatctgaaataattcgatgagacatgtggcaatttgtattcagataagaaaataatgtgataataatgttagagttagttgaccaaaaaaaaataaaaaaaaatgttagagttagatccagagtttaaaatgggccgggatcttaggcccaatggacatttgatttgtataaaatttctctaaaacccctaatatccagataaatctctagcaagattcagatgtgtatgcaagcagtagaacacgcaacttatgaggagacctttcttgcgcaacactcgtctcgtatattaatatatagagatgtagaattgatataagtctcttttagcttatgttattcactactctcatgtaactataaatacatcttgtatgtttcttttatctcattctctcattcttttccaggaaaatcataacaaaaacatttctgggaaaatcatcatcaattttcaacaatttcttcgattcatcttcatatcttcatcttcatcatcatatcttctccaaaattcatcatccttattgtacgatgagagaatcaagccattgatgctccattttcttcatcatttctttcatccaccaaatcgaagaaattgttactttcgctatcatcttcatcttcgttttcttcaattcaatcatctattgatacttcggttcttcgattctttgattcatcattgattctatcatcattcatcgattctttcgttcaacatcatctttggttcaaaattacaacaatgtcgacagatcaatatgataattcgttctttcttcatagctcggatcatgctgggttggttcttgtatcagatcgtctcaacactggagctgaatttcattcttggcaactctctgatttcttggaagtcaaagaagcagaatgtggcaagtagtagtagtacagaagctgagtacagagccatggcagtggcatctgatgaaatggtttggttgaatcagcttcttcaagatctacatattacaatcacaactcaagccaagttgatgtgtgacaacaaatctgctatgcatattgcaaataatccagtctttcatgaaaggaccaagtacatagagatagattgtcacaagacgcatgatcgtataaagctaggttttcacaaggtttttcatgtttcaacagctaaccagcttgcggatatcctgaagaaacctctgcccccaggtccttttcattcattgcttggacgaatgtcagtgtcaactctcttcactccacaagaaggttttgattctaagagttgaggggggtgtattaataatatatagagatgtagaattgatataagtctcctttagcttatgttattcactactctcatgtaactataaatacatcttgtatgtttcttttataattaatgagaaattcactttcatcaagtgttaatatcgtatgcacaactatagtggtgacgatcggattcttggtgacaatcagattataatcaaagatgatcgtaataggatcaattccgtggccattctttaaaaatcgaggaccttaccctgaaaatagaaaaaaaaattcatgagtttggttgtagaataagagtgtacaagattgttcactgcactgtgtcatggagaaccagcttttgatatggacccatatttgaaagtaacacgatggatcaaatgcaaagtattttagttgataacaacagacaagtataaaaaaaaataatacattgtaatataattattgctcatacgggccaccaaaatggaacccagcccacccaatacaatctgtataatctattcgagttatcaactaaaatattaagacgaagagccttttagtttatacgttatgccattgtaatgttggttttaaccggtttttgggccacaaaaacgggaagaaaatttgcttcaagttcaaaatagacaatgtagtctgaaaaaggatgtgataaagacataaagtaaatgtctcattgtgcacaagcgtggtaaagggtcagtcctaggctatgatgtaaactcgcacataacttaggacgtctggtttttccattctcgccttacaaaatagcgcttggatggagagttagggcagggtttcttcaggacttgaccaggtttccgtttgggttatttacctggtttgctattgttcagctatgtagaagtcctccgggattagccaaacactcgttgatcaggatacctagtgctaactctacaaaaaacttcacattatatataattagtgtcgagtgtcgacaattggaagtatcttatccaaatacagtatatatggttaattaatctaaccatctttgataaattaatatccaatttttttaaatagcacaattcaaatgaaaccccacgttaaacgcacatgcatggcacatcgtcatttgggatcattaattaatgacggttttgaattagaacaaaggtcgtaattaaccgaaaacacggctcgttttgttagttgcaaatcaactagagtagtccacacatcattttcaaacgagtctgttactttcccatcgacgtctacacattaaggaaaaaaacataaatacaaatccaacggaacgcttttgatgcaaagcataaaattaattaaaaaaaatatggtagattaaatcgtaatgagtagagaccataatcatatgttttcttgtagaagcatctttcaacaagttttaactgattattacatttgtcatttcagtatatcttttcaattgaaactgcatcatatcaaattatcaatcaccatatttacaaaacaaagtcaatttctttgttagattaccatttttctcctagttttggtaaaactctcctaatggggtggtaggtcaggtgccactcagagtaatacaatgatacgtggcaaagcctaagcatgtgttctcaactcccgccaattaattacgggtcgaacggaccggaaaatcagttcatcgctttaacctcagaattttcagacaaaaacaaataaatagctttacttttgtaactaccacgttcatttacctctcggagacacgttaaattataaagaacaaaaaatgagaagagaaaattacgtaggtaatagcatcccaaaaaacgttttataaggttttaaaaggtaacaatttgaataattcacgggagagaaaagggtgataaagtgtttaatacaataagactgagtactcctcttaatttattaagctttaacacgtaaggcatcccatattaaatgtgatagtgctaatacgaccactcaaaatgtgtcacgtacaaacattgacaacaactttattaaccagggaacacacccatatgtacctatgtagagatcttaattattctcaaatgtatatgttatctgaggagacaaataaatattttctctaaacataccatattatattaaaactcaagagcaattacatagtttctccaaaatccaccattggttgcaaccgaagtggtgcatgaagatataaattttgcaattgcatccacacgtttatttccatatctttaattttataaacatatgtttagagaggttttgcaaaatatacatcgcagcatatacagaatcatacctaataaaatatctaataataatatatacatatggcttattcattcaggcgtggaagagagtgttaaagaggagttaatactgtttaagaatgatggtaaataaagactgaatcggtccaaaacatttgatagattttgcgagttacccaaacttaaaccttaactcatataaatacatatctttttcctttacgggggacaacacgccaaaactgaaatctcgaggaaacaaatcaacatttaataatgttttttttttctttcttcatggctaaaagataaaataatttccttacataaacgaataatatctcgccgacaaatttcattcaataacattgactttctcgtcacctcctttctattcaaactcactgaaaaaaatttcctaaagagtaaagaaacttctctcctgtcttttctccttctctatctctctccctcaaagctaataaatacaacatttgcatctaacgtttctctagcacaaaaatatgcactcgaagtttatattatatctcagcatcctcgccgtattcaccgtctctttcgccggcggcgagagattcaaagaagctccaaagttcttcaactccccggagtgtctaaccatcgaaaacgatgaagatttcgtttgttcagacaaagccatccacgtggcaatgaccttagacacagcttacctccgtggctcaatggccgtgattctctccgtcctccaacactcttcttgtcctcaaaacattgttttccacttcgtcacttcaaaacaaagccaccgactccaaaactacgtcgttgcttcttttccctacttgaaattccgaatttacccttacgacgtagccgccatctccggcctcatctcaacctccatccgctccgcgctagactctccgctaaactacgcaagaaactacctcgccgacattcttcccacgtgcctctcacgtgtcgtatacctagactcagatctcatactcgtcgatgacatctccaagctcttctccactcacatccctaccgacgtcgttttagccgcgcctgagtactgcaacgcaaacttcacgacttactttactccgacgttttggtcaaacccttctctctccatcacactatccctcaaccgccgtgctacaccgtgttacttcaacaccggagtgatggtcatcgagttaaagaaatggcgagaaggagattacacgaggaagatcatagagtggatggagttacaaaaacggataagaatctacgagttaggctctttaccaccgtttttacttgtcttcgccggaaacatagctccggtagatcaccggtggaaccaacacggtttaggaggagataattttagaggactgtgtcgagatttgcatccaggtccagtgagtttgttgcattggagtgggaaagggaagccatgggtaaggttagatgatggtcgaccttgcccgcttgatgcactttgggttccatatgatttgttagagtcacggttcgaccttatcgagagttaaattttagatgttagttttcttttttggggggtaaaagtatatttttgactgaatgtgtaatataggaagatgaataataatacttgaataaaatgataggaaggataggatagtcgaatgtgtaattagtttggtgatggtagttacttactctcgtaacgcattgcctacttctaaaataattaattcgatacctataaggtaataattgtgaatatgtatatctactctaccgaatgtactacggcgagtaattacaaagaaatatactacagctttttttattgatgaatttccaaatatatatgttttgttttttttgcttttacagttgaatttaaacacatcatcttccattgattatagtatgaaagtttaatattgaatttgagatttgagattttagcagaatatagtcatccacttggttttttccaattataaatctttgttttcctccatgcatacttctgtagtttaagttacaaaagaataccatcagaaaatcgtccactagttaaattatttacaaaaatacacactgattcgtaggcttctaaacattatatgaaaaagtaagtttgcttagtctaaattccttagacttgccaccgtgtttgtgtcttatacattcggctaaacaacttaacagatgtaattgtaaagaaattaaattagaaacatcattagctttgttaaccaaaaaaaaaaaaatcagaatatgatggtgtgttaacgttaattttttactaatcttttagatgaagcatttcaatgtagcatcattgaaggttttctagtgaacaagattgacaatgttaatgattttattatgttttataatgtgatcttttgtatatttttctatatatcttaaaattttgcgtagatttatataaatagtcaaataatttgtgattgtatgggctttttttttctcttcaaaatattagtcaaagttgtaaagaatttatcttcgataatgtaacatctaaaagtttttttttttttttttgtcgtgtgaattgagactttgatagttaatttaataatactttctatattaaaactatatacaagtcatgcagaataaatatgatttggcagatagtgattctaatgacgatattgtcatatggtagttgcagttttttttgttcgattccataattttgagctgtatcctgtctagtcaataataccataatagttgctttgatcattgtacttaatattcatatagtacaaatagtatccagtaatttggttgttttttccttgcgtaaatgaaataaactcgccggccaagaattacgaggttgtcttgtagttaattactacacatcaaaagtcaacaagtcagcgcgttgtcgactacttgattaaacaaggaagcaactacaagtcttagtctatatatgattcttctatttctgtcactcaataatgttcaaaacttcaaatggatcttaggtttgatatgtctaatttggtaaacagaactcacgtagacttattgatcgctgagaatagaactcacgtagacttatatacaatttgttttatatattttgatatttagacttacacattatcttacgatttctactggatttatggacatgtcatatatatagatacgtgaaggtatatatgtaaatctataaatctatgtcatatatacgtgcgattataagattaaatcacataattgaatgattgataagcacatgctataactacattatacatggctatgtatttttcacgaatatagaaaatgatgcgtgtgggtcaactcaatagagattacgtctggatctcgacggattaatatgcaatagtgtagtataccaatgaacatgcatgttatttagatcctttcgttaggtcaactcaaggattatatataacatgttaacatgatctatatagatatagtattagtctatttgatatcgaaaagtgctattttaatactcaacgtacaccgaaaaatgctttaactattctatttaaattttaaagaccaaacatttagttaacaaataccaaataaattaaaaccccaagttatctggttaaaaatgacactaaagctgaaaaaatcccaaatatataagcgttaatcccttaacttctactcggtgcattctctctaaatttttcctttgattcatcgaactcagttgcgattaaagagatattgatggctttgaaaaagaagtgtgagggattgagtcaagtaggtttaggggtttgagttcttaaaggaggtaacttaagagtagttttaccaaatttgtcgtgcaagaagaatatttttgacacttcgtggaagttgggaatggaaatagcattaacttatgatgtctcctttcccatctttattcaaagagacctaaacacatttggtatcgtctttcttaagggtgtcccattaccaacgagactaaaatctccgtttccaccacgttcccacttttctctcagttttttatttctcctctttgttttcctctccaaatgcatatatgaaacaaatcacatatatgaacgttaaaattcatgcatagacttgttgatgactatatatttatcgtagatttcaaattaacagacaattaataaagtatcttctataagatttttcattaaaaagatctgatcactactaaaacgttgaaaagtcaaatatgcatattacatatgagtgacatattaggccggtgaacaatatgccaaagatcagcctaaccaactctcatggcctaatcgggtcacaaacaaaatttgacagacgaagattattacgtttttttgttttagtcaaaatcggacagacgttttttttgttccctagttttcgtgtacgacatcaagactttaacgcgcaaggaaacgcacgttttctgagtgcaagcttcggcatacgagagaggccatacattgacatgaatatacaaagcccacaacttatccatcccatcattaaagaaattttattttattttagtggtttaggtttttcaccttagacattccaaaattgatgataacttaaaattttcaaataagttaactgaactttgtgataccttgtaaagtgaaataacaaatctaaaagttttcgttttttttgtcaatgtgataacgatgttaaagcaaactactacactaacgcattcatattaaaatgtatgtaaaactccaactaatttgtcacaaatttacaagatatcgaggcttgataaggggtgaagctt

SEQ ID NO: 1075 - DNA, 129516 bp, Arabidopsis thaliana
gaattcctatccaaaatgaaatttgcatctctataaaagtatcattcaagagatcattaatcttcatcgatcaaagtcttgaatatttcatctatatatacctaagaaagaaaagagttaaagaagtatattttcgattcaaagaagaaaaatgaattctcaccagaatcaaaccggagtgcaaaagaagggaataacggagaaaatcatggagaagctaccaggtcatcatggacctactaacactggtgttgttcaccacgagaagaaagggatgacggagaaagttatggagcagctgccaggtcatcatggtgctactggtaccggtggtgttcaccacgagaagaaaggaatgacggaaaaagttatggagcagctgccaggtcatcatggatcacaccaaactggaaccaacacaacttatggtactactaacactggtggtgttcaccacgagaaaaaaagtgtgaccgaaaaagttatggagaaactaccaggtcatcatgggtcacatcaaactgggactaacacggcttatggtactaacactaatgtcgttcaccatgagaaaaaaggtatagcagaaaagattaaagagcaactgccaggtcatcatggaactcacaaaactggaaccaccacaagttatggtaatactggcgttgttcaccatgaaaataaaagtacgatggataagattaaagagaagcttcccggtggtcatcactagattgattaacaacttgtttaagcttattttaagtatttgtgtggtgtaataatatgatgatgtggctttctttcattgagtcgctaaataatatatgtaagtgatggatctttgaattaatataaaatatctacttctggtttcgtttatttatctttctatcgcttcaactattccatgttattaaaatacttgtgagttgtgacacatacaaccacgtataattcacatgtaattatttggtaattcaattctttacaagtttatatgttcttttgcatacaagttatcagggaaacgaccgcagttgtttggcaatgtatattactcaggttttcaattcaggcccatacggcccaaataagttgtttttacggatatcgagttaaaagaggtgtgtcgattataacggacatgtgtcacactaaccacaaaaccaacgtcttacgtaatcgccacgtgtgtcacttcaacgcaatttgataataatcataatactatatgtgattatgatccctatccaaagttgcggttctataaaaataccattcaagagcgtatacatctttatccatcagtgtcttaattttgtctatagctaaaaaaaggttcaattgtaaaaggaatatggagtcttaccaaaaccagtccggagcgcagcagactcaccaacagcttgaccaatttggaaatccatttccagccaccaccggagcctatggaactgccggtggagctccagccgtggctgaaggtggtggtttaagtggcatgcttcaccgttctgggagtagctctagctctagctcggtatgcttctgttttacgcaattgcttttgcaatatttagtgtactctttctatatcaccaaatacaagaagtttcatttaatttgacttcacctaactagaaaaaatcaggaaaccatattttagatttaactctacatattttttataaaccattttttgtgttcaaatgataagtttttgtttgtaatttgaattatattcaaggtataccatatatttaaaattactaaataaaatatggaaagtgttgcaaatacatatagctttttaatttttctgacgattttcatgcatgaaggaggatgatggactaggtggaaggaggaggaagaagaagggaataacggagaagattaaagagaagctgccgggtcatcacgactccaacaagacttcttctttaggttctacaacgacggcctatgataccggcaccgttcaccacgagaagaaaggcatgatggagaagatcaaagagaagcttccgggtggtcatcattagtttcattttaattaacttgtttggtgtgggtcgttacgcttatggtcgttgcatggaataaattataaaccctctctttttcgtaacatttatggctcaggctctattgttttgagtgatacaaattaaggtaatgttagcacacgggtgggttcacgattctaatcgacatcttcccatttaaaataacaaagggattttgacgttttctattcccaacacaaaggaagacaaaagaaggagtgaaaatcggtaactatatatagatgtaacgaatcttatatccaaaccaacactcacaattaatgtatccccccatccaacaaattaaaagccacgttgacgtgacaaatcatacttggtgacgccttcctctataaattatccaaccatgcattcatcgtcattcccacaataatcgctgagagtccaaatgaatacaaaaacggtgaagtcaatggcgggcattgttctctctcaaatctcacttgttgcgctgtttcctctatgtatttgttatcaaacacatcaaagcacgagctctgtagcctctctatcccctcagttttacgagaactcgtgcccaaacgcacaagccatcgttcaatcttacgtcgccaatgcatacttcaatgaccctcgcatggctgcctcaattcttaggctccatttccacgactgtttcgtcaatgtttgacaaaatctagtctattcttcagatatataatgttttgatttaaataaggagaaatgttgtttgatatatatatactctggttggtgcagggatgtgatgcttccgtactattggacagtagtggaaccatggaaagcgagaaacgatcaaatgcaaatcgagactctgctcgagggttcgaagtcattgacgagatcaagtctgccttggaaaatgaatgtcctgaaacagtttcttgcgccgatctattggctctcgttgctagagactctattgttattgtaagtcaattctctaacacaatcattaggattgatatataattgatacaaacactcgttacttttgtaattatctacagtgtggtggacctagttgggaagtatatcttggaagaagagatgcaagagaagcaagcttgattggttccatggaaaacattccttctcccgagtccacgttacaaacaattctcactatgttcaactttcaaggacttgatctcaccgatcttgttgccctcttaggtatatatactacactcgtccaagatattaatgtggttgaatttaaaggggtcttaaagcaattgtgattttatggaagaaactaattaaaagtataaataaatgttaataacgatgtttgtgattggataagaaaagttatcttatctctctattaaagattaaatgccctaaaaactaacacattgataaatttaattatcatttctaaattgaactaataaccatgattcaaatgtagggagtcacacgataggaaactcaaggtgtattggtttccgacaaaggttatacaaccatactggaaacaacgatcccgaccagactttgaatcaagactacgcctctatgttgcagcagggatgtccgatttcgggcaacgaccagaacctctttaatcttgactatgtgacgccgactaagtttgacaattactactacaagaatcttgtgaactttagaggactcttgagttctgatgagatattgttcacgcaaagcatagagactatggagatggtcaagtattacgcggagaatgagggagcgttctttgagcagtttgcgaagtcgatggtgaagatggggaacatctcaccgttgacggggacggatggtgagatccggaggatatgccggagggttaaccatgatgtttgagagagtttccattattggatagttaaaagtcctaagcgtttggttaacgacttaacgttaatctttttttttttttgttaaatttgatttctgttgccattgtgtttaatttatttttatttgttctaattaatttatgagtttggtgattgtatggtataccaaaacgtcaaaaacataacgatttttatggcaactgaaattgctaatgaatttggaatgtgatgtgcctatactcaacaatacaaattttgacgtgacaactccattaggtgaaatatctttctcgaaattatggatgtaacttaaacatctaaactagaagtatcggaatgtttttaagaggccctagaaacataaggagtgatgttgtaaaggagttttgttttgttgttagaaaatttcaaagtggaagtgagacacatgaacaaatttgtcgcacttttacaagttgtgttctggagtaaactttacactcttggcttttgttcaaagaagcacataaaaaagctttagacctttctttactttaagaaccattattattgccgagatcacactcgggtttcgttcttgaatacacattattagtagtttaattaagactagagcatcatggttcttctataaggccacagagaacggtatgattttactctgttttgcttaacttgtttaagaaagagagaatctcttgagagacttgttcagacttctcctgctggataaaatgatgaccaccttcaataacaactatctcaagattaggcacaacaatcttgaacacctctcctttcacatactccattgttccattaggtccttcatatccgatatctttgtctcccgctataaacttagtaggaacgacgattttggagtcttgccacggcgccaatatctcccaattcctgtcacattgcacattttcaatacttgtttttgtaacaacaaagactggagataaagtgagagagggaagtgaacaacttacatatccatggatctgtagtaattcaaagggccagtgaatccagatctttgaaacttttccgcatacacttgaatctcttcttctgttatccaatctggaatcgtcgacggtatctcaagatgatctatgatctctgtgtcaggaggagccactaagtagtctgttcttgttattagcaagaacttcttcattaccgataaacaatcatgcttggcaaatgcagcctcagctcttccgggtttcttgtaaaaaacagaaccgagaaatcgaatcaacgacaacaatgagtaccataatagtaacactaacatcataaatcttgaaagtaaatttgggttttacctgaaactgagtgatgtataaaccatctccaaaaattttgaaaaaatctgaaggtttgagttttggatctcttgggaaatatggaacagagagacttatgaaacctttgactcggtctggtctaaacaagcatagacaccaacctatgattgctccccagtcatgcccagccacaaaagcctaccacagtaaaaatgtaaactttcttctccacaaatctatctatctaaatctaaacgctggattctcaagaagatcatttttcacctgagtagtgccgtagtgatcgagtaaaccgatgacatcagcgactaggtgactcacagtgtaagactcgtggctcggtagagaatcggagtcaccgtagcctctgagatctggagcgaccacgtggtaaccatggctagacaagaaatcgatctggtgacgccaagagtaccatgtctcagggaaaccatggagtaacagaaccaaaggcccttcttcgtctcctttctcagcaacgtttaaccaaatcccgttggtcttgatcttcttctctctaacagagctcgtcatgattcttgttggtgatagttgtgagagagaggaggaaaatcagcgaccaaggtgaagactttatcacaagagttgagaaatggatgcacacatgacgtggcggaatatgaaatcaggcctctagttagattacacgtggcggtaactggtcctgattcagtttcatgggttgccgtaagtaaaagaatgtcagccaaattcatgaaacaagaaacacatgactggatataaagaacacaaacgtcaagtaactctcagttcttcagacaacatagcgagttaactctcaagagaacatgccaaacacaacaaagaagagtaattctctaactcaagacaagaaaagagattgtcatttaggattatttctatgtttgatctcaagaagacattgatttcttcttctcttcttccagctgttgaagctcaatcagtctttcagcccatgctcggtccctagcgacagcagccatcttacgttccacttgcttaattctcttcttcctcttcgcctcttgcaccagcgcttgcctcttcttcttctcagactgcgaaaaaaatatatacacgagaactccatcttattagtaaactaaaaaagaacattgcagattgttttgtaaatggaaacagaacggagaagctaagagagatacagccttttatcatcccataggttacttatgatttctcagctttcaaacttatttctcatttgtacaatctattgattcaacattccaacatttctcatctaacaatgtagagctatgcaaagatcaaaaagctatcaaagttcttaaaacaagctagaaagaaatcagacaaaccagtataaaagcacgacgctgccctatgcgcttcttcgcatttcttctcttcacacttccctcattaggattgtttgaagaaattggctggccaggtgtatattgaacgtatgcataaggccctgcattatcctcaaatcttttaattcatctaaacaatcccaccgtagattatctctggctatatcaacttctcagtaacaacacccaaaattgagattcaaaacaatcactttccacttaagattacacaagatcaatactatacccaccaaatgctaatttgaaaacagcataaacaacacccgcctaagaagattacactaactccattctgaatcacacaacattcatctctaatttcacaaacaaagcatcaatttttacaaccccagactaaaaatgaagctcaaaatcaaccatcaaacacaaaatagcgaacctggaggtttcaatttggatcttttcctcttgggatgagtcatgggtcgtctcttcgggagccgagtatcagtcaagcttaagctatgaaaatggttagccattggaatccatggtaacctcaaatgagtcatcgatccaccgaagaaggaacataactcgggtttagcagccggaatcgtcgcattgaacggcgcagacgagtagttaacgacggcacgcgaaactaaggttctcgacaatggacgcaaaatcgatctaattgcaccgaaacccattttcaccaaagcatcagcgaacagattccgatccaaaagctcctggatttaccgatcaagcttcgaaattatcacttagccgattccaacaaagttcgagacttgaaacgaagaatttttcgctaaaccctgaatagtctagtaaacactaatgggccttatgggcctatagtgtaagggcttataattgaacattgggtctcaaagaaaagactcataataactaaaatcaataattcgtgcggatattattaattattgtctccaaatctcattaaatgttttggcgagaattacgtgatattccctaaagatcaacatatacatttttacagccatttatttacatgaaataaattttggagttgggatttatttacaatgcttgtcactgacattaattatttagttaaaaaaaattaaaaagatattaaccaaactatatcttgcctaatttgtttctaaaaatctctacacaatcttttcatatatctttttaaaaaaaaaaatcgtgaattttacttcaaaaaatatgcataaatccgatttatagcaaatatttatatcaacattttgcatagcaataaaaatactaatttataataattaaatattcacataaaaaaccatatacacatacaagaaaaaaaaactatatttatcatcatttaaaccgttcttttatttaaattaaaagcacaaaacttgaaatcatatactttatatgataaatttaaaatctatattagtaatataaattttaaatcattcaaggaacggtataccacgggtgagatcctaaattattggaattagaacaataataatttattttcttggattttataacactaatcatttagctaacgagataatatagacagatttatatgggatgacgggttttgatcaatattaataaacaaaggtatatcacagatgaaatcataaaattaacaatcaaaatacaatcatacaaccttaaacacaaaaacatacaatattaacaaaacaaatataacttaaaattttaaaaaatagctataaaaaatcgacatgcggtatactgcggataaaatattcaaaattttaaaatctaccatacattgttacttaaaaaaatatatgttttcatatctatacttcaaaatttgaaaccaaaataatagtaatcatatactaaataatacagagatagatatctatattttaaaatacaaattaatatgatatatcttcaattaatcttttaaaaaataattttacattttttaaaaaataatagctctgcagtgtaccgcgggttaaattctagtatagtgtaattatggaggtagaagagacttgcatcctaatttataacgattttagaatttggattagtgggtacactacataaggaaatacaatattataccattaacgacactaactcgaaatctggaatcattttagtaatatatagatagagttaccatataaaaataaattaaaaatccaaattgtaatcttcaaaccaatataaatatatatacaccatcctcgttcatttgcataaacatcttcatacttcttattttttcttcatacacaaacatgttttcgtcaagtcgtacatctacaagcctggtccgttttcaatctatcattacatactcataatcatattactcattttatcctttgctaattcgttacatattcgaatgttttcttgcagacttgtgggtttaaagtgaacactagctctcccgaatggcacaagagcatgaccaaaatcctcaagaaaatcaaaggttttttttctttctataagcatatatatatatcgcacatttttgtcgactcaatctcttattctttttatgataatggtttaggagggaatttttggatagacgtggacgaaggaatggcatacgtcacgggtcatggcgatccaaacaagctattgaaactaatgggttcaaagagaggaaaagatgctgaaatggcttttgtgaaaaccggaacgcaacatcatcaacatcatcatcatcatgatcccagtttttacagtcagagctcataccccggccaatggggagggtactaccctgttggctcgacgatgcaaccttaccatcaacaatatccatattccggcggatataataactacggttattattagagcccttatttatgatgcttatataataactatatcgagatcgagctaatcctatttatttttacctaaattagggttttcagcttgtatccgacaaaactgttttttttactagcgggatggatattctctctgcgttttataagcagaagagatattctcagtgtttctttttggtgttttttgtatgaatccgatggtattcattgatgctagggttcttaattataaaaaccataacataatggaatgtttcaaagctttgcattatttttgtgttaaggtgcattatttaccagatatctatggataaacaattgcttcggtagcatctttcaaaatgatttcgtggagggatttctctcttttcttagacgaaatgattttttttttatcagattgagtttccattaaacgttctgataatatttcttagtagcaaatggattttgtttttaatagcttattatttgtgtaaatccttttgcaatttaatactacatagaaagaaacagaatccttcatttgtacatatttgccatccgtatcgaaacattgccaatgatcaattcctagcttcacttgtccaatattcgaaccgttttcagaacacaaatgaccttctgaataagcatcacctttaagaaaatgctctctctttattcacgtccattgcataatattttttttttttttgaggacataatgtagaaattagttttcaaatatactttgaagtcacaaagtaattgatttactggataagcaaagcaattttcagcttcaaatagtcagatgagattatagaccggaaccataacaaaggggaacaagttataacatgtcaagagtaatagaacaattaatccaacatcttaagagatatataagagtggaaagcttaagccaagtgtttggcaatggtagactgaagctcatctttcttggctccaacaactttgtccaaaatcttcccttccttcaaaaacatgaaggttggcatcgcctgtatcgcccaatcacttgccaccgactgttccaacaaaaccataaaagagattgtgatcgaagaaaacaatatctctcaagaagaagggaaaaatgttggtgaatgtaccttcaattcatcagtatcaaccttgaggaaaagcacgttaggaagtttcttagccaaatcagcaaagaatggagcgatgaaacgacatggtccacaccaagaagccgtgaaatcaaccaccaccttcaacaatataaccaatcatgaatcattttcattgaaaaaccatttacactaaaaacatatcatatcgtaagaattgtgaacattacatctatcttcagcgtaaacatttttctagggatcccttagtttcatagaattatcaacatgactcgtaatataagtcattatgatctcctaccaatcctaggatctaatctatggtaatgcagatccaagaattgtcataaaattcaaacatgaattcatacaaaaaagaatcatatcattacattgcttaagtatgagagatcaaagactctatttaaaaacgcaacccaaaacaaaccaaatcaagaataataacaaatccatatctcatcaaaaacaaaatgaaatcaagaaatttgggagaagaagattacaagagttttggattcattagccttctgaagctgctcgttccatgtctcaacggtgtggcaggcgatcacttgtccttcttccgaagccatcttctctctttttcttctctgttctgtttcttctcctcttgtgttttttttttttcaattacttagcatgcgcgtcacctaccaatcccaattttgcccgtcaatagtttttctcttctactttattcgacgcgtgattttgtttcccataattacacccaccaattgctactttccttctttacccaaatcataaatattcacacttttactcctcaaagttttacttgtaacaaattaaccacacacaaagcaaagttgtaaatatccatcgtaaaaagtaaaaaacattttgtagacatcatttgtacattatgattcaaatctacagctgaatcagtttcttgaaacaatacgttccaatgatgaaccacccggtaagcaaaaccactagaatcgagcaggaggcaatgaaagtccaaccaccgagtaagattcctatagtgtagactatgagtggaggcaacaaggactttactatagccgttttgttcacccaacgtcccttgaaaagcactagtgtcgcgagattcaccacgttccatccgcctgactttatagatagacggttcaggttgttggctacaaaggaatgacagttgcatgtgagtatgttatatgagtgatgttggtactcttgcgtgctttttctcagtgcatcatcccatgttggctctttctcatgactatcttcttcttgctcatatctcctctcaccattgaacataccagaactggaagaacgagatgactcctgattcaaatccaaggccaatatgaataaattgttactttgtatcaaggttgaaaatgaaagccggcatcttgcaaacgttaccatttctttgttgatttgaatatatcgagaaacagctccaaatgcaaaattatcaacacagacaaaattaggtcctgcaaagtcgaggatgacaccgtcttctctgcagataccgacgtggccgatgaagggaaccagccatgaaatgaagggaagaggtgtccaaacaatgcagcatggaaaccggtctcttttgggatcaattttcataggatccgataatccgatcatcatgcgatgttctgaatctgttgctgtctctcccatatccaaatccagttgagctcaattatttgattctctgtaagcaaaaaacaacacgtccagtgatccccatgtaagtaagattcaataaagcacttggatttgatatgtaaaagttgttcttaatactcgaatagctgatgcatatcatttacatcgaacccaaaacataaatgcatatcatcccatcatggaagtccgagttgggactgagccttccagaagcgataagcagctccttctagccctgtgctgctttggatttttgcatataccaagctactaccaattcattgattactggataaacttgaaacaagagtcgtctaattgatattcaatcaacacattgtgctaaaacactacgaccactacatagaaaagctaagtaaacaattctcgtagttctacgaatcgcgagtcttaaacactaaacgatgaatccatacgaacatggcgaacgagggatccagaaaacgccattaaagatacataatccaactagcaacgagtcaacatcaaagcatcttcatagacattgattccgaaactttttcataaagaatagatcaaagcatacataccagttcaagcgaccaggaagacgattaatcggatctaatacaatcttcaatcactgcctttttcctgggaaatttttgtttctctctcggccccaattttacgaacgatgacactaaagaacgtgtttggctccttgtttaaactaatcctctctcggatatcttcaccgtttcaaggatagtagtataaacgacataacgttcggtcaaagagaacaaaaacgtcaggatgttattctattaaacgtctgatatatctatacggcgtagttttgaagttgtcgactattcttcatcgttctctctgctctggtaaggagattgctgctacctactgatgcaaatctgccattgatacatctgcttgcggttagggcaaagatgaggaaacgcgatttggctattttgatgctctctggatttgctatattcttcactcttcaggtgattttacacactaatcgtcttcttattctttcttagttcaatcaaattgtagctgaacatctagaatcattgatcgatctgttacttgagaaagctttgaattttcctttgtgggtagaacttagactgctaattcgatccgtaagtagtgtcatgttagcgaatttgtagaatttccagatggaaccaatggattcaattttcttattaatggtgcgtttacttgatatgtgggacttgatgacttttgcagcacgagggtgattttgcgttcaaagaagcatggtttcatttgtatgatgaatacccagtcaaatacgaagctgatcgtctcccaccacctattgtagctgatcttaatggtgatggaaagaaggaggttctcgttgctactaatgatgccaaaattcaggtatcatatgaaattttctaacttttgtaggtaaaaacatttctgatttcgatctttctcgccaatttttatagagtctatctggctatttcggtcgttagaacgaatgattgcagcttatagttcagtgcttatgcattgctctttattgttttagagcctttttgtcgaactaatgatgtgaggcttggtgattatgcatttctcttctatggtttgctgttctgtgttggattaagttctgaaactgttgatgttttgttggattaggttctggagcctcattccaggcgtgtggatgaaggttttagtgaagcacgtgttcttgcggaaatcactcttttgcctgacaagatccgtgttgcgtcagggagacgtgctgtggccatggccacaggtgttattgataggtactataaaaatggaactccccagaagcaggttgtggtcgttgttacctcaggttggtctgtgctctgctttgatcacaacctgaaaaagctgtgggaaacgaatctgcaggtttttatcttcttcgttctttgtctaacgttctgcataaaagtttgtcttggttcagtagtattgattctccttttgcttacctttgttggtggaatgacaggaggatttcccacataatgcacaccatagagagatagcaatttcgataagcaattacacattgaagcatggtgatacgggtttggttattgttggtggacggatggagatgcagccatatgtatgtaggatgaaaaattcctctgttgatttcctatgtatcttccatatgttaccaatagattattcttttcgttttagaatcacatggacccatttgaggaacttggcatgacagcacaaaatgctgatcaacacagaagaagtgctactgagaatcaggtacgactatatgatagtttccttggactgtttcgtagctgtgtatatttatagtttccttatacattttctctagaactgaacaattctgaagaaagagctattcgtttgtagttatacatgttccaatgtgcataagaactttgtttggacagtttagaagaattttaagcttcctttcaggcctctgaagattctggagccataaacttgcgtcacttttctgtctatgcatttgctggcaagactggccttcttcgatggagtaaaaagactgatgtcagttatttattcttttctgctcacttctttatctgcatattccttaactacattcgtacctgcaacaaatttggtggtcagattgatagatttttttcgttcttctcatctaggatgttgaagctcacacctcagatgcatcacaattaattccacaacacaattacaagcttgatgtgcatgctctaaatagccgtcacccaggagaggtaaaattaattcgttctccattgattattgagcgaaatagttaacctttccttcgttctttcggaagagatttctattgcactatcataatttgaaagctttgctggactgaagtttgagtgcagggaatttagagaatcaattcttagtgtcatgccccatcgctgggtaagtcttatgcctcctactacatgcttcgttagtgtaatatattagaaaaattgtttcaaagtacactgttgtctttgcatcaggaccgacgtgaagatacattattgaagcttgctcatttcaggcgacacaagaggaaaacattgaagaagcaggctggtagtaagtctacagcttatccgtttcacaaacctgaggaacacacacccgctggaaaggacttgtcaagaaagattccaaaattgattggaaaggctgcacgctatgctggctcggcaaaacccaagaaggtgaagctcttataaaacgtgaactacccacatcaaaaataccaatatttgtttatgatagcaaagcaacatgttgatgcagggtatgcaatacattccgacgataactaattacacgaagctttggtgggttcctaatgttgttgtggctcatcaaaaggaaggaattgaagctattcatttgcctactggtcgaacactttgcaaggttggtcctagtggctgttccttcagatcatgaacaaggttactatttcacgtacctattacttacttagtcagcgtttataaattcttcctgttcgcagctttctctacttgaaggtggacttcacgccgacataaacggagatggtgttctcgatcatgtccaggtacacacatcaaacactactcccgcttttggttcattagccttctcatggatcttcaatttttacgaccataaatattctctatccaccttagactgtcggaggcaatgttggagagagaactgtagtgagcgggtcaatggaagtgttgaagccttgctgggcagtggcaacctcaggcgttcccatccgggaacagctctttaacgtctcgatctgccatcactccccttttaacttcttgcactatggaggagattactcacgacacttcgcccaggcaagagacacctctactctggagatcgcaactcccattctcatccccagagatgatggacacaaacaccgcaaaggcagtcacggagatgtaatcttcttgacaaaccgtggagaggtacttttttcctttctatatatgccgatacaatctcttaatttcttcaactttgaatttcgtttaataatagctcatcactgctccgtatcaggtgacatcatacacgcctgatgtgcacggccacgacgcagtctggcaatggcagcttcagacagaagccacatggtcgaatctcccgtctccatcgggtttaactgaatcagggacggtggtcccaaccctgaaaccattctcgttgcgcattcatgataaccagcctatgatccttgccgggggagatcaagcagcggtcatcatctctccgggaggaagcatattggcttccatcgaattaccgtctcaaccgactcatgcacttatcactgatgacttctcgaacgatggtctaacggatgtgattgtgatgacctcaaatggggtttacgggtttgttcaaaccagacagccaggggctctgttcttcagttcgttggtgggttgtctcttagtagttatggcagttattttcgttactcagcacttaaactccattcaaggtaagcctcgaccatcatctagcttttaatagaaatctcgtagagttttcttcctctctacggaagttaaaccggcaggtccgctttagcagcttcacccacatcggttttggtaaaccggaaatattactgatataccagtgtagattcagtgccttatttcctggtttcagctgtataactttatactttgtagaattcaagtaaaaaatggtagaggcaaatagaggactttatgtttttgtcaattttgatgttttaatggaattatgtgacatttaatttataaaaaaaaaaaaaaaaaatacgttttctagaaatacttcgtagatatatatctcttcctcgatacaaagctacactttattcatgggactcatcgtacaatacgattttttgaacaaacaaaaaaagtactaaataggttaagtaaataaaataggcttagcttgccagtaataattgatgcagcgatgtggttaaaagttaaaagttttttggaccacgctaatagtaataatataatcctcaattctcaaatgggaatgtgggaggcatgagtggtgtaatgatttacacataataatatacatactacaaaaccatcgttataaagcaaaataatagtatcagacattgattgaagagtgaaaacaacgcatgatttgctaaagagcaatacttgggttacatttttcaaaaacctcaccaaagtaaattgatatcttaccaacattttcttggcaatggattagttagaccaacaactttccttttttggattttacaccaatatttatttatgctttatacgacaactgaattatctcgcatttaataatctatatataaactaaaaaattcatatgttaatatatgaacattattttatgatttaacctatacacagtcttctccttcttctttttttaacaaacatacactttttttttaagattgcaaatttcatctctaatgtttgtatatttagtagttttaaccgtgaacaaaagtgtatagcctgtgatttttttttcttttttttcctcacctgtgaattttatctttgattgaaatttgatttaatatggtataactacgacaatgacgattcaaaccaacgcgtacaaggttttaatttaattcatgtgaagtatgaatcttctatacttttatatggtaacccaaataaaagtgtcaattcttatatttcttgtacatttatttgttcgaataaatcctaacatcgttaattatttggataaatatttataaacaaattagtcataaaagaatgagaatgcaaatacatagactgaatgaggaatatagaaggtgacgggaaaagcatatttctaataaaagcatgcaaagaggatcacgagatcacttaatatgggcactactctatttccattctcttttttggccctttttatctcttatgaacgccagaatattttcctaaattaaactcaaattttcgagaaaaaaaacaacctcaattgtcatatagatggagagttcgtgacaatacgaccgactcccaaaatattacaagcttatatttgccaacgtttgtatgtatgcatatgtgtattgtaaaacaaaaatcttaaaacataacttaattcaattgtattgatttggaaaatcttcgaacccgttattcccatatatagtacgtactacggtactaattaatactatagaagtcttaaaaaaaaaaatactatacatgcctaactggagaagaaaataatcatcatagagttgtggtcaggaaacagttaaataaacaacatgtgttggaattattttatatgccctaataaatgatctagctagggttttgcaatttccttagaaggtacaataatagaatattgaagaaaattagtggtcctttctttgcagcctctatgtgtttttttttcaactttgatccacacccttagtttctagtgtggggacttgttatcagccacgatcagaaccgatccgatccactgtttggccatctttttcaacattccatggtccagccccttcaggtcgatcttaccggttggttaaccattgttgaccaaattgatttcgtttggtttggttcggtgttttctaacatagacgagtaaccatcactattaagcgtgtatatatgtacaacatgtacccattcctctagatacctaaacaacaagatgcaaacaaacattgccgtaaatgctctaaaaacatattggcaaaaaagcaaactcgtgttttgatttgaatcatgactataacaggatatgatatattcatcatgacattaagatcgttataacagaaaagtgtacattcatacatgtttgaaatgtcatgcatcaactattagttaagattgacaatgattgataagccgcataatcacataacaacataaataataaattttactaattacaatttcaataattaatcacgaatctacatttaacaatcctagcagttcgtaaagatataatacagaccaaacaattgtgtcaatttgcaaaacttttagttaaatcgataacttatttttatattcactcatatatgttttctcttcgatgatttcatagtgtttaaccaatcaaatattcctattgactttaattgatggaaagtttggaaactgataaggtgggtctagtaacgcgagttgaaaacccacgatatcttagaccaataacaagctaataagttcttttatcagtttaacagaagctgataattaagttgggtctaatgaaacgtaaaatcaaatgacacaacgttttgtaacgagtgtatacgtgtatgcatgtgcatgacatggtaagacgccataacttcaaaccttggggacccaaaaggaattccattggttgtatataagttgtataattgttattttcgtaaaatgatgaaaatatacatatagagagatacatgtacataaataaatgtatgtatacgaagtgaaagtgaagtgggggccaaatggaaacacaatccatgtgaagaagtttcagcttctgattagatatggaattgaaaagaaagcgaaagagagagagaagacagagaaacagaacataacagaaactaaaccaagtttgcaactttacattctccatcttctctctctctctctctctctctctctctctctctctctctctctctctacaataactactcttgcaccaaagagaatgtaagaagctaaaagctcatattttatgtattggcttttgccttggaaacaaaatatatataacaaaaaagtaactcacctaatattttttcatctttagtcgtttatttgtttctgtttgtttatttgggttttaaaggaatagaaaatggatatgagggagcaataaatgagatgacagtgaaagcatggctcgttgtagaaacactgttctctccctgtctctgtaagaaagatctgttaagtagcagtgatgagaagccaccaaacactatactccaaaatctctctcaacacttaaataaatgcttcaaaccaaaataataatcataattacataaattatctacaaaagcaaatgtatgccacttcatatttatacaactaggtttgctataattatttgaataatacgtaaccctaatttagattcacaaacatctcacaattaattagtaactttcgcgagtgaagcatattgtcaattatggttaaagtctcttggatggtttctacgacgtataaatgtcgtcgtatttgtaaacttatttgtgagaattaaatagggaactaataagaattaaaagacaaaaaagatagaaaaaaagaaagagaggaagacaagttacacatacacagggctcgagaagagacaagactctgcggcttctacccttttcttggggactcactcttcttatcattcactccctctctttttctcctccacgtcaactctgattcccaccttcctctatttatttaattataaattagtcttccttatttcttcttaattagtattctcttatttttattactcctgaattctaaattatattctgaattcctgctatgtcattttcttttattttgggtcgaatatctatctctcattggcaatggttttgagatcattggcctattggcaatggtttagaattccttagaattattgtaacaatgatttcagaattgaaaaaagctgtttactaactccatgcattttgaatttatttgagggaagaaaagctttcgttggattttggagtattgattgacagaaagcgcctagagaattgagtgataagcaattttgttttatataaacacttgcccccaaaataaaaatattttttctttaataataaaaataataaataacgacttagaaaaaaagaagagaatgttatggacaaaaaaagagactgtggttagactgaaaaacgcgtgcagagaggccgcgacagtcttatcatcaattaaatttcttcttaattagggtatcctaacttgcattttactctcagttacgttctacacagtattacttaattattcatattatacacgtataggtttttaatgcatacgtgcaacgttgacatgtagaacagattttgaaaagagaaattgtttagtataagtgttgtttcgataacatcctaagtttcgtcatagtccaaatctactccagattcataggcttctcagttccatccatctcttattcaaattccatacaaattaaaagtttttttttgtgaaactccgttataaattttgtgtgttggttgctggttggttctgcctgaaactattattccgaaatgatgcttatacttatttgacatttatatatttttgtaatgtagcaaataaagaatagactactggagaaaaaaggtcttttttttttttttgtcaaaagagaaaaaaggtcattgtctcgattgtaatgtatccatcacaaccccttgaattaattgattccctctattaatctagtatactcgaatattttgtggttttttacttacctctaaaactatatcgatatataatgaacaacctaactattgttttcaaattgagagcaataataatcattcgattattaacttaaattattggatttgtaaattaaatcaagaaccggtacggaagcgtagggcggcgaggcaatgcttttaccctgtctcaaactattcattattcccattttgaatcttaatacttttgaaatgtctcatttaaccccttctacattagtcaactctctctactcttttggcaaaatccttttaaacgtccccatcttttactttatttttatttcatgtcctaacttttttatttatatgacacccatacatacttctctagatttcggatttatcgggacatattttttcgtgccgttattctcaggcaattcaaaggataatacctaaaaaaatactcagctaattataatgattagttaaattaggatccatgatgctcacggcacgggcatagaggtgtgtttgtctgtatataaattctgtaaacatttagtagtactattatacaaaaagataatgcagtaacatagggcacctcaacaaaatcgtacgtttgtctctctacaagagagagtatgtttacgtgcatttttatttatatataaaatattactgtgatatactactagtatatacagaaatgtgtatatcataatgtttttcgtttcctcggaaacatggacaaaagcatctgcttttcagctacaaactttaaacacttaatttaagccacaggtgcacccaaattaatattttttaaaagaagattatgggctaatggatgattaatgcctataatttgcaaatcctccttactttaaagtaattagttagattatttaatccacatgtttatctatttgatgaggatttttgaaaccttgaagtaccttacattttttcaggcatttttagtttgctgatgctcctaactcgtagacaataatatatttgcagcatttgtcacaattagtctcatagtcactcatatatacacaaaatgaaataaaaatgaatggacctatggacttttgacaaggttttgtagtcagttctagatcatgattaggaggtctaattaataggtcccgaaatatatatagaactatcttaggataatcaaaaatagtattctgataccgtaatgatattatttttactcctttttaaggaaaattagttattcacattccaccatttatacatataaaaatttcatatatgtaagaaaaaaagaagaaagaaaaaaagcgggtttcccggaatgaaaaggaccaagagagaaaaatccattttatgctaacgtggcagcataataaccgcccgattatatatcaacgataagagatgaattgttttcattttgtaacaacaaaacatgagagaaacaaaattatatttttgcaaaatctggaaaaacaaaacaaagaaacaaacaaatgaagaagagatgagaggagacagagaattaaattagaggagcagaagagagagagagagagatatagagattaataaggtcatggcggcgttgcagagcgcaagaaagatgatttaaatctctcttcttcttcttccttcttacatatctctgtgtgtttcttaaatactctctctctcgtaccgacaaacaagttttgctttttcatcagagtctcaaaaagctattccaacttcaatacactacaaacccagagaatgaattcaacctaaaaaccctagaaatcctctaagatctagagtgagaaagttagagtgtatagaactacaaaacataggatctttggttttgggttttgttccattttcttgattggttagtgggtgagtggtggttatgggtggtggttgttgtcttggtgaatggcggggtttttctcgctagacggtggtggaggaggaggcggaggtggaggtaacaaccaagaagatcaccggagcaacacaaatcctcctccgcctgtatcagaagcttggctctggtatagaaaccctaacgttaacgcaaacgcaaacacaaacgttaacgcaaacgctccttcttcgtcaaacgctgctttaggaacacttgagttatggcaaaaccacaatcagcaagagatcatgtttcagcatcagcaacatcagcaaaggttggatctttactcttccgccgcaggtttaggtgttggaccaagtaatcataaccaattcgatatctccggcgaaacttcaaccgccggcgccggaagagctgcggcgatgatgatgattcgtagtggtggtagcggaggaggaagtggtggtgtgagctgtcaagactgtgggaatcaagcgaagaaagattgttctcacatgaggtgtagaacttgttgtaaaagccgtggcttcgagtgttctactcacgtgagaagcacgtgggtccctgctgctaaacgccgtgagagacaacagcaattagctacggtccagcctcaaactcagctgcctcgcggtgagagcgttcctaaacgccaccgtgaaaatttaccggcaacttcatcgtctcttgtctgcactcgcataccttctcattcaggtatatgtcactgtaatgtgaaatatttatttatgtgtatataaatatatatgtttattattatatggtcgtgagataatgaaatgcaagcagcattttttataatttatataagtaacgaattgggatcagcttctagagtaaaaaaagaaaaaccctattttgatttataagttttccaaaataagttttgttttttattttgtgatttaattgtgaaaatactgtgttggagtaaacactgactattggaatgacaggaacaagctgttctcacaaatcttgaaatctgtgttctttctctaattctcagctcctttttcataaccttaattttgaaagaaaaaatgaatatcaatgttttattctattacgtatctcttaaacttttttttcttactctaaattctagggctagaagttggcaatttcccggcggaggtgagttcatcggcggtgttaggtgcgtgcgtgtgagctcagtagaagatggagaagaagagtttgcttaccaaacagctgtaagcattggtggtcacattttcaaaggcattttatacgacctcggtcctggaagtagtggtggcggaggctacaacgttgttgccgccggtgagagctcctctggtggtggtggagctcaacagctgaatctcataacagctggctctgtaaccgttgctaccgcttcttcctctactccaaacctcggtggtattggcagctcatcagccgcggcagccacgtacattgatccagccgctctttatccaactccgatcaatacattcatggccggtacacaattctttcccaacccaagatcatgaggaaaatctgacataaaagcaacataactcttttgaattcttagaatagaattagggtttataaacgttaattgtcggatcatattatataaaagagtatgcagaagtggggaagtgaatctgtttatgcttcccctacttttagacactcaaagttgttgcaagttttaggggtttttaaatggaaattcaattcaaataataccattgtctttttatatggttttgtgaggatatagtgttgtgtatcatttaaatgttaggagcacaatatagctcttgttgtctgaatctttgtttcattaatgtgtctgtttcttgtttgtgaaacacgtaaccttagaatccggggaaaatgtttttcatctttatataacaccttttgtgtcttctttcttctattcaatataaagaagaattcattacatttgtaccatacattatagtacaatttcatatttttcaacccattttattttttatttttttcaaccatggtttccgttacgacagaatatggtctgcccatcccatgcatttaatggtttctaaagtgtattatttgttagttactagtaattgatgtatgccataattgacatgtgatagaatcagagaagatgactagaagagcgacatgtatagatgtgacatgagggtgcgttctacaatgtacgttaatcccaattagttacttctcccgccgttgcccacaccattagttctttcattactagtttactataatgatttagttaatttctactatcaggtttttgatttttctattctttcacattgactagaagtcttgaacaatactactaatctttctctattttaaaataagtcttttcatgatcttgagggaatgtttctgttttaaaaagggtttttaatgatttaaatgtaacgtttgtcaagaaatgatctcattgtctctttaaaattacttaaatagaaatttaatataaaatataatttaaaagttaacatcctttgtaagaatacaataggatattaaacttttcttatatgcatgatcagtgtcaaaaccatgtctaatttcaaatggacgcgatattatttttatttgtataactaaatcaatcataacttgtaaggtaacatggtcgaagaaaattaatgatcataaggagtttacctttcatgtaagcttacgtatatataaggcatccttgcatgagatgtatttttacaccctacacgatgatatacacacacatatatattaatagatagagattttgcagattctcatagtggatatatcatatatgtgaaacctatatatattacatactaagaaatatataaatatggaatgcaatgccatcaatttcagacgagtatgtttggctacagaaagctatttactcctccttcctctctttttcatcaatcatttcggttttgctcatttaaatacaaacaacccttaaaccaaaaaaaaaaaactaaatacaaacaaccccatcttcgtcttctcttctttcatactctcacatttaattttggtttagctttcttaaagtatgtaatatatcatacaaaaatatgtaatatatgatgtgaaagaggatatataagaaacaataatacaatgggaaaaacaaaactggatcccttatacaattgagatatattgcgtgacaacattacataatcggtaaatttggtacattcaaatagtgctgcggtccaatcggccgactcgttccgacttttactctctgccgtatcccacagcttgtcatatcccacaaaatttattcatttctaatctttatatgatgtttcttactagatccaccagtatagtgtcgtatcccttttgttgtgtgttctcatatagtttctatgtaaatttgatgtctcttatttggataatttaatattctgagaagaaagccaaaagagataaaatcataaaaatgctggctaaaatttccaagactaaaaatctaaaatttgtcattgtccgacatttataaatccaaagcttcaggttccactcaaagaaaataattatactatttggatgtcttttggaccttttggtgcattgatgacaataagcaaataatactatacacattttgcaaatttgcaggatgaatgttacaactggatatatagtagaccaataaagagaagacatgtgtgatgtttataccaatgattgacatttgagttatgtgagttttaattagggaaagaactgaaccaaacgtaggagaaactgatcttcatactaatgctcacactacacattttattagtatctcaaaagtaaaaagcaactttaaaataaaacatatagttttgtgaaagatgcaaaaattgagaaggtactaaactattattacttatattagtgaatcaaaactttttcttaatccatttggagttgtttagttcaaatgaacggaacatatgtaatccaatacaaacacaaatataaaaaaatacaagagaacaaacagagaattccagtcaaacatgtttttataaataataccataacaaccaaaaaatacactcaaattgaaatcaacatacttaatcaatcaaaattcaaattaaacagtcttcgaatacattataccaaaaaagcacaagcttgccatgtttaatatatccttgactaggcgttacaagttaacattggattacatggcactaatttttcatggacaacaaaatatgaaacacagagaccataactaaatttagagacacgaaattgaaagtcccatatccgactctataggatctttgatccagtcttgtctcttcacaacctctctttctcttctttttcttctatttttacttccttcaactcccattttactccttcatttttcttcttcttctttctccataactagtactatacgcaagaccgtaaagatggccttcgggaggggacgtggcaacaaacgcacttcgacgtcgtcctatgcgtcgaccattacaatggtcatctttgtggctctgtgtgtcttcggggtgtggatgctttcttccaattccgttattccaccgcagatcacacaaggctccactcgagcggctgtcgcagagacagagaggagtgatgtgtctgcctcttcaaacggtaatgatgagcccgaacccacgaaacaagagtctgatgagcaacaggcatttgaagacaatccgggaaagcttccagacgatgccgtaaagtctgaagacgagcaacggaagtcagcgaaagagaagagtgaaacgacgagctcaaagactcaaacacaagagacccaacaaaacaacgatgacaaaatttccgaggaaaaagagaaagataacggcaaggagaaccagacggtgcaagagagtgaggagggtcagatgaaaaaagtcgtcaaggagtttgaaaaggaacagaaacaacagcgggacgaggacgctgggactcagcccaaagggactcaagggcaagagcagggacaagggaaggaacagccggatgtggaacaaggaaataaacaagggcaagaacaggattcgaatacggatgtgacattcacagatgcgaccaaacaagaacaacctatggaaacggggcagggggaaacatcagagacctcaaagaatgaagaaaacggacaaccagaggaacaaaactcagggaatgaggaaaccggacaacaaaacgaggagaagacaacagctagtgaagaaaacgggaagggagagaagagcatgaaagatgagaatggccaacaggaagaacataccacagcagaggaagaaagcggaaacaaagaagaagagagcacatcaaaggacgaaaacatggagcaacaagaagagcggaaggatgagaaaaaacacgaacagggttcagaagccagtggttttggctctggaataccgaaagaatctgcagaatcacagaagtcatggaagagtcaggcaacagaatctaaggacgagaaacaaagacagacatctgaatcaaacaccgtagagaggattatggatggaaatgcatgggtgctgtgcaatgcaactgcaggaactgactatataccatgcctagacaacgaagaagctataatgaaactaaggagtagaagacattttgagcacagagagagacattgcccagaagacccaccaacgtgtctcgtccccctcccagaaggttataaggaggccatcaagtggcctgaaagcagagataaggtaaaaatttctataaaaaaaaaaaaaaatttccttgaggtgatataatgtaaaattggatagaagttaactcacatgtgatctagtagatatggtaccacaatgtcccacacacaaagctagctgaggtaaaaggacatcagaactgggtgaaggtcactggcgagttcttgacgtttcctggtggtggaacacagttcatccatggagctcttcattatatcgattttcttcagcaggtgaacactcatttcttgatttcagtatagtgttaaaactgcaacaagtaaaagatagaaattttatgcagaatataatggttccttttttctactatggcagtctttgaaaaacattgcgtggggtaaacgtactcgggtcatattggatgttggatgtggagtggcgagctttggcggtttcctctttgaaagagatgttatagcaatgtctcttgcaccaaaagatgaacacgaggctcaagtccagtttgctcttgaaagaaagattccagccatctcagcagttatgggctctaagcgactgccattcccgagcagagtgtttgatcttatccactgtgcacgttgtagagtcccatggcataatgagggtggtatgcttcttctggaacttaatcggatgcttaggcctggaggttattttgtctggtcagcaacaccagtctaccagaagcttgaagaagatgttcaaatctggaaaggtaatgactaaagtaaaatgcttgaacttaactagagttcctccttcttttgtttgtttcactgaacctgagatgttttgagtgatgtagaaatgtccgcgttgacaaaatccttgtgctgggaacttgtgacaatcaacaaggataaactcaatggtattggtgctgcaatctaccagaaacctgccaccaatgaatgttacgagaaaagaaagcacaacaagcctccactgtgcaaaaacaacgacgatgcaaatgcagcctggtatgattgtttccacaatttgcatagggaatgaataaccataaggttttaacagaacaaagaaagtcaaaacttgaatggaaatttcaggtatgtacccctacaagcatgtatgcataaagttcctaccaatgtggtcgagagaggaagcaagtggcccgtgaattggccccgtcggcttcaaacaccgccttactggttaaacagctctcaaatggggatatatgggaaaccagctcctcgagatttcactacagattatgaacactggaaacatgttgtaagcaaagtatacatgaatgaaataggaatcagctggtcaaatgtgaggaatgtaatggacatgcgagctgtctacggagggtgagcatcaacgaaaacaaatcaaactaaaatctcacttaccaaaactaaacctttttttactaactacgtaaaaatgcaggtttgcagcagctctgaaggacctacaggtgtgggtaatgaatgtagtaaacataaattcaccagatacactaccgataatctacgagagaggcctattcggaatatatcatgactggtgtgaatcatttagcacataccctcgaagctatgatctcttacatgcagatcatcttttctcaaagttgagaacaaggtataagcgtaactcataatatccacaccttttggtaacgtttcatcaacaataagtctcttgttttgttttgttttgaaaggtgcaatcttgttccagtaatggcagaagtggatagaatagtaagaccaggaggtaaactaatagttcgtgacgaatcaaatgtgataagagaagttgagaacatgttgaagtcactgcactgggatgttcacttaactttctccaaacaccaagaaggaatcttaagtgcacaaaaaggattctggagaccagaaacttctcaatgaaagacgctctgagaatctgcatttgaaagtagcagaagcatcattataatacaacacactactcatatctataatccccaaaagaatttgtcagtataagaaatagctttagtcttcttaaactatatagactaattagaacatttttgttttccttacttcatattgctttttttaacatggttatgatattctcttgtaaggctatgaatcatttcactgggaaaagtaaggcacaccaataaatgaaattttgttccaacaagtagaaacatagcagtaatgaagaagagattatgatgctttagcgataccacaagccaaattcaccataagctattgacaggtagcgaaaagtcaaattacaaaaggaataaagtagacatgaaatgaaaccaacaatcttaagcccacatatgaattcaaaagagaggttaagaaagaagagaatctgacatcatgggcagagtaggagctgaagaagatgggtttctgcaaatttgaagcttttaatcgcatatcgctgagtaatcatcacaaacagttttgaattgaagaagacgggaggagaaaagccattgttaatgagatacccaaatcgtaaaatttcagaaagcccagcccaacatagcccaatacagcccaaatatgtatgtgattgggtaacgaaaacgagaccgttcttttttcagtcatctctcgtttcacagtagcgcgtatgtacgctttgaatttacaaaaagtagacatttttatgaatttttgccggttgagtaaaaaggtaaaaaaaaatagttcccaccaaagcaaaatatttcaatttttatcttttttttttggttcttgggaaaataagagattgagaaagaataaagaagagaaactcacaacttttttagttttaggagaagagggctttggtctggagtcactatcatattcaatgctttaccaaactcacctcttcttctaaattctcaccactcttcttcttcttctcattcaccgacatatctcctctcttcactctctgtctcttctcatctcaggtaattccaattttagttttttttgaaggttacttactcgtcacattgtttgaaaaagattgaatttttatctgtggcttagtcaaatcatggttcgtttcaccaagttgtggttctgggttttcgtgatttttcttttgggtttttctgtttgaatttggaaaaataaaggaacgttttttttttcggggggagttttttttttaaagataatttttggagagtttttgataattctgaggaagccaaaagaaaagaagaaaacctaatttgtgttggtggggtttgataggaaataatggagagtgttgaattgacgttgaagaacagtaacatgaaagacaaaaccctaaccggcggcgctcaaaatggcgatgatttctccgtcgacgacttgcttgacttctcaaaagaagaagaagacgacgacgttttggttgaggatgaggctgaattgaaagtacaacgaaaaagaggagtctctgacgaaaatacccttcaccggagcaacgatttctccaccgctgatttccacactagcgggctttccgttccggtatgaatttgtgttttcattttcgcaaaatttataaaaattatcagtcattgcattgttaatttcttgcttttcatgttttgattgttagatggatgatatagcggaacttgaatggttatcaaatttcgtagatgattcttctttcacgccgtattctgctccgacgaataaaccggtttggttaaccggaaatcggagacatcttgtacaaccggttaaagaggagacctgcttcaaatcccaacatccggccgtcaaaaccagacccaaacgagccagaaccggagtcagagtctggtctcatggttcgcagtcgttaaccgactcatcttcaagctctacaacatcttcgtcgtcctctcctcgtccttcaagccctctatggctcgccagcggtcagtttcttgatgagccaatgactaaaacacaaaagaagaagaaagtttggaaaaacgctggtcagacgcaaacgcaaacgcagacgcagacgcggcagtgtggtcattgtggagttcagaaaacgccgcagtggagagcaggaccattaggagcgaagacgttgtgtaatgcgtgtggtgtgcgttacaaatcgggtcggttactacccgaatatagacccgcttgtagcccaacattttcgagtgagcttcactcaaaccaccacagtaaagtcattgagatgcgtaggaagaaagagacttctgacggtgctgaagaaaccggtttgaaccagccggttcagacggttcaggttgtctcgagtttttgaagaaattgtggaaggtttttaaaggagcagaattaggatccgacccggttcagatttatcaccagttagtatgttaacgggttatgtatgttttaaattacaaatttgattttttgtttgttagtcgtagtaggtttttagatttagtaactggttaaaacttttaaaactcttactattatatttgttttgtttcgcattaattttcagaattctttttttcttaacctcctctaacgttatatttacgttataatatatagtttttatattaattgatagagatggttcattttctagttagaatgtatgctcaataattattggtagactgatagttatcaagtgtataaaatatgagatcaatttataccaaattaggagtaggctttatttcagggttagtaactccaattttttgttgttacttatttatatccatcacattttctcttgtatttctaaaattgacataatataactgaaaaaaaaaacaaatttcacaaataaaaatatatacaataactgaaaaaagaaaaataaacgtactgggcacactctcttattgactaatttattactctgcgtatttttggagattgaatacgaccttagttgacgtgataatattatccatttttgcaatgtgataatattcgttgaccatatctttgagattatcacgaattaccaatttaccttgggactttattcctcgtatggttttagttgagttgactattaataatagcttttagtacgtgtttcgtaaatgctgcataatatgtaactaactaaacaattcgaatatatatatactagttttaacattcgtctcacacgcttagctttctccttcacaacgatgaaaacgtctcctgatttcaaaagtgagatcatactcttttttaatttgctaattttttaataacaaatcatatgtttttcttttggctatatttaagggaaaattacacaagaagcataaacattaaaagtttgagaaattactatttctacgttgaaggtatacattttggtttttactttatatatacacattacatttttgaccattcggattgtagacgttgtgcaatgcgtggtagagtttcgagtgggctccattctaatcaccactgttaaattcattgagatgtgtacaacggaattaagaagatgttcgacaaggctgataaacttgatttaaacccgctggttcaggttgtgccgagtttttgaagaaatagggaacataattaggatctgacccggttcagttttagcatcaagtactttctgattaattattttgaacttttagtttgtattaacttgattattgttcgtggtagtcgtagtttcagattttaataatgactggtcatatttagagctttaaaagtcatatgtcgttttgtttcgctgctttctctgaacctcctttaatgttgtatctacggtaaaacatataatctctttaaccttggagagaatatgaaaccgttcgaaattttaatacatgacactaagacatggccacatggggacattcgacatccatttgatctacttcattatttaagtttgttaatatttcaacgtcatgatcccgttggttccctttcgatagttattgaaaatgcgatagttattttttaaactccattttggtagactgatagatagcattgtcattaatcaataataataatttggtattcctcactatatattttgtgctagggttaataatttgttttaatgtcgttatcgcaccatatcactagtatctaagttcaaacttgcataatgtattcagttgataatactttttatatcaatacttcaaaggaaaacacaattattcaaaacgaggcatattttacaagcatggaagctacatgcatgaatatgcataacacatacatttgaaactatataggatcctctttgtaagagatacaaattttcgaattatgtcttacttatatatcaatttgttataaactcactttggataattattgccaaattgctatcctttaaacatccctttattattaaaaggcaagtacaaattgaaattttgtctaatttggcctcaattttgatttcaattttggattttgttctttgctattcaaaatcattaagggtaatttggtcttaacaatctcctaaactttatatgatctgattcaatctaaaccgttcaataaaattaaatctcttcaatctaaaccgttcaacaaaaataaggaatctatgtcgtttttgaaatcaaaatatgatcacattccatatctaaaaacactatattcaatcacgaaatcaataatcaataatatcaaaatcatatattagattcttcactaatcactaaaaatttatatttataagtttaaaatatcaaatttattcaaatatttagtataaaaatcaaataaaccgattgtccgcggtttaccgcgggttaaaacctagtaatactaattagtatacctaattgatgtagttgaaacttttaaaagagggaaaccgaagagaggcgtgggtggagtcacgtgatgagcatttctcacccgattcaatttcaactattttagcttttacataaatgtggtccattgtctaatttcttccatccccactaaaagtttcacgaaataagtttcattcttaactactatcacataaaattggtagatttttaaagctccgactacaaagataatatatagattggttccgtaccgttattctcgagttgtgtgcccaaattttttgggagatccttgagccaacaaccacttgtttacatgtgcttgtgccagtactttctctcatcttgacattatttctttggttctctttacgtttggtgactttcgtctattaaaattaacacaagacatatattgctagttagatataatattcattacatgtgtattttgaaaacataaaccttgaaatacctttaaaatacgagtgtgtttgatcactttcatgtaattaagtttttaccaaaaagaggaatagactagtagtctacacaacaccaaaactcgcctaatctattgacttaataaaaaggcagtactagtacacgcccttcctcaagcttaggctactttcatcatctcatcgcagcccttggctctaaagctctcgttaacgtcaacgtatgataccatcatgaggaataccctaacaacgtatatatctcacgggacttaagctatcccatacattaaagataacatttagtttgttgcctttgtcccttggagggatcttttaacctttttcccgtgaaagaacatcatcatattcatatacatgaagggttcaaatttactagactggttattctttatttctttcacataaaaaagggggaatacaattacattaaacatacgaatatataattaacatgaccaagattttcatcccgtaattaaaagacagggaagattgatgagttggtctttaaaaccggcaccgtcagatggagttacatgacgatccggaggacagcgagaccaacggctgagatggagacaagagtaccaatacagtacttgatcacctcatacttggctgcttctaactgagctctcaaagtgtgaatctcctgaaaatattgaaaacagaacaaagcataaacacttttgctaccaaaacgaataattcaaacagaagctagagatgagaatactaacacggtcaagtttgtttgtaaggttagaggtttctccgttttgattttgtaactcatctcttatcctcctgcgacatcattgaaacatatcacagacaatttcgaaagacataacctaagaacagagaaataaggtagctgtttctctgaccctttttcaagattcaggtccaaccgttgtcctgctgtgactttatcgatctcgtgtctgcaatgttattgcgatagtcagtgcaactgatcgagtctatagcaaatcaaaacttaaggtttattagggagctgaccttatatcagagcggattcgctctatgtcattgcggagtttctcattctcgtgttgcagcaaagagaaatggtggtcctatacataatacacttctttcaacaatctttcggaatcatggtgtcactataaaaggtcaaaagagtagcaacgctattcgttctatcggctttccaacaatttgacgtttgaaaacacaacttaccagtgaactattaatttcacttttgaacttggataagtttgattcctgcgtcatttcagcctaccagaagcaagaaaaccaaagttagactgctgctataaccgcatcctactctttggaatagatgaagcaacaaagacttgtcacaacagaaacttactttctgcatctctcccttggagacaactaactgtgaaacaactcctaagctatcgttaagaacttcagttatagcaccggttattgcctcggcttgctttgaaggcaggccttgtgcttctaagctcctaacctgaaaatcacataccaaattctcctttgaactatactcttaagactatatctaataatatagcatcctattgaattttatcaatccggtctagaataaaatcattctattgtctcatttcaaaatgcaagaagttccttgaatcaataccttgcctacggtttaagcaatcagataagacaattcaaagcaatgatggtgatacagaaaccaaaataatcattggaaaaagatttcagtagatcatcaggtaagtaaaaaaagaagagaacaaggaagggttattaccaaagctagtgtatcgacaagaaacaaacgtttcccattggttttgataagctgagatatgaatctggcgtggaattgtctgaacgaagaatatgatactaacgatgaagaagaggagcgaaactcttgagtcttgtcaaatgctggatttgaataaccgaatgatctgagagtcgacaggtttacacctgaacttgttcctccaagtcgtgcgagtcggagataattcgcgtaagcagccataaaaaaaagatgaaaactttcccgaaattggtttgtaaaaacggaaactttgaattcaatcaacccaaaatttggatcgggaaatcgccgttggaagaagatcaataaggataacaaagagtttcccaatcgggtaagcatgcaatggtggtcaaaagaagaaaaatttgaagatgggtttggtgaggattgttcttatgaaggtggtgtcatccatggaaatcgcttagacgtctccgcaccatcaaatgaaacagacggacgacgatgatagagaaagcgtgcgtctttgtctttccctaaatgggcacgtttcccaattcattttaattactctactccatgtgctaattatctctaaattcccaaacttgaccatgagtttcagatttttataattaatataattaagctctgtttcagtaagagaaacacaaatatctacaagtttgatatgttagcatttgtgtaaagaacagagaatctatgagtaaatgttgtaaagcagagttcatattttatgtttagtcttcaccatgaagaacaaagtcttagaaatgttttgatatttcatatgtaataaaagtgaacctcattgggatatgaatattatcagtaaaccagaactgaggaaggtgtacatattactttgggacatggcctgcttaaacaaatcatacagccattttttttgttgattttattattttgatgattcaagagaatccaaaaaagtgtcaaataagatttcatatcctgtcgtctgtcggtcattttttttgggtttgttgtctccacatctaatgtaaaaagtttctttattttggtcgcttgcgatatgggtccaaggaatcatccacagtttctttcacatagttaccaactctcttcatgttcttcatcacccctgctgcaaccaggtttgcgtttcttgtgaacctgatacattcccacggaatttaatattgtgtgttataaacaatgctcatttcatgactcacatacaacaatgcacgctttatggtagataagactgattagtttgactaaactactgcagatccaagagttgtacaaggatcaaactttaaggtttgtattcacgtacaatcaattaggcagtcaagtgaaataccaatgccattacccattaagctacaacaagtcaaatcttaaagctatctccagcgaaagcaaaagctctttgcttacctggttaagaagccgttttctgtgtttgtggcagtggcagtggcagaggctggtttattgttctggtgctgaggcacaggcacctcccgagaatctagagaataggaaaaaaaaatgatgagcacataagaggtaagactcgtttcattgttgtaaactggtgaatgagagcagcttcggtgtaccttttctattttggacacgggctggaacagatgaagtattgccagaagctgctcttctatctgctaatatctgcaatgaacataacaaagttcaatggagaaaatagagattgcagacagcaccaagtcgaccatattctttctttaatgccagtgaagtttatcaagttcttctagatatattccagtttttgcagaagttgataacgtcttctaaattatgcataaagcaaactaaaaagattgaccagactgcctcaccaaaccgattcaattgatagtaagcttaagatgaaagtccatgggcgtaatatgtaactttcaaagcaatgtaatggattttcgagaaaagtgttacgagcgacaaacctcaagaccgacacaaacgggaagttgagtctttgtatgttgcttaatggcagatgagtctttatcagtcatgtagacggaataacccaaacatccatagtaaaaatcagctaaggtccttccttctttagaagcttcagcttcagattgtccaacaacataatcaggaactacaaagttataaaacgtctttagcatatgcataaaccattgaagcagcaaagagaagaacaattgagttaccaaaaaaaaaagcaaacacacacatttctcttcagttatacagagcctatggtttcaattttgagataacttctgaattggaatctacctatcaaccattttcgttaatctaaaattgatttcgtggccaattttgcgataagataagattcaattacaataacagagagctacacggtggattttaaaaccctaatatagaagaagcggccattaaaatcatcaatcaaaggggaaattggagctttcgatgactcaaaaaagacgaataccttgacggagagtacgagggattccgacgcagcgagggttcttagacttggatttgagagtggaagagtaatataaatagcctttgcacgatcttcctttctccagagatcctctttgtttctgttctggtttctcttccattaccgtcctcgttacttcttcgctcgagccttcgttcatcgcggaacttgtctatctctctctctccctttcgtttcttcttcgaaatctctagctctaccttgccccgggaaagaaaccggaaccgattagtcgaattggtccgatccgaaaaatatccaaaccgaacccgaaccagtttttagaaataatcgaataggtcctaaaaatccctaccaaaaattccgtaaccgaaactgaacccagtatccatgagtagcggaatatatcggaagtaccgatatagatttaacaataagaaaaatgtcgttaaataattagttcatcatttttattggttttttattggtttaaagcatgaattctaaaattaataatttaattttttaattttatgttgatatttaatttaatcttgaatttttgttgagtaagccaattaaaaaacatagttaaaaatttcccaaatcataaactctagatccaaaaaccgatttatttaataaaaagtttcactgacattttaaaaaaaaagaagtctcttgtagctttggaataagagtaaaataaaaattaagacaaaattttcattttacaattaactcaccttttaattgatttatttatatagaaataatttctgtttaatactgaaatcgaccgttttttgtttaattcttcttctttattttttttctttttttcaatattttcatcaatttgatctttgtacacctccgttttaattctaaatttctcggcgcagaaaattaccggcaaatttcacggagaaacctcaccgacgaagcaaagttatgacgggcaaggctttccaatttttgtttagactaaatcttgtctttccaattttttcaggtgttgatcccaaaagcgaaactaattggttacacaagaactgatcctttccataaggaatgtatagaaacagcaacaagaattgtttggtttccgattctgaggtcagctaagttaaatgagcttgctagtgtcttgccagcaagactcgagattcaatggtacaaagaccgttgtgatgcatcagaagagcatgcagctaggttactacgatttcttcaaacgatattcgttgaagagagacttcaaagtgaacataagtcgcataagactagctaagttttgggacaaagtgattaaaatggtggagacgaatgagttaccttctgattttcatttaggaaagaatcaaagaaatgaatttacgcatctcaacattccttatgggaaaaagaactacttctgcaacaactatagttctcttcttatgttgggccttatacaaaaacacttcaacagtttgagccttgaacataaccgatggcccagttgacaaaatataaacccatttagcaaataaaaaaatggaaaacataatttacagaaaaaaagaatgagataatatcaaattgatttcggaaaaaggaaaaaggaaaattagcagattggtaattaagtttggctataaataataattagagaagaaagaaaattgagttgaaacgaagtaattagagaagaaagaaagagacgaagaagatgatgatgattccaaggatggttaagaacaaaacccctgctccggttcaaatcacggcggagcaggttttgaaggaggcgagagagagagaggacagtcgcatcctgcggccgcctaaacagaagatcacagattcggatgagcttgccgagtacagactccgacgtcggaaggagtttgaggaccagatccgcggcgcaaaaacgaactcacaagtttgggtgaggtatgctgattgggaagagtctcagaaggatcacgatcgtgctcggagcgtgtgggaacgagctttggaagacgagagttacaggaaccatacgctctggctcaaatacgcagagttcgagatgaggaacaaatccgtcaaccatgcgaggaacgtttgggatcgagccgtgaagattctacctcgcgtggaccagttttggtataagtatattcacatggaggagatacttggtaatatcgacggagctagaaagatttttgaacggtggatggattggtcaccagatcaacaagcttggctctgttttatcaaattcgaacttaggtataacgaaatcgaacggtcaagatcgatttacgagagatttgtgctttgccatcctaaagcttcttcctttattcgatacgcaaagtttgagatgaagaacagtcaagtttcgcttgcgaggattgtgtacgaacgcgccattgagatgcttaaagacgtcgaagaagaagctgagatgatctttgtggcctttgctgagtttgaagaactatgtaaagaagtggaacgggctaggtttctttacaagtatgctcttgatcatatccctaaaggaagagctgaggatttgtacaagaagtttgtggcgtttgagaagcagtatgggaataaggaaggtattgatgatgccattgttggcaggagaaagttacagtatgaaggtgaagtgaggaagaaccctttgaactacgattcttggttcgattacattagcttagaggagactttgggggataaagataggatcagagaagtctatgagagggctattgctaatgttccactcgctgaggagaaacgatactggcagagatatatctacttgtggattgattatgcactgtttgaagagattctagctgaagacgtggagcgtactcgagctgtgtacagagaatgcctcaatcttatcccctcactccaaattctcttttgccaagatatggttgctcgctgcacagtttgagatcaggcaattgaatctctcgggtgctcggcggatactaggaaacgccattggcaaagctccaaagcataagattttcaagaaatacattgagattgaactccacttgggaaacatagatagatgtagaaagctgtatgcgcggtatcttgaatggtctcctgagagttgctatgcttggaccaagtttgctgagtttgagaggtctcttgctgaaacagaacgagctagagctatttttgagcttgcaatatctcagcctgttcttgacacccccgagctgctatggggcatacattgactttgagatatcactaggggaattagagaggacacgagctttatatgagcgactcttggaccgtacaaagcattacaaggtgtggcttagttttgcaaagtttgaagcttctgctgctcaaggccaagaagatactattgaacatgccagagcagttttcgatagagccaacacatactacaaagagtcgaaaccggagctcaaggaagaacgagctaacctgttggaagattggctgaacatggaggctagctttggtgatgttagtgctgttcaatcgaagctccccaagaagctcaagaagagaatgccaatcactagagaagacggtgagacagagtatgaagagtacattgattacttcttccctgaagaatcacagacgatgaatctcaagattcttgaagctgctcataaatggaagaagcagaaggtcgatgctttctgaggagtattactattaacgtttccttagtgttgttatatatcaaaacttagataaacttttgttttcttacttctctctgtacattctcacttatctgtttgatttagcatttagcattcacttttattatccaagcaaattcaaatcgttatctgttttttgtttctgaggaatcgagctaaataacttgatagaagtgaaaacctagttgtttaattacttaaacatgccgcttatatgggtacagaaacttttgtgtaacaaaaaaggagattcgagatgtggtaaataaacaaataaatacaaaatacaagaaatgaaaattcaggggtgccaaaaactacaagatgcacctcttttgcagtatccactctcatagaatttacatattttcagccctttgggcggatgggctgcatacgaacctgatccatggtcatacccatggctattgctgtatggccattgccggttattatgactgttgttgaagctactgttgtgaccgttgttcaaccactgccggtctctgctgtgcccgctggatctctttggctggctcactcgtggacttcgctcggtgcttccacgggctgagcttgagtcatgagatgataatgatctagggcttggttccgaacttactcccaaaacagatttaggaagcctctcgaccgttccagcttcaactgtggtttctgatcctagtctgagagccgttgtcgttagagtcaggtcgtgacttattgcagttggcggtggcggtggcggtgcaaaaagcaggagctctggaccagcagttccgcagtggctgaagggagtattgtcttttgcttctgtaagcattgagcttttcccggcagagacattgtcgaggatactcgtctgagagacatccaatctacatgtttcaggtgtgagagacatgcgtgccacagggttaaagaaatctttttcgggccctttcaaatcatcgtcatcatcacagtgaaatgtcgaggtgggtgaagagggtaaaccgttctgctccattgcttcaacttcagctaatagatctgaaactgattcatcacactcgtcggggtcagccacaatggccggccacccagatgcttgagccacttgggtgttgtctgaagtctgagtagctgtggcgtgatcagctgccaactcaattggctttacagacggtgcagctaaaacaacagtattctgctgaattacttgaggaagctgtcctccagtaaccacaacacttgaagtggtagtagcagcatcggttgtacttgtggttgtggtgctccaagtgacaccagatggccctttgaccagaacacatgaagacagagactggatagtctccgccgcttgagcttccaagtcttcagggctcgacttaggtgtaggactagggaaatcaaggaaatgactttcttgattcaggtttggtgcatgaacagaaccgtttatggaaacagaaccaccatttgtttcatcctccagagtcttagttgtgttatggttaccatctgcccgcacagtattgtattgatcagttcctggagtttctcttacatcaggagtaacaacgtgtccaggaaccacagagatcgacgccggacaactaacttgaggctggggacgaacagaattaccatcctcaacttttccagagcaagctacaagagccacaacttgtttctctttaggatcgttagaatgggcagtgacagtagaggaggaagaggaggttgcactggtgttaactggcatctggttcttctgaagacagttcacatccgcgccagtgcggccagaatcgtgtggagacggttttagttcttggggaagcgaagaagaactcggcaaagtagttgctttatcaaaccgtccagcaagagcatcagtcagaagcacagactcgtcttggttctcatgcgctctccatatcctaagataagggggaaaatggccactaaatttccatctacggagctgcaccatagaaaacggtccctgggtctttcctgttggatctcgataatgccatatttcactctcctcgtcatctttaccagtttcctgcagtacgcagaaatttacatgacgtgaagtcaaaatagaaattatgaaaggttacgttgcaaatgtaggaggtatgtcaaacctggatatttgatgagttattgtggaccttagaacaatcatctttatcagcatgtacgttatttctgcttcgcaaaattggtgcatcatattttttctgcacattatttcccacgttgttcaagttaacccctttattctgtggacctttactttgtgcctttacgtgattatctgcaattaaaaaacgtagaagattgtaaatagcatccaacaatcaggaatcttcgataagataatgaacaagtagctgttcacatcctaggttaaggtgggagaccttgtttccttgtacccaaccctgcatcttctgataatgcatgacttggatccatgcttggatctgtatgaacttctgggacttcctgcagaagccgctgacgttcctcaggtgattttagaagctccagcttttctacacattctctaagcgtgggagatagttaagaaatagttgctaaatcaagtattaagtccacgcaatcaatgtcaaagtctaaatgggaagaccgaggtacactactcaatgtgaattattctttgcgcttatgagcagcatggtcacctcttcaatgaattatttcatcaacgactcattaaaattttctatatcaagcacatttgcagagagatatagtgtaagcgaagtgcaacaaatatagtatagcaatctcaaaaaggatattcctttctatgccccttctcacttgcccgatcacggagatggttgagctttaatatctcagcttccagagcctacatcaacaaaacatcaataagaaacacggtagagggcaataaagaactattataatgaggatcttagtatttctatgaaagatatttgctctttttaatgaacctacctcattgattctcatggcttgcagtgttgctgccgtcttcaagatgtcaacctaacacaaaaaaaaaaacatgtttccaaattaggtaacatatacaatttcaggacaagaagatatcatgtgcgcattcctaccacagtcaaacgtttattgaggccacattttatgctctggcgcagccgtttgcactcatcctgaaaccacggttatacgtacattaaaaataaaaactgaaacgtatttactagatcttacttattagctgatgggtttctaactctttcttcacaagcagagaatgagagaaaggtagagaaatcaatatttcagatagaactatactcacctctgtgatattctggtctgataattgatcaatcgagatgacttctctcttgtctaaattcagtatttcaagcataacatctgtagtctttgcgccaagttggtaggatgctattgccttgcttgtacctgttgaataaccacaaaatcagctgagatcttactattaaaacatttgggtaactaatattccattttcctttctatcctcaacaaagcactaatatgaccattaatcaagtacctacaacttgaacaagcctgtgaatatccagcttctggtcgctgccagataccttgattctcaaaattgtgcctaccaccttttcgtcaactttgttgatatcatcaagaagagactccaaaaatttacgtctcaaataaatcaggttgatattgtgaacatcaatggctgcgtatgcatccagattttcattttgtactctgccatcagttttcctacgcatcttccgtcttctatccctgaccattggatcatgaacactatcctcctctatttggctaggtacagcatgagtagtttcaccattcgtggtcttagcgcctttcggtttctcttgaataaggacatgagactctagaagcttaagcatttcaaagtgacccactcgctgttttccaaacaacttcacaagcatctggtcacaaagaacttgagacttctgaagaggatccctaagattttttttcttgatatagtcaagcagaagaccctgcacgtcaaactgagatagaacagatgtatcgccatttttcatgaacgacacaaactcgaggagttcttttgttgcccagctcgtatctccaggagccttctttaggatattacttggatttttgccatccaacttgttgggtaaggtaggggaatcactggtccttcttctttttgttccatttactgctacatctaaagctctgttattggtatgatcattttgtgactccactttgggagcagtgttaggaacctccttccaaggattatttgctctagtaagctcatcaacagttagagacagctcttccttcaggcaaagccaatataccttgaatagatactcccaactaagcttgtcatcgaaatccaccttaacctacaaaacaagaaaaacatttatgagctacatacattatgatagagtaaagaggataatttaaaagaacaacactcaactttcttaaaatactgaagatatacaagtttccctcccaaaacaagagtgacccttgtctttcagtttcacccgattgtttcaaaaacccaacataccctactgctcttgaattattacagaggaagctcatggctaacatctttggaaaactctcatcctttcacgtaatacatgaaatcaatcaaccccgaatctctaaatattcatgattttaacttgcgattgattgctatcatcttacctattgtgtcgagatcatagtgcatggcaacactacgagggattagaatcgggttaacataaatagaaacccttggttgcttaatatagaacaagcaaagagacgtaaagcccaaacaagactcaaatcaacaaactatattcttcttaaggaaactgtggcaggttggtaaaaataatcggcacccaagcaaattttgcggctaaaacagtactaaatgaaaactatagattgtgaaggattgtcttaccgcttcattatctccttgagcaatattctcaatcagcattataggcttaatacatgtgccacaaagacccatgttacctctcacaatcacatagtcagcatctttaatgcaccgcttacaaacagaaaaagtgcatgtataacacatgtaactggaagctttttggcatgtaccacatatgtgccaccctgaaatgaatgaacgaaacatcagatttcgaaggatgttcacgtcatcatgtaagagatgtgaaataacgacatgtcagaacaatcagcctctagattgctgacagcaacatagtaacatctatgatggactatacgacataccacaattccatttggccgttgttcgaaagaatgcctcatctctcttaatacaagctggatggtatgccttggggcaattcctgaatggacaaacaaagccatcaaaaacttatcaataactcgaacctcgattcttaaacctccatagatagctatttttaacattaccctcttgcttgtttagaaattgagtagctctaacctatgagcattaaccaacgcataatcgatacttagaatctcgataatgagatacagaacataatagaatatccaaaaaaaaactacgaaattaagctcttcttcgttgtgaaccaactaaaacatatggcaaggctctaatctcccactagagcatactatctaacagaattattatcactataagctaacaatcacttaccggcgatcacagagaacaaggtctccaccgtcgaagcaaataaagcaaacatcttcttccttgtcttccttcttcggcggcggtgggggtggacgaatatgcaacggcgtattagcctgtgcccttggaggcctcccccgttttcgttttattggggcagcttcatcaataactttaacctcttgctcattggacataggcacagcaaccgccccagcaaccgtggaggcaggtacagagagagcaggacttggttaacaccgatctcttcacattgatcaactctcataagatcgattcctctgacggaactctcttcgcgaccagccaaagaagccaactccggcacgccttgctggagttgcttctgttgattctccatgattagtgaagaatttgaaaaaattgtgagcagtacttgcagatcaactagtgaaatagaaaccctaatctgaggttctttggggattttggcgatgatgaatgatgatgatgatggagagaagtatgggtgatgtgtttagaaaacgaagactagtgggaagaaaaaatcatatggactttttttttcttcttctattcttttccacttctttagttcttactttgttatgaccaaatgtataacaaaaatgttgtcacttctttctgcttatagaatttttattatttcaaaaatactagtaccaatttctacagattccaaaaatactataatttctagatttcaaattcatttctaaaatcttatgttagatttcctagcttggttaaaccttcaaatatttatccaaaaataacatttgagttaagtagatatggaattccagcttattaggtagatagttattttcttaaaaaaacataggtagacatctatttgtggtgtccaatttagcaaaatatatggagcattttattttattatttaagaaaatatgatattatgtaatatacaatgttcatatacaataacgtaaaatttatcaacatcatttaaaaatcttacctacgtaaaattccttggccaaaaaatattatatagtattaaaaattccttggcatattcttgaatgttttgtaagaaaaacatgacaagaaaaaatgtaaatttggttacattccacgtaaaacttctacctacgtaaagttacttcacaaaaactaaaaatagaaaagttatttgtattcactatgaatattcttaaataccaacacacaacaaagaaatcatattcttgtatgttttaataagaaaactgtgatgcgaaaacaatgtaaattttgttaacagtccacctaaaaaccctatatttgtaaagttgcttagcaaaaaaaataaaaataaataataaaatagaaagttatttgcaaataaccttctacaatttgggtagttactatgatttttttgtttttttcaacttggtagttactatgaatattcttacatattaacaaacaacaaacaaacaaaaaaaaaaaaaaaaaaaagaatccaaccaagaaatcaagtgtggaggataatagaatttttttttgactcaatatgttctaagttttcacatcattttacgcatttcacacaattagtatcccaaggttgaagaaacaagtaccttaaaacatctatttactaaaataaaaacataaaattgtaacccaaaggagtgtaatctcatagaaatttcatgatttggtcatctatgcttgaataacttcattcgcgacactcacatggtattgtaggtaggctttgtacctttgttgggcattgttcacgtgcatgttagacttcacttttgttataaagttttgaactttgatctttttgtttatagtaatatattatccttttactatttctaataaaagtatacatcggtgatattcggagtcttacaaactttggaaaaaacacattttctgttaaaactacattttgtagatttatattttctttgaagttttcaaaattttgtagatgacatagctactgagattattgtagtcaaaattcaatttattttcttttaccttgaaggtactattcaatcgagtcaatatctttgatttatgatgatgctaagaagtaaaaaaagaaacgagctaacaaggaaaaaagagtacaatccaacgtgagggaatgatttcagatctcaaatttatttggttagagtgcttaaatatttgtcaccttacaaattaaagatttctaacacacaatcttctcaactaatgatgttaaccacaaaaccgtattaattaagtgtctgcagaacaacatcacataatttatgaattatttaacaaaacattaagtatatatctctaattatttttttgaaaaggtgtacatttttagtaaccagagaacaaaattgtaatggtaggcagctagagcatatttttcatatttgtacatttttacatggtcaattggtcattactcattagcttaattgaaattatttctgcctatatagcttaatttttcgtaaatttattagagggagtaggtgttaaattctgattggtggggaagtaccatcatatatggataggtcaaacaacaacccaaacccgacccgtgcagcaaaagtttgtaaaaagaggaactaaagtggacccgacttaattcagaacttcagaaatcagaaagcaaaaacagaattgtgtattattctcttctattcaggaaattgatccaacaaatgaaagattactcgaagatcggcgataaacttgtgatgcagagacctagacgacgtttggaaggcaccgccatgggcgccaccgtgttcgatctccgtcccggcgtcggcatcggacctttctctatcggtaattgcgattctctcaaatatcataatttctgctacttttcgttagtttctagaattcgagaaggagtatcatctacgctgcgtctatcggatttggaagattgcaaatcgatttgcgatcggagattgcgtgttgttttgggaattctttgaaaacatcgcgatgaagtttctcgagattgcgtggtttagataactgttggatcatctttagtaatagcaaatgctgtgttagttttttagttctttagcagactgtttcatcttccgatcagaaccgactaatcaagttgttgtgttgtttcaggaatgccgatttgtgaagcatttgctcaaatagagcagcagcctaacatatatgatgttgttcatgttaaatactacgacgaggtttgtactaggtcacggattgtattagatacttcttttatccaacttatcttcattgtttgttgagttttctatgattccgttgcctcatgcaggatcctttgaaactggatgttgttattagctttccagatcatgggtttcatcttcgatttgatccctggtctcaggtacaattctttcctagatgatactgtggacctatggcttttgcatgtgtatgattaaaccaacttcactgctttacaaacttttgttttcaactattcaagagtggaaagcaatttagtgtatcgctatataactagttttaactggaataaacttagcttttgttcttccaatttgtttgcagaggttacggcttgttgaaatatttgatgtcaagcggcttcagatgcgctacgccacttctatgattgggtgagtcgaatgggatcaatttttttggctttggtgtgtagtttactgttgtaacaactgtcttttgcttttacttcaggggtccatcaactctggcaacgtttgtggctgtttatgcactttttggaccaacctttcctgggatttatgataaagaaagagggatttattctctgttctacccggtgagcaagaaatagacagatggtcacattgttttaccattaatgtttgaatttgttctatcaatgtttaatctttttaactattgcaggggctatccttcgagtttccaattccaaaccagtacacggactgctgccatgatggagaaggtttgttcttctccggactccagtgaaattttgtttatattttttgtcttgtccgatatctaacttctcagatttttttttctcctttacaaagcggcactaccgttagagtttccagatggcaccacaccagtaacatgccgggtctctatatatgacaactcaagtgacaaaaaagttggtgtcggaaaattgatggatagagcttctgttcctcctctacctcctggcagtctgtatatggaagaagttcatgtcaaggtttggcttatcttcatttacactcgttcctctttgtgtattttaatatctcgtagcctaacttaattagcagttaaccggttccttactcttcgcatgacttaatttaatatttatgcagcctggcaaggaactatactttactgttggaggccagcatatgccttttggtgcatcaccacaggtaaagtctgtaccttgtcttattttgcttcttctttgatctttggaactaatcatttcgtgcttcgagcaggatgtatggactgaattaggtcgaccttgtgggatccacccaaagcaggtgatctataccgtatctctaaacttgtttgtatatcacgatcagatgcttccattagcttctcttactatgttacctgcgttatctgttacagttcaatactcaactggacatttgtatttctgcttctgaattgtcctttgctttccaggtagatcaaatggttattcattctgcgtcagatcctcgaccaaaaacaactatctgtggtgattacttttacaactattttactcgtggtttggacatcctgtttgatggcgaggtaggaaactcatcaactagagttatatgttccattcgtacgttttctttattcacaactctaccttttctgcagactcacaaagttaaaaagtttgttcttcacaccaactatccgggtcatgctgatttcaactcatacataaagtgcaactttgtgatttcgggtacgtaatacttatgaagcagctcatgtcagtcaatatattcaatactcgatatatgttgtctatttttccaacaaacctacgctttcatgtcacttttcagctggagcggatgcggcagaagcaaacagaagtggaaacaagatcactccaagcactaactgggatcaggtcaaggtaaatcttcagaccaatgtgataaaagcagaacagaaaattgaatgaaaaactagtctatgttagggcttgaccaattgttcgtgagagtttttactgacgtaaaatctctttaccatcccatcattgatggctctaattgcgtaatgggaagaaacttgggatgaagcattaggaaattgatctgaatagttaaatctgggatcagaacagattgaatgagtcatttctcatggaaatgtctttatgcttaggaaatactcggggaatgtgggccagcagctattcagacgcaaggctcaacgagcaacccttttggatctacatatgtgtatggctatcagaatgttgcttttgaggtaatgcatttttgtaataaccctagattcagtaactttgatccttgttatatacttgcagactgttaagtgaaactttatgttgggttaaaatatttgcaggtgatgaagaacggtcatatagccactataaccttgttccagtcatgatgcgtatccaccgctgaggtatatgcccgttactaattcttcgtttatgttgaatttggtcgtaatgaatattcactgtttggttttgtagaaaaaatggctcagattaatgtcttgtgttatatgctacttaacaaagcttcttacatcaatcaatgtctttgtaggggctcaagatgctatcttcaaccagactctgtaaatctaacgtcacaagaagctacgaaaactatcgatgataccaaaaacgacaaatgttgtacagttatacatttgtctagttactatcacccgggttataataacagttattctggttataattcttttcagactttattatgactaattatatatcatttatctgttaaaagttcataaaatagcctcatcatttgagttttttgcggtatcgataaattttaaggttttaaaaaaagaaattgaaaaaacaaaaaaaagctccgtcgccgggactcgaacccgggtctctcgggtgagagccgagtatcctaaccagctagactacgacggaatgttgcctactgatgacttaaattttatatagcacactactggtatagtcgagaaggttgtgcggtatctcttctatccgttgcgtagcaaggttttgtctttcgtgtatggttccgggaaggaaaaggggaagtggattgttttcatcggcgataagtctcttctcctctggtacttcttctttcgattctcttctcttttgtttcgggttccacttagatactctgtagctgctttcatttcagaattggcttttggttcaatccattggtagtgcgagaacttgaattccgaaatagttccgatttctcttcagattttggatgttatcttgctaattgagtttagaatccatagtaatagtgcgattattgatttagcggttgtttagggtttaagcctgtttttcatttgattttagggattgaggttggtggtgtgaggtaaagcttcggtagttagagatgaatgcgtccggcttaactgttactccgcccagatttcactttcgatggcgttctgatcgttttggtacatctcagagaagctctcaagcttttactgttcttagcaaattgaataatcgaaattccgcttggcctgttcttaaaaggtagtgttttttggttattgtttcatttagcatatgctagttctttcttcgtggttatctgtaatgttcttctcttcggtgttgcgcagttctcgtttggcgcttcctacacaaagaagaaatgctatgatcactcgtgccatgagtgcttcctttggtgatatggcagacgattcagctggtaatacattcttctgagctatgcacaatttaaggttatgctttctagtaattggcacagactcataatcctgagttaagcttgtaaacggtgcttttgagtaatttagtagttatatttaagtgcttttgaatcgaactagctttcattagacgaagcaatacctagctagcaattcaatgaaatgcgtaattcttgggttgaaaacttgaattccaaactgactaagctacttccattggttcagctatcttccctcggatcaatgtcaaagacccatataaacggcttgggataagccggatggcctcagaggatgagattcaaggagcgaggaactttctcattcagcaatacgcagggcacaaacccagtgttgatgcaatcgaatcagctcatgacaagattatcatgcagaagtttcatgagaggaaaaaccccaagattgacatatcgaaaaaggttcgccaagtgaggcagtccaaagttgtcaactttgttttcgagagattccaaactcctcccaatgcagtccttgtcaaaacagcagtcacgtttgcagttcttggcgttctaaccgttctgttcccgacagaagaaggaccgaccttgcaggttttgttatcactaatagctaccttttacttcatccaccaaaggctccagaagaagctctggactttcctttacgggtaataagctgatcttaattgtaaaaccgttgctacctacttgattagaatccacacctgatcaggttgatattttgaaacagagcgggagctttcatcttctcgtggctggttgggactttcttgatggtatctgtgatcccaccgttcatcaaaggaccaagaggttttgaagtcatgtcttcgctcctaagctatgttttgctttgggtcgcttcgagttacctccggtagcgtgctagcttttttcttttccccgtcttttgggccagaaattcaagtgttatctcggatatatgaaaacacacgaacagagaaaaaatgcatcattttcatgtgacagagagagagagagagagagagatatgatttgtggtcttggagttgttatttcacggagacctcattaactttcaaagctcagtttccaagttgtggctacaaacaaagaatagtaagagttgattacggaaattagtcggatactagtctgatttcataggaattaggaaacatggcctcatagcacatcatgtgctgtctcatacataataactatggctgcatgattttgtccatggcctcattatatgtgcatggccctcttatttatttctgtgtctaatttatgtatatctccaccgaaataataaacattttagatcaaaaccatttgtcagcctcacgattaatttttttctttcttatcaacataattctttttttttggcaatgtacggccttccaaactagtgaacgttgtaaaattgggctatcattagaagttcaataatttgaaacgctaaaaaggttggctaacgcaaattttggtcgtttcaaatataaatataaggtttatttattaattaatccatctagatgattaactagattggtaacgacgactaatctttagacgatattttcattgaaccactttatgtatgttagtaagaaaaagcaaatgcacatgccttcatgtgctctgcttcacttatcaatagtgaactaaaaattcgttaaccataccttaaaaacgcgaaaaatgtaaataaatgcttgtataaaatagttgcttgcaaaatcatataatttattgtgtggtactgatgtgatgtaccattaattaagatcgaaataatgtgtgttcatcataggtgaccgtttaatgatgtgattaatcaactttagactgattttggattaaaacattattattagataatgtgcataattattttttggaataagaaagatatggcctagacaaagtcattattcttttttgaaaaaaatatgtggataataaaattgagacacatttatggcatatattattaatgaggagaaatctttgaaattttgcaatttggttattaaaaaaattggcttcatttggtaaccttttaattaagctgaaaccaaatgtagataaattacagaagctgatccatttttttttattttttttttaatattcttggacaattgtctgatttacgagcaacaagagagagtctctctacacaaaaaaaaaatcattagctgctctaaatgatgctttctttagcgcgctaatataattagctaattccttaattgtaccaatgaagacgaagaaaacaaaaagccattaacgatttaacagctccacaattccgactttttttgaaaacacctgaattattttttatcgctgtagcgaaagcgaaataggtcgcctgagaaatctctggtttctccgaatcgcctccttagcatcgttcctccgtcggaacaccgtcgcttctgccattgttctccatctcgcatttggtctcgtttctcagatttccatacctcattcgctgattcgcaggtgagaacaaattcgttgattgttcttgatccctttaccggattttatgattttgtggcattggttcgtcttaatgctttgcggttccggtttctagtagaactacgcacgatggttggattttggtagttttggttttgaattttgtgagattcgttgatttgaagttctagtgtgagtctgtgagccggtgaaaggaatttctgagctcctcgccgaaacttaggttcatgttccggcgaggcatgtcacactattgaaaggatttgaaatttgtttgggtgtaattgcgtcgtgttcgttattatattagtactttcttggatcttacggctaagtttgtgttggattttttgttctttgttgtttaccagagacatgtgtaagtagtcacaaactttgtttcctcactgtgcacatggagttaccaaagattcttggctccacattgaacattctgcagaaacggctgtgattattataatatcaaatctgttaaggtaactgatttcttttgtttaagtgttttcttgtggttttaggcaataaaatatgagcgtaggcttgaaacttatgcaacatgcaaggaagactttttgacagactgtttaggagggggaccattgcgaaaacacacaaaatcctctccataatattatatgaaacttgggtttctttatgtctcaaacaatgatgagaaaaaccatgttactgatttcgttgtcattttctgctgagatattttggatataaaacacgtggatagagacaatgttcttctgccaaagacatgaatatagacaagttgataagtagtctgatgatctttagtgattgatttgtcctcataattcctgttcgctctctctatatgtatgacattgctttgttcttgacctggtttcttttggggtaggatgcgggaagggaggtgacgggtgaagatgggtataggagaggatcagatgcaaggatcgagtggtagggaagagaagatttttgtttctgttcgtctgaggccattaaatgtgagagaaagggcaaggaatgatgtggcagattgggagtgtatcaatgatgaaacggtcatatacaggagtcatctctctatatcagagcgttccatgtaccccactgcatacacatttggtaagacttgctcacttttgaaacttcttgatcaaagttaatccttaaatttatcttgctgagctttcctatgcctctagacagagtgtttggccctgagtgttctaccagggaggtgtatgatcaaggggcgaaggaagtggctctctctgttgtcagtggggttcatggtaaggcatgtctcctactgctttttagttttttatcctctgtggctcatgtttgatacaaatttcaactgttttcagctagtgtctttgcatatgggcaaacaagcagtggaaagacatacactatgattggtattacggattatgccttggctgatatatatgattacattgagaaggtaaagttaacaatatcagagtcttcatagtaatcttaccgcattatttccaattcattcagtaactgtcgccttttaaaaaaattatttgttttttgcagcacaatgaaagagaattcattctgaagttctcagccatggagatctataatgagtctgtaagagacctcttgagtacagacattagtccactcagagttctagatgatcctgaggtaaaagttgggactggcatcttatggaattggtatgcataatctcactttactggtcatttactttgggacagaaaggaacagttgtcgagaaactcacggaggaaactctgcgggactggaatcattttaaggagcttttatcaatctgtataggtacttattttcctaacatgtactcaattaatacttttagtgttttggtcacaagtttcactaagtatcatcccatcattgcagctcaacggcaaattggagagacagctttaaatgaagttagttcccgctctcatcagattctgagattggtaaggcattctgctgatttagtttaatgatacgacactgcagtcttcaggctgcgttttctacttatttctgactgatatgtttaacagacagttgaaagcacagcacgtgaatatttggcgaaggataaatttagtacactcacagcgacagtggtatatacttttaaatcttccattatgtactatcctaaaacaaaacatgaaatatattcatagattaactaattatcctgcagaatttcattgatcttgctggaagtgaacgtgcatctcaatcattatcagctggcacaaggttgaaagaaggtggtcatataaaccgaagtttactaacactaggaactgtcattcgaaagctaaggttagcctgtgacctatagcgtcaatgaaattctgtgatctgtgccaccttaggctgctctttattctttccctatattcaaagatggttaagcagctaatcattgtctttgagagttgagttccaagctgaaacataggactttcgcccagtaacgccagtttaccaagttattagcagattgctgttattaacatctaatgtttgcttctttttacattactgaattatgtggctagcttaatgcagtaaaggaaaaaatgggcacattccattcagagattcaaagctgacacgcatacttcagacttccttgggaggaaacgccagaacttccataatctgcacactgagtcctgcaagagtacacgttgagcaatcaagaaacacattgttattcgcaagctgtgcaaaggaggtgacaacaaatgcacaagtcaacgtcgtcatgtctgataaagctctggttagacatttacagagagaattggctaaactggagagcgagttgagcagccctcgtcaagctcttgttgtgtctgacacaactgcattactgaaggagaaagacctccaaatcgaaaaggtaatgcgattatttacttcattcaacatattaagttatgtaaaaaccagttgcagtatgagagctcacttacccaatattttttttgtgacaaccaacttttgtattaccggtagttcattcataccagtaaatatttttcatgatctgtcttaatatgtaaatctttttcatgattcattcactctagagactttacgttcatttcattatttacagctaaataaagaggtattccaactagcacaagaattagagagggcttattctcggattgaggatcttcaacagattattggagaagcaccacaacaagagatattatcaacagactcagaacagacaaacacaaatgtacgttaatatcatttttttttagtttcaccggatgataagcctttcaactgcccgatttataatcctgtttttgtattcctccaggtggttctgggacgtcagtaccccaagttacgggtgcgtagttcatgggagtctctaaatataacaccagagagtcccctatcagcgcaagcgtccattatgatttccccacaatcaaccgagcatggttctgacgagaatgttttccagctttcagacttgaggttgaattcgggtgcaagtagtccagctcaacaccttgcgtttgtaactcctggtaaattcactaaagttcgacttaatattcgtggggtagaaagtaaaaaccaactgcacattcacaagggggaatctgtagatcagtctcgtgttcagggggaacgattgcatgaaatggacgaaccaagtgaggtggattctgaagatacctgcacggaacttcaatgcatagaaacagagagtcctggtatcatcatgtatccagagccaaatatacttccagaccggtgtaaggctgtgagtgcactaccattatgtgaaccagagtcaaagaactcaagaccaccaacagaaactgcagaagaaaaagaagaaaaagaagaaacagaagaaaaagaggaagaagaagaagaaagagttaaggaagtcagtagtgtctctatccaaacaaaggagaaaagtggaccgatcaaagtctctccacgctgtgttttgtcacttactgacgaatcatttccggatgagtcttctaacctcaaaagagacccaacacatcaagattttgtcactccgtctcctgaaaagctttatgcttggcatcttgagagtaatgggcaaacggcgggaggcacggggtttactagaagccgaagctgcggagcaagctttgtatcaagctcttccttttctctgtctgagagagatgctaacacaccaccatgctggtatcagaatgaaagagctgagagcaacctgaaaccgtccaacagcaagaggccaccattgccaaagcatattagccggatgagcatgccagcaacttggttcgagaaagacttcaaccacacccaaagaatgccagctggtttagatggtgttaatatgataaagtcatcaccgaatggatcacaggtttctacctctaaatctcatgtgtatgcacgccagacaagtggtagagctttaatcagccaagacgaaggtgaagagactgttcctcagagggacaagcgaatcattcacctatcggttagttttcctaacttggtcaagcagagcttgcttttcgtttacctatacttggtacgacctttagatatcgtcattattttgagaaccacctctatcatggcagatggaggagatagagcaaaaattcttggctctaagatcgtcaaagagtttcaaggacgctgcggttgacccaatacaagactatttaaccatgccattgaactggccgttggagttcaaaagactcgagatggagataatagagctatggcatgcttgcaacgtttccttgtcacacagaagttacttcttccttctcttcagaggagatcagaaagattgcttgtacatggaggtcgaactccgtaggctcaagtacatcagagaaacctttacccacaataacaaagctattgaaaatggacgcactcttacatcaatgtccaggtatatatattcacccaaaaacaccttaaatttctttgacggtgaatgtattcggttatttaactgtttgggccatgaaacaaaacagcctgagggcgttgaacagggagaggtacaagctgagtcagctgatgcagaagaaactgacgaaagaggagagagagaacgtgttcttgagatggggtattgggctgaatacaaagcacagacggctccaactggcacatcgtctctggtcagagagcaaagatatggatcatgtccgagagagcgcctcagttgtgggaaagctcatggggttcgtggacatggatttggcatccaaggaaatgtttggcctcaacttctcacttagaccccgtgccaagaaatctagcctttggaaacgcagcgttttgtcgctctctattttgtaattataaaggacaaaaatccaagcgattcattcctgagcactaaattaaaagtggtgtggcttctgtgagaagtacattcacaaatctaaatttgatttgggtctgagactgagattgagcagtctcaaatgtaaaattttaaaatggcaaatcgcaaaaatcatagatgatatgtttgtgcgtttaactgtttagagtcaggtgatactctaaagtcgttagcataacccgacatctcaataagaaaagctcttgtgtttctcttccggtgagtttgaaatcttttcatgcagtttacttgtgtgtcacatttttattgacctaagaatgcttcacatgcaaatcgctctctctcaaatgcctcaaccttgaacctgctctttgccttaaaatcccagtgatatctgaatctgaaccatgtttatgtttgtgtacattagccaaattcagggtgaattgaagtcattttgaaagattcatgaattgaagaactgtagtatatgattctttttgctccttcattcaaaattcactgcgctttcatcctcaactcattggagggaaacaatttagataacttaaaaagcaacaaagaaactaaaacataaaaagacaacaaacaaccaccaaagcaacaaaaagagaaagaaaaaaaaacgaaatttaaaactctataaaagcagataaatgtaagaaactccatctttgtataattgatcaaatcaaggttgctgcttagcatccatgtatccagcatcaacaagcactttctccctcttagcaagctcaagatcttcatcaaccatcatcttcacaagcttctcaaaccctacttgtggtttccaccccaacacttcctttgccttgcttgcatctccttgaaggttatctacttcagcaggcctaaagtacctctggtcaatctcaacataatctttccaattgagtcccaaatacccaaatgacacatcaagaaactcttccactgtgtgtccttcctctgttgccacaacgtaatcatctggcttctcttgctgcaacatcaaccacattgcttccacataatctcctgcaaatccccaatctcttgacgcttgcaaattcccaaggaatagcttcgtctgcaaaccaaccttgatccttcccaatgctcttgtgatcttcctcgtcacgaaattctcaccacggcgaggtgactcgtgattgaacaagattccgttacaagcgaagagaccgtacgcctctctgtaattcactgtgtaccaatgagcagcgcatttggaagctgcgtaaggagatctgaggtgaatcggcgtcgtctccgattgtggaggaggagttgatccaaacatctccgaagatccggcttggtaatacttgacggtacggccactgtcgatggtgtgagatctgacggcttcaaggagacggagagcaccggttgcgactacatcggctgtgtaatcagggatctcgaaggagacagcgacgtgagattgagcagctaggttataaacttcgtcaggtttgatcacatcgatccaacgacggagagaggaagcgtcggtgagatcggcgtagtggagtttcatcagagctttgttgacattgtgtggatcgatgtagatatggttgattcgctgggtgttgaaattcgatgatcgacggatcagaccatgaacttcgtagccttttccgagaaggaactccgtcaggtatgatccgtcctggccggtgattccggtgatcagagctatcttcctcggttcaacgacggtggaatcagctttgggagcggtgatggattcggaatcggatctggatccgttgttctctgacgccattgttgggttttcggatctgggatttcagagacaaatgctaacgtcagctctgtgttgaaaatccgtgttgaattgggctgttagagttttagctgatttaaatagggtcagagaggttgaagacggaggggtattttagtcaatttcaggataagggtagtttggtaatctttgttggtctttaagttttttttaattgactattgattggatattttccttgtttatgtataacacgttaatgatttacttattttgtggtcaaactcatcaatggtgtactatagaattttcttagatcatttgcaaactttccacaaaaacaaacatattaagattttcaaatcattttatgaactgtccaaacaaaaatagtgaaaagtatttgaaagtttataagacaataattgcaaaaacaattagagtgaaaagtagtcaaacaaagcatttaatatacatttagtgtagtcaaaaattaattaaaaagttacaaatttgatacattaaaaatattagtaattttttgtagaagcaattactattttgtactcaactgaaaaaattgagagaattggattgaaaaaaaagacagaaatgaaactcaccatttactaaaaaaatgaagcaaatgataagagtataacttggctcaatgccgaaacatactaacatatatatttagtctcttgagttgtgttcgagtggtggacaatatgtaatctccacgatttgttttaggaatcttatgcttcaaatcacctttgttgttttccttttacaaatcttcaatcattttcatttatttttcttctttctgtcacaaataattgattggtttgtcaagatatgcttttatatattatttatctttgcctgttattctttcgacaaccaagcaaagtgatcatttgaccacaacaaaaaagcgttgagacttgagacaagtgaaaattataaaccatgcgttggaccatcttatgcatccggaacttaggtataccaacttagtcttaccaagaattatattcgatcagacactaattaaagaagttaattatttcatatgttcgacaagcatcaaaatgtggcccgtattactatccatcgaacgaatattctagcattagtggatttctccaagctaaactacaatctcaatctagaggatgcaacacggaaaccaaaactgaattgctcaacaaccatgattttcaacgttaattatggtgtttggtcacttgactcactttggctacaacttgtgttgaggttgataaacctttgttgtcatctcttataatattggactaatgaacttgaagacagaaagaaaactttagaccaccgtgataaagaggaaaaaacattcctagggtttttttatctatacaaaaaacccgatcaagtggctgatctttttactaaagcattgggtagttccagttttagagtatcttttctccaagttgggtgttttaaatttacacacaccaacttgaggggagtgttatcgagatagatgtgaatatgtcgagctagatagatatgaattttgtttagatgtgtttagtatctctaaagataaggtttagagaatattgatgtacacacataggtatatacatgtatataagggaaacgtatcccaagtaaataacacaactcaattaaaccaaagtctcttcttaagtttacaaaacttgacgaattgtggtgtaaaggcaaagaagattataaaggtcgttcgaagagatgggaatgtgatagttcttcaacttgttcaagtactaggaagagtctattcgggcaatggtgcaataggcaattgagaaaacaattgagggtgtgaaacaaagggttgcaatttggttatacatgctcaagcctcacggtgagcgcaatttgtttttggcaattatcttatttgttggctattctctgaaggaaagaacattaaaaaattgggcttacaaaggtttgaattcaacttagattgcaaagacttagtgatgggccttatggatgagattacttgggcgtccttgagaattgtggcccacgaagttcaagagatactgataggatacattcgacgtattccccatttcgttttacattttaagatgatgatgtgtgaaactagttaagaagggttcttcttagtcctaaaagagttattaaagtttttttaaaactctataaagtttcgggcttcttaataataaacacagaaatgataatggcacttaaaaaaaaaaatcataattctcttaagattttctgaccaattgtccaataatcattgtccaataatggtattatttgcttatttttttactacataatctaaagttaatcaatatcctttaatccaataataatgacaacaaaactgtgtcacttttctagtggggtataaaatatataataatatggctcttctcctaaagtactgcaaagagaagaagatctcgttgacgccccaaaaaataaccagaggtaatggttccgcttccatgggagctagaggaagatatactgtctcgacttgcagcccaatctcttgttcgattcagatccgtttgcaaacgatggaattatcttttcgatgaaaagagtttcatcaaaaaccacttcgctcgtgcttgtcctcagttcatcttcatgaccgattccaatatttattcgatagagatcatcggtctcgacggcgttgatccaacgattaagttacgtgtgctagactcctctggtatcccttaccgtgactggaaatttgcttacataaccatcactgcttgcgatgggttcttgttttgtaactcttgggctagtcctaaggggacagctttttggaatccgtggttgaaacaggttaaatggatcgagtacgaggataaaggtttcaatgtctgtggcttaggatacgataatactagagacggaaaggtttacaaaatcttggggtatttaatgtgtcgccctgaagatgggagctcttacgtataccaccagagagttgcgatctacgactgtgcctctcacgcgttcaagtttattgaaatatcgaacaaggactggttcctaaccgatgttacacgattcagtgtgtctttgaacggaaatctctattggctttctcctattcccaacactgatgactttctcatccaatgttttgatttctctagggagatatgcaaacccttttgtcttcttccttgtcggaagtttgatgctttcgatttacttgtaagttttcaggggagataggttatccttgttaaagcaatgttataagacaaggaaggttgagatttgggttacgaagaataagattgatactagtaacaacaatggatcagacgaagttgtgtggattcacttgttgacgttgctaccaaataacttgccaaacttatttatcgagtgttatggcattagttacttcatctatgacaagaccaccttcatcatttattgtgctgacgagaacacttatgcggcttgcatctatattgtcaggggagatttgctcaagaagtttgtaattgacaccatggttttctgttgttatagctgtgtttatgctcccaattttatcccccttcctttaatgtaaaagttctgaatataataataagatgctttatttattaaagctctcaaatcaacatttattttatttcactagtagtttaaaccaattgacaaaaccggttcagtcaatgttacaacttacaatccaaaacaacaaaccaaaccggataaacacccaaaatgcccaaaaaaataacagaacatgtgactaaagctttgacaaacggatgaaatctaggctctacgaccactacaatgatataatatatgtactgtgcactgaaataatacccagcaaaatagtgatcagttccaaagtctaaaagaaatcagtatgactcattacagttttaccaatccaacatttgtcgccatcataatcaaaatcacacgatcgtagtcgtagaagcctttgcgttgatcgttacttagagtgattaccattatcgtcacatcgtcatgatatctccgtctcctaccaaccggaatattcgtcaactcttccaatgcgaagcctaaatcaaagtgccaattttcgtctcctaactttcttgaacctttcaaaaagaaaaatgtcaattttatcttttcgtcttctaattttctagtcggactagttgttgtttttccaatttaatgtcggctttcaactcaggcgtagccggtgttttggtcggattaaaatattccaaacttagttttgtctaagtgctggatttttgtgttttctctttctacatgacttaaaattaaatcttgtttagattatgtatgatttactgtcggcttggctcttctaaaggactaatatccttgtaacttactaccgactggtatgaagactggtatgaagtggaccttttaaggttttgaggtggagctttttttgaagaatttttgaattgagatctaaagattcgttggagtcatggccagaattataagaacgtacagcaaaatttggcaggccggcggcggtaaacctatagaaggagctagcgatgatggatctaaagtccagcgacaaagctgaaccatatcgttagatatggctgataaagatcgtgtcaatactcatccttctcacgtgtggatactttttcacaagtggcatttttaactcttattttttttaaaaagttggatttagagtaagtgggcttaatttcaattttaagttgtaaatgtaggactttgttttatctgtaatgccaatttggttttccattttaataaaaaataaatagccaaaaataaggaaaaaatcttatttaattttttaaaataagtaggaatccaattgagttaataaataaatataaattaggaatccaattataatttggagttagctgagacctgagaattacacgaaattaaataaataaataactgcttccgttatatataaatacagtctctaaaggaacgtcctaacaaaatccaccgtgtactaaaaagaaaaagaaaatagaagagacagttgttagggttttctcatcaatcaatcaatcatcatcatcacccaaatccttccgccgacgtctctttcttgtttccgttttctctctccgatctctgactcatccatcgtattgaccaattccctaatcaaaatccttcgaatctcaatttgcttcgttaagaaatctgtagatctagcagaaaaaattcatatttgatctgaatctgataaaaaaacgatcaccggttgaatcaaaaagaatcgaattttgttttcactggtttgtttctttgagatttatatgaataatatgaagagatcgaagaaacccagagtttcatggccaccaggtcctaagctttgtcaggtataattaatccttatatgttccatgttttcttatccactttctaatcccaaattgattgatccatctcaccaaatctaaactctcgattataacaattaacctaatttctggatcctaaaatttcgattttgaagttttcctttaaacccaacgaattgattgatacgatcttgaatcgctgaattatttaatttcaatatccaatcgaaaaatggtgaagaaaccaagtcttgtttgttgttactttgacggctcttttggtatgtagaaggctttgatttttctatctttgaagataacgttttagctcatatagtttacatgaaattgatttgaatcaacaaagatatattcaaggttttggatttggaaatttgaatcaacatacagttagatttagattgaaacaagatatgatcaagttttgaagtttgaatgcatcaatccaatactctgcaactacaaatttacaatctttttacagatagacttgggaagccttattggtttagttacatagttttgatacacgaaaaagtcagctttggttagcttctaactatgcggattttgaacaggttaaggtttttcgaacagaggacagtcctgccaatgtagcctctcagcctcaacgtcatagctacccatctaggaaacctcgagggccagatcttccacctggttttgaaggaaatcactatgcagttaagcctaatgtttcaaacattcctcgcatcaaatggaaacgacctcctcccaaggtatattttttatactgtaaagaattggtgaatcccttttgaatctttttttatcatatctgatattaatattatgtgtcttggacaatgcagttctctgtcaatgatacttggctggttggatgtggtggcgggagctcagaatggcaaaatgaaaacttgaggatttcaaaagtgctggaagctatctatcctcatcgctctgccatcccttctcggtattttaccttcttctcttaggttattcaacattgtgttggtgtgttagttagcctgctgattgcattctgttttcatgtagaccctctgtttcaccggctgtggaagctgaatgctttgatgacagcaaaactcctgccattcgtctcactcctattgaagacgagagtgaatcttcttcagaggagtcatccaacagtaaggttgaatcaggtgttaccgcaaacaagcagggtcagttggagaccaaacctctatgttcaacccaagaacaggtttctggtcttactggtcttgcaccagacttgagtctggctgcttctgcagctctgactgcactgatgaaaaccaaggaacaagggagtttggtcgatactgagctacttatcaagttcctcagcgacccaaaattaatcaagaatcttatcactgacacatcaggtaaatcctctgaaactaagaatcagcccattgtcactaacatcaactctgctactagacctgttccgcagcctgtcagtgctgtcaccgcctcacccatggctagaaagccgcagccagtgataatacctcaagaacacagtgttgcagtttctcggtcttttactaaccctgagaggcgagtatcacctcccaagcctgtaaatggaagcatatccccacctaagcctataactggaaaaccatctagtataccaatgcccgttcatttccatgtcggtatagctaaagaacaacctcagcctgctcggttcccatcgagttctctgccaatgaaccttaacttccaccgacctccaaatgttttctcagaaccaaaggtaatagtaaatcctcaaccccaacaccaaccctattccgcattccgtacatctgaaatgaactatgttcaatcatcaattggacttggaaggggtcctcaaaccggtttcaattcttatccaatgaactttagccgggcagatgcaattggtagcgctaaaccagtagtacaacctatgaagggtctagactatttcaaaaaccttataagggaacatggcacagataatcatgaaactaaccaataccattcacaaactggaatattcaacggacgcattgataataataataagattcatcaacaatgtatctactttggcactgcgaatggatgtaatatgggagacagttgcacctatgttcatgaccggtataggcccaactttgaggccgcggctccgagggctaagagaatgaagtttggaaggtatgagagaaatggtttttgaacataaaaaaaaaaatagagttcacttttatagtcttgtctatcactggttaaggaacaaaacctgaggtgatacaactttcaattttgatcaatttgtgcgcaccaattttaattcatttaacaaagttatttgtttagagcaccagtttaatgacaccagtttaagaggtcgagaaagccggacaatattaatttaaatcatgatttcaaaactaatctgcgtaattaatttgtagtaaactatgtccggtcttttaaaacaaacgattaacggagttgagttttgtaatcgcttaaaaaaactgttgtaatatatagctagagtctggagatgtactgcaaagtataggtaatatgtagtaaaaaaataccatcaagatgaccgcaaaagatctcataaattaaagaattcaaaattctacctttaaagggcagattcgaaacgaagctcattagctttcaacacaaaaagaggttataactaaagtaaaaggctacaatggggtgttaacagaaataagaaattaaaatcaagaaagcagagaagagtgtgtctcaagtctagtagtctgccttggctgctaatgtggcagctgcacctctacgacgaccagttctccttgcagcaatttgaccaaccttagcaccagcagatttatcacgcctgaccgtactggcgtgaccaatgtgctggtggtttcctcctccgtggggatgttccactgggttcatcgcaacaccacgtacaacaggccaacagttcctcttcgctttgtacttgtggtatgcatttccagccttgagaaatggcttctctgttcttcctccacctgcaacttgcccaatcatggctctgcacgcacttggcaaaatcttcttcgatccagaaggaagcttaaccctttttatggtacaacaaacagatcaatcttgtaaattgctattcaagtcaagtaagacaatgatgttccagtaatatacttaggtttacgcataagataacaacagcacgcaacatgaagatataattatatactaataattggtttcccgaaattacctagtggtgttgctttcaggattgtgagcaattacgatggcgtaatcaccagaagccctagcgagagcaccacggtcaccgacatggagctcaacgttacagataacagctccctcagggattgatccaaggggaagaacgttaccgaccataagattagccttcttaccacagtagaggtattgtccggtgtacataccttcggcggctacgaacagttccttctgcttcatgtagcggaaaggatgacggaacgcgacacgagcgagaggagcaccacggcctgggtcgtggatgatttcggtcaccaatcctttgaggtaaccgtttcgctctccgtaatcgaggctccggaacttagctggacccttgcggtggtgggtgtgggacttgaaaacggaaccagccgcacctttacgctgtgccctaatcacacgacccatttctttaccgccacgtaatattcatcttcttcttggttgcatcccttatttataagcacaaaaaccctaaaatgttttgtcaaagaacagaaaccctacctaattcatagtcgtcggcttatggggccttcatgtaaccttctttgtaaatagactgcaggcccagttatgttagaaatactggcccagttatgttaacccaatgttatgtaaaagttttactttttattattgtgtcaaaaattcagattattctatacttatatttgcattttaattacgggtatgtataacaactaaaataaaaagagacagattctttaatagaaacgtaaattgtatgctgtcaaaatctcatatatcttagaaagtggacctctttatacgttacgttacaaattatatattttgctgacaagtgacagccgatgcaaaattgttgaactacattgttattccaattctatacaaccaatttaagaaatcaaaaaatatatttcgattgtatgtacagtttagagggctatacttttgctttgtgtttatcaccggtatagaagtaccggactatcaaagccattataataaatgatcaacttgcatgctgctgcctgcaatataagcatgaataatgcgttcattattttttatgtttaaaaagaatgagttagctgtttaatcatatgacaaaaaccaaaaacaaaagagtccagacagaataaaatctttgatagaaaacaaatagtcatgtagttggacttatgtggcggcggaggaagtccattttcatgcttatccgtcacacctgcgcatttacctgctttgtgtttactacactgtaagatgatcagaatttgatctcatctcctactagtttgtatcgtgattatgtttttctcagcatatataaaaacaagttcaaaactaaaagtatagtatttaaactttgacattcagatattgaaggcgccatgattatacgactcctaatattatcatttcatgtatcataagtactggttaacgataattaagatgttaaatattgatattttgatattgaaggcgccatgattatacgactcattaacattatcataattatatgctaattaatatgctgtatcgatgattttagatattagatcatcagttagtgtatattatatgtagagatagacagacacacatgcatgtgaagaaacgtggaacacaattgaagaaaggccatgaaaaacaaaagttgtacatatattcctcttatcatcatgtgaggaagcctcaaaaatataactacgatcctagctagtaagatgtgattgagtctaagagagtgagaaaggtgttttggtcacaaggaatggtgaggccgctctcttgcctaaacccaaactcttcctccgatttttgcagcatcatcttgaaggttggatggttgagggatgtgattgggatgacgtggcggtctctgaagtggcccacgtagacagcgaaatagcccttcttgggcacgtcttcttcgttgctcttcttcacgaagcttgaacatctcttcatcagcatctgctttagtgacgatgctcctcgtctttctctttgagtcttacttgcttcctttatctccattatgtatatttatgtactcttatatacaggtgaatgggtatggtgtcaatatgtttttgtttattttgactccgatggagagatatatatacagatcgagcaagtgatgactgaataatcatgtctttggaattaggaatattatttattttgttaaaaataatgatggattaaattggtctgacactaaacaatatcagatctatttatctattttgaatctaattaattaagcttgatgtcatcatattcattttttgtatcatatatactagttgcttgacatggcaaccacgtcaaaccgagacaacaatccctcataaatctgtctgaaaaagtccttttccgagggttttaccaacagacatcgcctgagaaaatacgatgttttcttatagtattatactagttaacagaattttaatttatttggaaatttgttagaatttgagatgtttccttgtagttttagtgttatacaaatattttggttatatattaattactttatttcaaattaataggacatatattagtgaagccatttggtttagtggctagtaaattattaagtggttttacatcatatattaattatgttcgattaattctagaaaatgtgaaagaatagtaataatggagacactgttatcagaaatttatagcatagtgcatgtaaagtcgtttctcgtgatttcgtatgttaaaaataattttgttatatgtaaacgtggtctacctagctagaactatctatcgtaaatttctgttagtcgtggaatcgttcgtaaaaaacattgtcatggtcgtaagatttttaaaagaaaaagaaaacacatacgaggtcataatttcactacgtgttaatccgaggtgacatgcatacagctttatataataaaactggtgcgtagcttaaaatggtttcaataataaattattacatgagtgggcctggccaaccaaggaagtaagaacaaacgacggcgcgaccggtcaccagtcagactataagaaaccgggctgtcaaaatcgttgtgactcaatttttgtttccaaaagaaaagaaaaaggtctaatcacgtggatcaaacttgtcgtccctttgatcaagtcaatgctctttcttcatatctcacaattgaatagtctcaagacgtctacgccacataaccatttttctcgttatctcgacatcaaaatttaataaaacaaccgattgataggatcatcaattcatcatgttaaaagtgtcaaatgagctaatccgttttatgtaattatctattttagtgcgaaacagtttacgatcaatttacaaattttcggatttacagtatagttaaaatagctataaattatctacaactcataaaaccttctatatatttctaaactagaagaaggctcgcccgtaaggcggagtttgttttttaaataaattttgtattcattattttaattatttaattgtgttatcgataaattttaagtatataaagtgattgttttattgtgttttgttttcaaatttttaacttgattaatgtattacatgagtttgttctttatattaaataatttatattttatccaagattatataactttataacaaactacagatatacattttaaaactaactattagaaaaatacaatgtcttattaaataaaactaactaatagaaaaatacattattttactaaatatggtaaagtagcacttttttaattggttagtaggagagaccatttttatttgtatatactgtaaatcttgtttatttccatctaaaatattatcctttttgttgtttataatagttttttgctctctgcgtagcattaagtggtagagaggtgaataagactagaagaacggtcaatggtgtcgatcacaaagatttctttcgcgatggaaaagttggtgactggaagaatcatctgagtgtgactcttgaaacggagaacaaaattgatatgaccatcaaggagaaatttcaagggtcaggaactcaggattgaaattttgagttaaatatgtatgttggtttgtgtgctttctttcatgctttgaaataaatgtacctttcgttgtgccgttgttatgttcctattattaatggttctagtttgaatcgagtgagtgtcattggggggttttgtttcaaacggttactttgactataatatttgtatcaaactgttcggaatatttggatagaaacatttattaggatccgttcgggtttaataactaatcgattcggtttcagaatcggacactttttatttggttccggttcggtttccaggttttgcattttatgcgcaaacctagtaggagtagtggtccacgcaagaagagaagagggaaggtgttcgagtcatttcacatattaattaatggctcttactcttactcttagtatctatctctttttgtcattcttcttctagtcgtctccttaatagtattggttaaaatatttgttttgattataagtaaatttgaactagttaacatataatcatcatgcaatatatattgcttgtatttcacaaactctcgttttctgtatataatcaaaatttaatagtttatccaaacaagactttgtgataagcacttgtttagtaatttgtaacaagatctaatttgaatgaatctccgtattaagaacaattaattcagggatattatttcttaacttgtaaggcacgcatgagtactgaacacgagatgaggatctctaaagtggtggtttaactagaccggtttcttgcaaagagccaagcagccaatggaaccaatggcttcatcttcttcgtctgcttcttaaccataacttggttcttctcctctttgcccacaatgaccttcgttaacaatggtgggttagcaaacttcaccgaacgcctcttctctagacgatcaccatacacttcatttcgatcaaaccggttcatcttgatctcggttatgttgtccggttcgttaaccgtggattcctctataaacttgaggtcatcttcgacttgagggtgttctgggaaatttctgagtgagtgattaagcttttctttagtggtttcaagctcttgtgtaaggctttcgataagctgagacaaaaccttgttctcttcctcagctttcttcagattctcctttgcttcaaccagctcatcttgaatgcttttgcaactgcttctctaatcacacggtccaaaatcattgcaagaaagttaatatatagttcatatatacacatatgttacgattgatatatgcatttgatatatatatatatatataaacaacctctacggacttgctgatgtaattatctccgagaagaattctctcgccgaaaagagtaacagcctctttaacagaacggaaaggagctccggtttcgatctcggcccgaaccatgatcaagagatgtttgttgctttagttatatgagttggtccatgtcatgacgaaccctcagctttttataaagaaagaacacatatgtttcatgaaagattgcaactgttggttgttgtcacttaaacggatggtgactagattactgactaagatgaaactaaccacgttatgatgattaaatcaatttcaacatatacattgcttagatttttttgctattttttaaacaaacttcattttcatataaataaaacatttataaattggtcttacaaaactaatagtataaatcataatcaagaagatctagttccatagttgatacattactatgtgatggttccaccatattatataatcatttattttaaaatgtaacacattgccgacggaaaattccactaaatgacaaaaatgatgagaagttgttaagtttttcgtggtgcttgttttttagtattgcaaaattagaatttaggaacaagatatagttgaaaatgtcttggcgtttacttcacactaaagaacaagtttgggtaaatatagaacaagtagaaaggttcgttggaacgtccttttgttttctcatgtgttctgttagttttaccaccaaattttattagacaacgacctctctcctatttaaatgggcctttttaggcctgaaaaacacagatcactatctcgtgaccaatattacaaagcaaagcccaataaagattcttattcttcttgagtagcaaacctaaaatgctttcctctcggagttggaatccctttcaaatgcaacacttctttagcctctacgatctcatcgtcttcactgttgtaaagaaatctgttatgtttccctgcaaattcagcttgattcgtctctacattcatcttcttcattccttcacacaacccatcaacctcctcttcttcttcttcttcttcttcttcttcctcataaagctgacttgtcggtgaagtcaaacagtaaagaacgagttatgctcatactcttgtcttctttctcttcagatatctgagaggttctcaagtttccagcaacaatcggagatgcgatcttaatcttgacatcatcatctgaaaagtttggaaattggggagtatttgctggagttggagcgagaagtctcattggagaagtgaccagatggataaaaggacgagtctttattgaatggataagctctgttccttcttcaaccttgtgtaaaagggttttgacttgtcctctcaaaagggcttcaccagatccaggcgtgatcttgattctgctgctttttctcttaaccatgaaccctgaaggaggtgtctgcatcgttagacccacgatcggtgagtcgttggttatgtcgattagtgcagacctgtcttcttcttttctttggtcgatgctcgaatcctctgttttgtctgagccaaaaagcaaagaaaaggattaggttcagaaagatcgagtctatctatgttacttataaataactaattactctgcagatgctttaaggctaaagaaactacaagaacctaaaaaagaagatgggaaagacaaacatacttgatgatgaaaagggaactttgaagtcagaatcagagtcgttgattgcagagatagcctgtgatctagtgacccttttggctgatgatggagtctccatttgaatttcgagttcttgtaaacaacaacgaaaactgaactgaaagagaatttgggaaaaaacaaagtgtgaatgaagctcgtttaggtcgcagtcttataacgttttataactaaactagccgttgtggctcctctcttgcaaagtggaagatgagccgttgccgttaccgttccgttagtaaacccacgaattatttttcttccaaaactagccgttggatccgttctctcatggaaaaagtagacgtctttgttctgtatgggcctttgactaactaaatggcccagcccgttcataacattaatcatttaaaaaatcacattgatggtataacactaattttttttttcacaggtgtataaccaactaatataaatatgcacattcacttaaaattaactaatatcataaagagtattatggcgtctgttttattgtttatccataactacatcaatcaaatccaagttgatatactagttagaacctaatactttacaaatccgatcattaatttatcttgtctgcttaagattttttttttgtgaataaggtttaattatctcatcaatacgatttagtaaaaagtctgtgcaaaaattaatgacgattgggatttttgtaacgcaagcccgtaccagaacatgtctccgccacgtgatttctccacagaccacaagcatttttaagacgtggctttctatcaaccgttaaaaacgtaaatcatattaaccatgtgtctactacctacggtgtaaacgaaactgtataacgtccctatcatataatagtaatgtgatacgttggaatgtagccaaaaagcataaaaaataaatagataattaagtttataatgttttcctacaaaatattattataccgtatgtattttttattttattttctgaagttaaaaacagatgtagttagttgagtaaattgtgttctagaaagagaagagagagcagtagtaccgtggtaggtagctagcgacctcttcgttcgtcagtcatcacaagctttgaaagattttcagctaccactctctcctttatatattcattacacatctcttctttctatatctctcttaatttagtcttttgtcttcgtaattacaatggctccaggaactttgactgagctagccggagagtctaagctcaactctaaatttgtcagggacgaagatgaacggcccaaagtcgcttacaatgtgtttagcgacgaaatcccggtgatctctctcgccggtatcgatgacgtcgatggaaaaagaggagagatctgccgtcagatcgttgaggcttgtgagaattggggcatcttccaagtggtcgatcacggcgtcgatactaacttagtggcggatatgactcgtctcgctcgtgacttctttgctttacctccggaagacaagctccgtttcgacatgtccggtggtaaaaaaggaggattcatcgtctctagtcacctccaggtaaaagccacaccacaatcttctaggttaaatacgtaattatgttttaatcttgccgttaaagacataataattatactataaatacagggagaggctgtgcaagattggagagagattgtaacgtatttctcgtacccggtgagaaacagagactactcacggtggccagataagccggaaggttgggtgaaagtgacggaggagtatagtgagaggcttatgagtttggcttgtaagcttcttgaggttttgtctgaagctatgggtcttgagaaagagtctcttaccaatgcatgcgtcgatatggaccaaaagattgttgttaattattacccaaaatgccctcagcctgatctcaccctcggactcaagcgtcacactgaccctggaaccattaccttgctgctacaagaccaagtcggtggattacaagccacacgtgacaatggcaagacatggattacggttcagcctgttgaaggagcgtttgtcgtcaatctcggcgaccacggccatgttagtactctatccatttattggcttttttgtttctctgtttttggttttgacttggtcaatcttgatttgtcttgatgaagtttttgagcaatgggaggttcaagaatgctgatcatcaggccgtggtgaactctaactcgagcagattatccatagccacgttccagaaccccgcgccggatgccacagtgtatccactgaaagtaagagaaggagagaaggcaatattggaggagccaatcacgtttgccgagatgtataagagaaagatgggaagagatttggagcttgctcgcctcaagaagctggctaaagaggagcgtgaccacaaagaagttgacaagcctgtcgaccaaatcttcgcttagaatctttgtgttcttgcttacttgttgttgcgttggttctgttttgtacgttggtactgaaaattatgctaggctcggtgtgttttgtgtttatttatgttctttcgaatcataaagaaataatgataattgatgcacttgtctatgacaaaaacatcatactccacctgtatttgacgcgttgggtttatgtcaaaaagcattaatacttcaactcctctctattcagtggcatacatacattgttggtaactgtcattgtctaaacactttgtactactaatcaattttttttgttcttcctacttctcctttatgatttcttcgattgttattcttttatgttgaagcgttaaaccgaaacacataccttggcagtttagtgacgaattttagcaccaagaaaatcgacacagagatcgggtagagatcacaaatggaaatcaaccaccgttcaagtgtcaatggtcacaaagttatacattatgtcttctcttcaatcattcttttatagacaaaggaaaagaaaccataaagaaaaacatgattttggtgtctattgagaaataacttcctcaaaactaaaccagtttggtatcctgccaaatcataagcgcaaaccaaccataaaccaacataatgtacatattaagtttgctcagagtacagggtttcttgatgagatacacttgtcaaaccaccgtatacaccatctggcaagagaggatcacataaggtgtcataatgaagctccgaaatctgcaggcattctaacataatggatcgacaagcaaatgcgaaacaagatcaccaccattgaaagacaaaagggtgggcgatatgaagctagctttcaaagctgactccaaagtcagatttaattctctaagttttcattataatctctgctcttgatttatttttctatagaacacacgatgtactagttgtaaaaacgttattttttttttttgaatctaatttagtattacttattaaaaaaaaaaaaaagattcacaccggttcatctatatgatgaattgtaatggacttgtattttttccaagcacttcactctatttcgtggaatcaaaacttttgcaacaacggcttatgctagtctcacatgatgcgttttacacactctagatagattgacctcgcattagatcggaattctagtgatgccctctactaacatataattgatatcaatcaccatccataatcttatttggttttagatctcttgcaacactagctctttcttcctatcacaataggcttttcatttgggcatttgcaacttttttttatatttttcatgattatgaaaaccttaatagagtagaaaaggtggtaaatagatatttatgcgtgtggattcaaattgcgtattgcattaacgatatcgacaattttattggttaaaccggcgggagtacacttttatttatagtctatttttacgccacgtcatctctaccttgaaaaattgaaattcatcatttttcttcctccttaagattttttttttttcttttctaattaacgacaacacgacgaagatgaatccttctcacggtggcgacgacaagcaacgaccggcgatgtatccccaagttgatcaatccattcctgataatccttttgcttctacaaatccttacgtcgcttcttcaccttatctatatccttctctatcctctcataatctcggacctaatctcttcccagaccacggagatgcatccaacgaccaatcaccatctgctcctcctcaggcgacggaggaggttctcatccgtgttcccggcgctattctcaaccttatcgacaaatcctacagcgttgaactcgcgtgcggtgatttcaccatcgttcgaattatccaggggcaaaacattgtagcggttctagccaatgttggaaatgagattcaatggccgttgacgaagaacgaggttgcagctaaggttgatggatctcactatttcttttcgattcatccgccaaaggagaaaggtcaaggatctgggtctgattcagatgatgaacaagggcaaaagagtaaatcgaaatcggatgatgagattcttaattacggattgaccattgcttcgaaagggcaagagaatgtattacttgtgcttgatcaggttttacgagactacagttgtttcacagagcagagaatgtctgaaaaagccaaggagactggagaagaggtgctgggaaattcagtggtggcggacacttcgccggaggagcttaagggtgagagaaaggatgttgtggaaggtcaatgtgcggcgtattggacaacacttgcaccgaatgtcgaggattatactcacagtactgctaaaatgatagcttccgggtcaggtaagctgatcagagggatactgtggtgtggggatgtaactgtggagagactcaagaagggaaacgaggttatgaagaataggcttagtcgtgctgagaaggagaaagatgttagccctgagacactgaggagaatcaagaggtatggttatacttaggaattttgcatctttgaccttgaaaataactgcttaggaatctagtagggattctcttatctggttccttgtttcatgatcattagagaactgagtagtaagggatgattattgtttgcagaagaccaattctatgagcagtgatgaaatttcttgtttaaaaatgtttgaacattgtgcattctcatggtagtatatcttgaatgaaatcaatttttatgcctttgcttatctccctcatgtggtttctatctaaagggttaagagagtgacacaaatgacagagaaagttgccactggtgttctttctggtgttgtcaaagtctcgggattcatcactggttcaatggcaaactcaaaagctggaaagaagctttttggtctcttgcctggagagattgttctcgcatccctcgatggatttagtaagtagattacttgtttttggtttctcatatttcctatcccatgcttggagggtcataaaagcttcttgattcacgagttgccttgctttctttcatctcacttgaatacatgttttgacatgaccagcattacaattattgtttatccgactttccctctgatggccattcccataatttttccaatttttcgaatatgacatttagcagaagttccttgatatagtgtattagtgcttggatctgcttcttgcattgaacaagttagtctggtggactttggagcattattctttttgtgggtttttaatttcaaagttaccaaatgttttgtaatcgctggcttcccttatataccgaacccttttttgtttaaggcacatgggattagtacccttcttttcatgtttacttcttgttgcaggcaagatctgtgatgctgttgaagttgctgggaaaaacgtaatgtcgacttcatcaactgtcacaacagaattagtcaatcacaggtattgattagcaaaggcatatataaacaatcacatatctccgcatgagtgatcttcagcaagagtgatcaaagtttccttagatcttaaagaaacctcatggattctgtttcgaaattacaggtacggcacaaaagcagcagaggctactaacgaagggctagacgcagcgggacatgcatttggaacggcatgggttgctttcaagattcgaaaggcatttaaccccaaaaatgtcataaagccttcatcattggccaagtctgtttcggaactaaaggctaagaaaggctccaagtaaacactaaacagccttcaactgttctgtgttcatctaaacttgcatttagtttttcattttggaaaagtatatgaagattgattgatgtaactctatatttagttttctgtgtatattgtgattctatgtaaactatataaacagtttcttccaatcttctcccatttatgggtttgatttgtaacttcttaatgcatcgagaagcagtattagtactctttatctttcttttgtactgctatttcttaccgctaactctcatctctggtgacttatcctgccttcgtttaccttttttagtgtttgcttagaaacactaattgcacctatgttatgtattctaccagattaatttgacaaaaaacaatgttaggagttttaatgttttgaagaagtgggccagatgtttggagttttaggccaatgtagctcatcttgggcccagtacagaaataaatccagtgatgattctttctgattggctggaaggtgtgtgtacgtgaacctgtccgcaggtgattaaaacagagctgggcttttggcttgtcgcctaagtcgggaatcgtttactgtgaaataaaaacgagagagagtttttgaagaagaagaaagaacactcacaagatccagaaaaaggtaaaagatggcgagatacgatcgagcaatcactgtattctcccccgatggtcacctcttccaagtagagtatgccctagaagccgtccgaaagggtaacgccgccgtcggagtccgcggcacagatactgtcgtcctcgccgtcgaaaagaaatccacccctaagctccaggattccaggtattgctccgatctctaccgatacaagatgcttaaaccggatttagtccatttacttttgtttctgcactttgattttggttttaagcttcacctggatagctcgcttgatttactcaattgctacttgtatgatcactgtttcaatccttctgaactaaatcctgatgttgggattttgtatcacttcgtaattgcgaatctagtattgttagatcgtagaatctgagctgaaccctagtttaagtctttttctctacgagtgtacaattacagttcctgtatctcagacgtgtttttttgtataagaacacgtttttggttatactctgcaaattgatcattcactgcgtaaaaatataattttggtgttgaacttgctgaaatctaagcaatatcgtcttcgtatctgttggctgagctcttgctccaatagatctgagtttttttacctattgttatccgtatataggatctggttggtgttccttcccaatcatatgagttttgataatttttttgcttctcagatcagcaaggaagatagtgagccttgataatcacattgcattggcctgtgctggactgaaagcagatgctcgtgtcttgataaacaaggcgaggatagagtgtcaaagccacaggcttacgttggaggacccagttactgttgagtacattactcggtacatagcagggcttcaacagaagtatactcaaagtggtggtgtgaggccttttggtctttccactcttattgttgggtttgatccctacactcgtatacccgcgctttatcagaccgatccatctggtacattctctgcttggaaagctaatgcaactgggagaaactctaactcaattagggagtttctggagaaaaactacaaagaaagcgctggccaagaaactgttaagcttgctatccgtgctctgcttgaggttagtttgctctatcatgttctataactaaaccttgtagttttcttttgagctattgtcggggtgccctgttagtgaatgttctataactaaacctagtagttttagttgacaatgagatctgacctattaattattttgctgcgtgacccggtgattttgtgagcaacatgccaaactttgaacctcattatgattcttcattatttataggtgtggctttaggttaaaagtgaatgttagagaatgttaaagtttttgaaaatgtagaagaccttactaattgagttggattataatgttagatgagcttacttagcaaacgcacaagtagtggtggaacttgtaaagaagctgaaaaggatttgcattttgcaggttgttgagagtgggggaaagaacattgaggttgctgtaatgacacgagaggaaggtgttctgaagcaactagaagaagaagaaattgatatcattgtggctgagatcgaagcagagaaggctgcagctgaagcagccaagaaaggccctgcgaaggaaacatgaaccagatcttaaagtagcggtctcagattatgagttgtaatgctggttcaaagtcagggatattcaagggttgaatagaaaatctagaccgcatgaaatggtttgttggattactagcctatttgacactgttgctttaaatcttaaatgacattttagcggagtttcgatacttgtcagttggaactatggcatgttcagtattctagatgactttgcatttgcgctcaagagttgtagattttgattttggaaacgttgtttcttactaaacatgtctctcttcttattatctccattgtgtaacttaccgtttttaccatctttgtacctccattaacttgttcaccaacgaataacatgaagagaacaacattacaaagtggaactgacataaactatgatcaccaaagtccataagactgccagcaaccctgaagatagttagttgtagtttgctgaaccacaatggttttgaatcaaacgaaattccattaccagacaacaagatgctagccctttcttctctttagctttgtgtgtcaccattgagacgattacctcaaatgacgtaaaggtatccccaataaggcaataacgtaaaggtaacgttaatgatgttaaaaatcttgaaaaacaaaaaagacgccgttgccggggatcgaacccgggtcacccgcgtgacaggcgggaatacttaccactatactacaacgacctcgttgttaggatatcaaataacatggtattaatacaatagtatacaaagatttttctaaaagagagttgaatcttgtgtctaaaggattttcgagttcacaaaaagaatttcctcgctctaccgccgccgtctctcttctctcaggtaagctacttcagtttctctgataaacctattttgctctgttcttgtccgaaactttaccgtatctagtcgatatctagtttaggtgagttatctgttaaaagtttttacctttgagtggtattgtcggtttgtcgtctagggttgcattcaatatcacagcaatttgagaaattgatattttattcagcaaggttgaatcatcagagaagaaagggttttacactgcggcgtaaaggatgaagcttgacgtgaatgtgttgagatatttatccaaagatgattttcgagttctcactgctgtcgagatgggaatgcgaaacgtcagtgctcctctctaatcgcttttttttttttaaattctggaattgacatttagggttttaaccttttgttttactttttttttctgaaaatcctctgattttttggtttttgcagcatgagattgttccttctgagcttgtggagcgcattgcttgtctaaagtatgccccggtctttgatgctttggatgttttccttctttattaagcttatttcttcattttgtataatctacatacctcttatattcacagacatggaggcacctacaaggtcctgaagaacttgctcaagtataagcttttgcaccacgattcctctaaatgtgaggaattatctctataggcattagtaacttttcttgatatgtcttttgaggattggaagtcttgttaagttgcagaatcttatcgctattgcgttctttgtttatatctgtctagatgatggattccgactcacctatctgggttatgactttcttgccattaaaacattggtcaaccggggtatatttaccggtgtcggtcgtcagattggtgttggtaaagagtcaggtatgttgttttcctatttatttttattttatcggtgtcgaagagatgcgtgttggtggctgatgtatcttatttatttgttctttgcatataatagacatatttgaggtcgctcaggaagatggaactattctagcaatgaagttacatagactagggagaacctcctttagggctgtcaaatctaagcgtgactacttgaggcatcgcagtagtttcagctggttgtatctctcccgacttgcagctctcaaggagtttgcttttatgaaggttattgccttcttccactaatgtaacactattcttgtgggtgtatcatctttttattttatttttggcctaatgtttgtttggcttctgggtgagcaggctttggaagaacatgactttccggttccaaaagctattgactgcaatagacattgtgttatcatgtcccttgtgcaaggttaccccatgtaaggacctaactacatatttacacaaagaaaagtggttatgatttatgatgtttgtcatcatctactgatatgttgtggtcggatattgattttaagctaagataatcattggatttttgagtttctaagaaagctaaaccatttgcttcactcactcactaagaaacagttacaccctttctgctgtgaatcacatcttttcacatttttcatttatgcagggttcaggtgaagcaattacagaaccctgagacaattttcgagaagatcattggtattgttgttcgtttggctgagcatggtctaattcattgtgacttcaatgaattcaacatcatggtgagatacttagatctatctagttgaattataccttctatttgtaagttactttgctgaaaatatcatgcatttatttgaagctgccttctcatataagttaattaatacttctgtaagcatgctagttttgtcctctgcctacttacaattttcattgacacatcctgtttatgtatgcatgtatgttatagattgatgatgaagagaaaataacgatgattgattttccacaaatggtatctgtttcacaccgaaatgcacaaatgtatgtgacctctcatctctgcaccatgcctcagtactttcttccaaatttctataaaatattcttggtttgttaatgaattttgtctctcaggtactttgaccgtgatatcgaatgcatcttcaagtttttcagaaaaaggtgatttaccaatttgattttctttttaatatatacatcatttgttcacaatacctagtagaaaataatctctcagtcgctgaatccatgtcatgaatgaccctgaaattctcatttttctttgaactctggtcctttcttacaggtttaatatgtctttccatgaagataaaggtgaatcagaggagacggaggtggatgagaacagcagaccatcttttttcgatattactaaagatgctaatgctctggataaagatctagaagctagtgggttcacaagaaaggagcagactgacctcgataaagtatgtgagcctatgaccttagttataacactgcttatcaatcttcaatcaaccgtttcttggtattgcgtatatattttgaatcttaggcagactaatttgcagcactggtctctgtgtggttttgtttcctcattctctctggtatatagaatgaacatatggtttctgtcttttatagtttattgaaggtggggtggagaagagtgaagattctgatgaggatgaggaatctgatgatgaagagcagacttgtgaatcaaacgaagaaggaaacctaaatgaaataaaatcattacagttgcaagacaaggtataaaactttccaattcatcatacaactgaaacatgtaccaagtaaagatgtcctctacttacagtatatgcttttggcatgatgtaggagcaaaaaagttcagatggtgttgaggcagaagttgagttggataataccgagaacggtgaaagcaatggagatgaagatgaagtcggaagtaatgaggttagtatcttgtgtgtgagtaactcggagagtgaagtaatgaaatcacttacaaaaatgagttttgctacttcctttgtacaggaggaggaagagaaagaggcagagctggagaaaaatttgggcaaggtaagacgcagagccatggcagcagccaggggacgtagaaagtcacagtcttcaagaaacacatacaaggacaaaggacgcggatcccaaaactccaagatccacagcaacatgagcggcttttgatactccaactgtgggcttgaatgggccgtataatgatgtaaacgggcccataatctttttctagtgactttttctcgaatcgttgagttttccaaattgaacaccaaccaatgtactgagacagagaaattaaattataacggatatgtttcttaataaatcaaatctcaaatgttattttgtccaaattttgtttgatgtagttttagcggggctaaactgaaaacacatgaaagtcaaaggagtagatgcgaaacgctcccccagtaattagcggaaatagaaaataatggaacgcaacggctagtgatctcaacggtcgaaaatttaaacttttttataataattgacagacctctctcttttgttaaaatcctaaccttgttctcacattaatcctccgccgagattccttttgtcttcttcttcttcatcttctccatttcaattacaaagatgatgagagatgttttcaggccgactaaatcagccccttgttctcctgcaaagccacttggtatctctcgcactcaatctgaatcatttcatgctattcacaaagttcctgtcggagacagtccttatgtcagagcaaagaatgttcaggtgatttgattatatcccttctatagatctgaatttgtgtttgatttgatttttgttctgtctctgattgttgttttatggatcagttagtggagaaggatccagagagagcaattcctctgttttggaaggctattaatgctggagatagagtggacagtgctttgaaagacatggctattgtgatgaagcaacaaaaccgcgctgaagaagccattgaagctattaaatcactcagagttagatgttcagatcaagctcaggaatctctcgacaatatcctcttagatctctacaaggtccgtcctttatacataaccctgtttcctctgtttcgtttttgcatttggtttgattctgtattgaaatggatttgttactgcagagatgtgggagattagatgaccagattggacttttgaaacataagctcttcttgatacagaaaggactcgctttcaatggtaaacgaaccaaaacagctagatctcaaggcaagaagtttcaagtctctgtggagcaagaagctactcggttactggtaagcagcaatttcaaaatgtgcattatgtttagcaattaccaagtttgtgttaattcttaattggatgatgattggtttgaaacagggaaacttgggatgggctctgatgcaacgagacaactttgtggaagctgaagatgcatacagaagagctttatcaatagcaccagacaacaacaaaatgtgtaaccttggtatctgccttatgaagcaaggaaggatcgatgaggccaaagagactttacgacgtgtgaaacccgcggttgttgatggccctagaggcgtggattcacatctaaaagcttacgagagagcgcaacagatgctgaatgatcttggatctgagatgatgagaagaggaggagatgataaggttgaacaaagaaggctctttgatgcaatctttggatcttcctctatatggcaacctcagccttgtagtgagcagactgtgaaggctaaaccaaagcctggtttaagcaatggtgatggatacggtgatgagaacgtgaagatgagtgtgaatccagtagtagtaaacccattaagggttgatgcaaaaccgttcttctcttcgaagttggtcatcagtaacaacgagaagctgaagagaacgagatcgtcgagccaagggatggggatgttgagtggtattggtggtgatcatgagggagagacaaacacaagcacgagaaggagattgtcaatggagaagaaagcaacggagtgtggattaccagacaataaagactttgaagatgcgatcatggctgctgttttaggaacagaaaccaaagtggacaagaagaggctcaaggtgttccaggatatcactttgtgtctcaatcagagtctctaaccactcttatcattttatcattctaatttataatttagtcaaggaatcaaaaaaggagatgagcttaattcttcttggtaattttattaatgtttttgtcagctttaagttgctgccatttttttcacaattattgtcttcattgaccagtaataaaagctgaagttattattttccttgccattctacaaatatagttattgatcaagaatagtgttgtaaaatgttactaaaatctaatgagatagagagaaacaaagaagatgaagatgacatgagtggttaccatgaatatcccattaattaatccatcagaatcttatttactgcgttaccattaatcagatggttgctcttactctttttattcaccactcactcaacttttgtggtcaagtttgtagcaaattaggggtaattagtatccattaaaccaatcatttgtatctatcaatttggactcttctgcttccaatttgtagtaacgcttacccacacttttaattcggccaaaatacatccgttgaaattgtataaagttccggaagtgcccctcttattttattaaccatggcaaatgaaacggtgtaaaaacttgtttttttcccacttaatctctctctatttgaaagttatgcatttttggtatccgcattaactcgagtcttttaaactttgactgtcagaaaaaggcaaaaaaggtaaatttgttttgataattccatggtacattttgtaatagaattgagaaataaaggatattttagtcaaatggactgttttggtttttggaagaaaagaaaaaagaagagatttaattggaggaaagggctctctgaccaaagcttaaggagagtgtgaggttaaactgaaaaaagaagaatcccaaattccaactacattcctcagggaagccaaagtggccttcacaatcctaaagttaaaactcttgagtgttttttttcagatcaagacaaagtttagatcttttctttttggtttaattgttttgacacaaacgaggtaagcacaagcagaagaagaagaagatagagtttgagttcaaattagatttgttgagaagaaaaagagtgatttttgttttctgatgcatggtgaagaagaagaagaagaatagtgagtgagagaaaaagagtgattttttcatttttcagacagagagtgagtacttgaagaaatgggttgttgtcagtcaagaatagatagcaaagagatagtgtctcgttgtaaagcaaggaagagatacttgaaacatcttgttaaagctagacaaactctctctgtttctcacgcgctttatctccgttctctacgcgccgttggctcttcccttgttcacttctcttccaaagagactcctcttcacctccaccacaaccctccgtctccttctcctcctcctccaccgccgccgcgccctcctcctcctcctctaagccctggctctgaaaccaccacatggaccaccaccactacttcctctgttcttcctcctcctccgccgccaccacctcctcctcctccgccttcttctacatgggacttctgggatccgtttataccgccgcctccttcttcctctgaggaagaatgggaggaagagacaaccaccgcgacaagaaccgcaacaggaactggctctgatgctgctgtgacgacggctccgacgacagctactcctcaagcttcgtctgttgtgagtggattctctaaagatacaatgacgacgacgacgactggaagtgagctagcagttgtggtgtcgaggaatggtaaagatctaatggagattattaaagaagtcgatgaatatttccttaaagctgcagattctggtgcacctctctcttctctccttgaaatctcaacctctatcactgacttttctggtcattccaaatcaggtaacaacaatcaagctcttgtcttctcttctttgattgattttgattagtgttttgtgtttgtttcttcagggaaaatgtacagtagtagtaactacgaatgtaatctgaatccgacgtcgttttggacaaggggatttgctccttctaagttgagtgaatacagaaacgcaggaggagtaattggaggaaattgcattgttggtagccattcatctacagtggacagactctatgcttgggagaagaaactttatcaagaggtcaaggtattcactttttgacttcatttcattcataaagttgcaatctttgaacaaaacaattaatctttgatgtatcttcatatgttaagttttgtggaaagagtttgaaaatgttgtttatattcagtttgaagtttgaatattgaaattgcttgcttagatttcatccaaatatggataaatgttttgtttttgggaatttggttgattcatgtgggcattaaaggcttgtggtgggtccaagcgtgagcagatagtgtaagagacccacgtgtgtacttaattctgatgaataatgtgttatgtacactggcacaaatatcttgccaagtagtgagtgagtgtttgttgttttttgaatgtgggttttgttgcagtatgcagagagcataaagatggatcatgagaagaaagtggagcaagtgaggaggcttgagatgaagagagctgagtatgtcaagactgagaaggctaagaaagacgtcgagaagttagaatctcagctctcagtatcttcacaagccatccaaagcgcctctaacgagatcatcaagctcagagagaccgagctttaccctcagcttgtcgagcttgttaaagggtttgttttgtgcattcccattgcttcattaacctaaagtatcttatgttggtcaatgtgaacaaggttcttgtatgaatgtaatgtaggctaatgtgtatgtggaggagtatgtacgagagccaccaggttcaaacccatattgtgcagcagcttaagtaccttaacaccatcccctccactgaaccaacatctgagcttcaccgacaatcaactcttcagcttgagctcgaggtccaacaatggcatcactctttctgcaacttggtcaaggcccaacgtgactacatacaatctctcacgggctggctcaggttaagtctgttccagttcagcaagaatccacttgttaggagtagctacgagtcaaagatctacagcttctgcgaggaatggcatttagctattgacaggatccctgataaagtagcatctgaagggatcaaaagctttctgacagcagtccatggaattgtggctcaacaagccgacgagcataagcaaaagaagagaacagaatccatgttaaaagatttcgagaagaaatcggcttcgctgagagcgcttgagagcaagtatagtccatactcggtacctgagagtaggaaaaagaacccggtgatagagaagagagtaaaggttgagatgctaaaaggaaaagcagaagaagagaaaagtaagcatgagaagtcagtgagtgtgactagagccatgactctaaataacttgcagatgggtttccctcatgtctttcaggcaatggttgggttttcaagtgtgtgtatgcaagcctttgagtctgtgtacaaccaagctaagagcatcggtgaggatcaagaggaggttaagaggttgcttccttaaagagagaaagacaaattgttttaccatttgctctctgtttttgcttgatccaagctaatcttttggttgaatgttaggttgagtttatgctgttttcgaaatgaaattggttaaatgacttttcattgaatcactgcttgaaacttcatcaattcaactacttcttagccaagtcaaatcattggaaggtgacctaccaaggtattattaacattggagaagtgttagttagttagttagtgaggtagttaaggggattgcttaaagaagtaagcaagtttaatgataatcaaacactcgtgatgtgtacgtaacagaagaaaagagagatgattcgtttgagcggcagaaaaagacaagtgcctaatttgatttcccataaataaacacacaatcgattggtaattttgattagttgggagctattaaaagaggaaatccacaataatcggaaatagaaagacaagtttggttagcggaacgtttcaacgccatttttcccggccaaagctaactctaactaactctttgttttttttcggtttttgtgccatcttccagttttcattttttttgtttcccctctatctttttgggtaatagggtttctaatctctgggacaaactccaatcgtttcgaatccgcaatgcccagatggtcgatcaatagaaatatcaagagtctccaattccaaaggctaaatctttgagatctttttttttataaatttccctgaaattaataaactttgaggggaaatgagcgcttcgaggttcgtaaagtgcgtgacggttggtgatggagctgtcggaaaaacttgtttgttgatttcttacacaagcaacactttccctacggttatgtcccaattattctttcatgtttcttgtttcattaccacaacaacaacatatctcatgtttcttgtttcttttgtggatatacaggattatgtgcctaccgttttcgataatttcagtgccaatgttgtggttaatggaagcactgtgaatcttggattgtgggacactgcaggtttttcattttcctatatatcttggtgtttgaaatttggaatatggtttttggatctgaagattttgaaaatttgggtatgaataaacagggcaagaggattacaatagattaagaccactgagttaccgtggagcagatgttttcattttggccttctctcttatcagtaaagccagttatgaaaacgtctccaaaaaggttttaaaaatccatcaatcttgtttcatattattgagttttcgtcacattttttgaactcttgtcacaaattgtgtttgcagtggatcccggagttgaaacattacgcgcctggtgtccccatcgtccttgttggaacaaagcttggtgagttttccattgttttttcctgatctcgctccttttactttattagttgtgactgagtttgtgtttttgctctccagatcttcgagatgataaacagttctttatcgaccatcctggtgctgttccgattactactgctcagggagaggagctgaggaagcaaataggagcacctacttacatcgaatgcagttccaaaactcaagaggtacgtagattagtatatatacccttgttgcagatttctaatgttaatgttaatgctaatgttgatgatgtgagagtgcagaatgtgaaggcggtgtttgacgcagccatccgagtggtgttgcaaccgccaaagcagaagaagaagaagagcaaagcgcagaaggcatgctccattctatgatgattggaaatctctgtttttatgtatttggttttggtatattaatcttctaacaatgaatgaatcaatgtgttaatggacagacacccaagtttgactggtcctttttgttcttaatattaatggagtttgtcggaatcaacgtttcttttgcttctacgattcagtcctatgcataattccacacaaacaccacatgttttgaatcagttttcattcccaccatttcttcagctgaccatattttgtatgttactgttttaaactttgcaaacatgtttattggtagagagtgtaactaggaaatgaaaagtaatgatacaagttttatttctcaagattactcttcatgcttctgcaacaagacgagaagccattgattattgatgatttgcctaacagaatgcaagaaataaattcattcaaaccattccattttgattttctcgtatttctcattcatgccaccatcttcttgctgtctctgaaactcgatgtaacgtagagtactatttatgaatggctctgcgcctgactcaaccttctttgtctcgcttttgattaattcagctaagctcttgattgtatcgcctgttacttgttggtttcctttctccaggaagtagagatacctgcatttgactcgtaaaaccattaagagaaagcagtgacaactgggaaagtactcgattgcaagcattttgcagcgtaggtagtaggtactaaatagatgcaacttaaagagaaacttacttgttcagcagttcgacatatagagacaccgacccagtgctactggtaccacgggatgcgttggccatttgttgaacagcatctgcaatcctttgtgccctcttcaggcaaagcacaaccctggtatcccaaaaacccccaacaaactctcaatatgcctcaatttttctccccttattagttgcgtacagctaccaatcttaactttgagatttagtatgttaagagtatacattcatatgtgtacatacctctctccatctttcaggttctcgcattcgtcagcccagaagagatgcgcacattcataaacagctctacactgatctggcttccttaggagtcttgcagaatactacaacaacataatttagccttgttagtattcagtgtagcacacacttactcaactggtttgtcaggaaagatacccctgtcgccttgtgagtcagagtatctctgttctcaacattaaatacacgcatcctctggagtgtccctattattaaacgtagtgctgttacttgtgcctttgaatcctaaaacacccaaaatttatagccacgtcaaggtctttcttgcagaaagttgcatgtagcctcctaagaaattcacttactgaaatttcttcttcatacagaagatatgcctttgtgaagaactcataagcaactgtttctaactcacagttatttgctgcctaaagattcaataaaagaaaatttcagctcatgcactatatcttttgttggttttgatagtggatacaccaaagtccaaatgatcatatacctgagcacactgcaagtagaggcgcaatgccaaatcaggtgcggaaacatcagatagaacttccaccgtctgtaaaaattgagattcaaaatcgactggcatcatagaaattctggcaaaacgaaatacaatgtttcactgggacaaagccaatgatgtttgcaaggcaactaaactgtcctcactattttctaacaacaagatgtatgtacacttgcctcgcttaacagctgtagaattctcttcggtgttgctgatgcatcatctccaaatgggttttcatctccacctcgcagtcgccgaattaactgcacaagcatatcaatacaatgtgcggagttccaaattcaaacacaatgtctaccaaatccataacaaaactggaaacgacacaacagtcccaaattttaaattgaaaaacttttccaagttggatatggggtgaaaaagtgatcagtaaaaaatacaaaccttgagcgcggaaaagacaaggggtggtatagttaaaggcaaacgcttaggtcctccagccacgatgtgcttccttacagtgaaaataatctgtagttgggtaaacgaattaagaatcgtacacaggccacattgatagtaacgcctctaattataatacacaccttagacatttcttctggatcatcaatgtagagcttgttaacaagccgtgcaacaaggttctgctcttcctggaaatcttcttcatcaatctagaacccaacatagtttcccgtttgaaagcgtaagttatctaaagaaaaacaactctttcgagtgacaagaatactttgaacacaaatgcaataagaattgacgaacaagggtagggttctagaacctcatcatcaattgttccgtcaaaatccttcatgagaccctttgccagttcaaacaatgcatcgacctgtaacaaacaataaaaggaaactccacatcaatagagaatgctaaaagaagaaactaaatcgaggaaggaaacggacacctcatcagcagtagcaatgtgagtattatttttaaaaacgctctgaactagaatgattgccattgctttgtttgtctcacggtcaaggtattccattactagaggatagttggtaagcttcaagatagttactacattattatacttttccaatggagcgctaagaaatgcgacgatctgttttgctgccttgtcatcacaaagctttcctgtggcagatagttgagtaacacatgatccctaaaggaaaaaagagagacaacaatgtctattagcaacaaccagaactacttaaagcattaaaaaaaagtactacagatgaataaacttaacacgcttatacatcctcagaaagcgttataccaaaacttggtccacatagtccagacgatcggaatagacatggagagtgaattttagaagaaacaaatacaatgttacagatgctgcggccggcaagtccgcctgtgcttctacaacctgaatcataatagatgtggactcgatcagctgtttataaatacaatagattatcaatgtgatacaatcagaggaaagtagggcaacaaaaattacacaaaaatatcacaacacaatggggattaagctagatttttcagctgtttctaatactagcacccctaataaataaacttacattcaagtgtcaatttaagttatcacttttgacttcatgtgtagatgcaagatttaccttcccaatggcataatttaactttgaaaaggcttctacttgcaggaaattaggcaatgcttccacactggatgcagcatagttcgaaagcctttccattagacccgaaagaaccgtcttgatatcaacagacggctggaacaaaaaatgacaaaaagaaaaataggagaaacatgttctgatgggatgaggtttataagcagtctaattttttaaaaagaaaaatgcatataaaaaagaagtggtcggttacataaaaaagtacctgaagttgtggacaagctcccaataatacatcgagagtttgaaggtgaaaatcatcaggaaagacttgaataatgcaatccataaggtagcactgtgcaagttcatccttacagttgacaaccttttaagacatagtgagacaatagttgacaacatgtagacggaaggttggatgctgaaactatctaaacggagagaaaaaccagacctgctccagtattctaggaagaacagtatctctgtagattccaaggtcaacaccttctaactgactcagtacatgaaggttcttaccaacctaatcaagcagtaaagagaagaaaaaagtgtctttcagaaaataataagaaccatagctcgcaaatttctagatgagaagaatcaggtacaagttaatgctattacaagatcacgtagttcattcctttctttctcacgtttttctttctcccgactaggtccctggatacaagaaagtctcaactcaggttcagctcagtaggaaaaaatcacaaagagtaaaatagcagcatgaccagacattggactctcacagtacgcaaacatattcaatacatacatgctggatatgagagcagtatatcattagcatttccaaccaacctgatgttgcattcgaacccataatttgttcatctcggtaaaattttgaagcacgaactctaaagcattcatgtgtgcatcaccatctctggagagaaaagcaaaacacttgcctcttaacatgtgtttcatagcttaaacaaaatcatctaacagcaggtcgtgtggccttacccttccaagtcagaaccaatgctgggtaacttatccctagtaacttgagcaagataacttctcaagaaaagaccacgcaagggatgttgaacagctcgacacatttcaacaagatccttaagtatatccgtagcagtaacatccttggatttgatatatacagatcctatggtacataaaagatacctgaaactcaattgatgagtatctacaaagttaaaatcagagtgtgcaaatgacaacgtattctgaacaacaagaacaaaagaaacttacaatcttggcaaaatgttaccggcatgctgaactaactcgtagagctctgcgatggagcaaccacgtcccgtctcttccttgaagaatatctccaaagtccccaattcattaaaaactcgcatatctgaacaaatcagatcgcagtaaggaaatgaaaatcacacacaagagctacgaatagaggaagagcgggtaacgaacgagtcgactcacagagttcatagtatttatgaggagaaagcttggaagtacgaagctcgctgagcatttgagcagaaaactttagagcgtctttgagattgttggagtcctgcgaggataaattggagattcgttagaaaacaatgcaggatttagggttctaagatcccgaatggaaaattgattgatgaagaagagaggagaggggaaggagtggtacgatagcgcgctgcatatagaaagcattttgcttaacggcggcgattgcggcggcaagccacttctcatcgtcgtcggcgatcattctatgttcctcactactttactctacagagagaagtctcaattttgaccgaattttctgagatcttcgcgaattgaaactctcctcatttaaatttgttctttcttcattatcagctttaactttaaattagatggtgacataactcatttcatagtcattaggctacattagtcttatctctcacaacttcaattttgacttttgagtaagctggtaatttaaattacgtaaatagatcacatgatttagaatttgatttaccctttttcctcacattgattgtgtaaaagcctttctcaaattaaagaattgacaaatctgaccccaaaaagaacaaaaatgaaacaggatcaagtacattttgagagactattaacttctcttctttccattctaaacaaggattttactactctttgtctgcaaaaacagaccaaactcatggacacagcttccatttatgacttttcataccctggatctggtaaaagagcaaccgtatgcttttaacttggggatttaactttattatgacggtgaatcactgtagcatttttctaaactagtctcagtgaacaccttttctgcttctttgcatcctagtctaaggccatggactatctccttcaagtccacaaggccacacccgggtattcgtcctattttcctctccttcaccatctctctcactctattaacatcctcccaccgtcccgtaacactgtaaatattcatcagcaaatggtaatacttgtagttcaaaggatctgtctctatcagggacttggcaatgctctcccctagagtcgggtttcctgtaaaacgcgacgagctgagcaagtttgcccactttgtagattctggtgtcacatcttcatctggcagattcttcagagcttcctctgcttcttcagggaacccggcgctggagtaaagattagccatgcaccattggtgtccaaagttgggtttgatctggaactcatcaaccatcagagaatagtaactttgtccttgagaaacaagcccagctctagcacaaccgcagagaacaccaacaaatgtcacttcatcgggtctaagcataccattgatcatggcttcaaataactcgagcccaccttcaggacgcccgtgaagacaatgtgccaatatcatcacattccaagtaactttgtttctaatagatagactatcgaatatcctacgtgctaaacctacttccttgcactttccatacatgtcaataagagctgtatcaataactacactcgaattcagaaaggttcttatcaaagaagcatgaaccgacctaccttccttcaatctagctgatctaccacaagcattcaacaacaaaaccaacgtactctcatttccttggaaccctgctctgaccatctcacggaacaaactaatggaaactccaggattattcgcacccaaataagcactaatcatgatattccaagaaataatgtttttgtcaggcatttcatcgaacaacttgtgtgcagccaaaacatcaccattcctcaccatcccagctattatagagttccaggacacaatatctctcttaggaatttcaacaaacagcttctttgcaagatccaaagcaccacaacaagtatacatatgcattaacgaattttgaacaggcaaaacttgatcgcatccatgcttaatggcttgcccatgacacattttaccagaatcaacgcaacaagtcttctcaatacaactaatcaacgaaacgaaggtgtatgaatcaggaacaaaaccaaatcttagtatatcgaagtaaaaccccaacgcttgtttcggagaagacgagaccaaataagccttaaagacgggatttgcgcagtaaagcttgccaatgctgcggtatatcgaaacggtgtagctagaatcaccaaaacgcgaagaagacttcaacaatctgatagcccaagatgaatcccagaagttaccggaggtgattagcctcgcgtggacttggaagaggtgtgtaatagagttggaatcttcgacaagtttgaaacccttaagcagacccgttccggggacgatgaatctggatgtgacgaattggcgaatagaggaagcttttgccattcatctccagcttgaatgctaagatttgagtcagggttggattcagaaatcgccattaaccaacgatcatagctatgtcaaggtctcaaggaatgattacagctcaggagaaggtgttgcggcgaaggagaagaatcgctcagtgtaaaaaccttaagagaaaccttctctgagagaaggagacttccagttttgttggatcaagtcaaaacataattaaatagaggtttccataataacaacaaatttcaggaccattttgcaattttaggaaaaaaagaagataaaaacactttttaaaagtggtgtgaatgggataaggcacctcacgagtacctaattttagtttagatggcgtttcaaatgaaaatttataagagacagacatttaccaattcattacaagcaaaaactatctttaaaagcagaatttaagataagctgaattatctagagagtctttcttatcttgatatttcttctgttggaatcatctatatatccgaatcagatcgagtctttaattgattttagattgttatctgcttgaattaagggaaaaaaagaaaaagaaagaggagaagaagagaaggtgagaagtaaggatctggtgttggtgtgtgaacataaagaaagagagagaggtgtgtttaacgtacattgtaatccataaaagagaaaagccttgcaaatcacgcaacagtgaccaaccccctttttttgtttgtctatccaacacacacgcctcttattacactctgttaaattgataaacacaataccaagtgcaagagaatccaaaagaagaggaagatgaaggttctggagaagtggttggccttgctgtacccgagagtgcagggaggagaaggaagagaggaagagtgttgtagtgtttgtttgatgagaatggaggcaaaagatgtcatcaagtctctaccttgttcccatgagtttcatagtctctgcgtcgatacgtggttcaatgtcagccgtaagatttgctgtcctctttgccgtttttcacccactaccatccttcttaccgatgaacttctcctctggttttcttcttttcatttctgattcccattgtctctgtattcctgcttttctggggatcaaacatctttctccttgtataatactataaaatctcttgtagtactagttttccattcaaggaggaatgtctaaggagtttgattcctctctggaaaaaaaaaagataataagagagaaagactgtaattaagttgttgatgcaccaatggcctcctctcacaacagccaaaaaaaacaaataccttccgagggggacagagaaacaacttgcgtaaagatatgaacgggttttacaaaatggtaaagaaatacttaagctttgagattaagagtttcgagccaattcactaccaaaatgtggagcttgacgaacaagtatgtaggtaaaagattattgatctgcatcctttttgccttttacccacatatttgttcttcaaactccaaaacttgttagtgaattggcgcaaatctttaactcagtgctaaaagatttctaacaatctagtgaaatatatgttcatatagcgactcgtcttgctcactcctttttacgtttatgtaccatctggtcggagcccgctcacgtctccacttcgtcgtcgcttgaagagttcgccgaagttatcttccaacgattggggtagctctttttggagttttcaagaagacagaggatggtgtatggacaatgtaatcaactccaccatttataagtaatcaaatggcaacaaaataattaaggatggtaatttgtgattggcctaaattttctgaggtcagaacacatattctgaggagacgaaacatctttgacaaatatccaaaacattttttataatacaaacacacattatattataagaagataagattgccacctctcataccaatggatatatattgttttgctcagattataatttttatgaacataaaatgggtaaactcaaaccaacacaaaatgaatcagaggaaggccaaaagaggtaggagaagtaggagttgagatgcgagagggactagattggctgcagtgcctgtgccagagtttctggtagagttacgagggtctatttggggaggtgtagctgcagcaggaggaggaagaagactaggtaacggagtggaggcacttggtgaaggagcttcagtctctggtggtggaggagtcgttgattccaagctttcatcttcaaaacctgccataacaaaaaacacttcatcaccaacgctttgttcctaagtatatacagtcacttccgacctggtcacttacaatcagaccgtttccaacccaaaatcatcctctcccggtcgaatacaatgcggtagccagacatgaagttctctgcaaccaaccaaatgaaaatgcattcagcctatgctcttttttttgtctgcgtcaattctatatattgaatatctacagtgtaaatctcagtattgtgatacttacgtccgataatgttaatcttgaaatccacgctcttcagaatacccaagcagtacatggcgctattgtcctgttattcaggttgaaaagaaaatagacaaaaaataaggcaaatgtaattatcaagacgctagttcacgaaactatgtgaaactggaagaaagaaaaacaaaacacccatgtcttgcctcattccacactatgaaaagcggatttctcagaaacatttgggatcctccttcaaaagtcatcgctactctggggaataaaatggttgttttgtttggactgcatgtgaagagaaagaacatcagaattcaaatgtgtatcagagacttctttgaaaatccaacacatctctagttaaatgagaagaagcatatgacaagagcgcacacatgaccttaagtcgtaacagaactcaaatggaagctcaggatcaatcggacgtcgcttgtcagtgacatgatcgtcaaactgcaaaagtataagtttgatggtcatgtgatgtaaaaaaacacaagcttggaggaatgacacaagcttttgatagcacaaagtttcttgaagaatgaaaacttcactcagatatggtattagtacaatgaattctgtcaggcagtattagaatagatgactagtctgatctatggcacttacagctttggtaataagaccatattctggttctagtaaatgtgtaaatgatgttccagtgtcgaagagagctagcagctgaaccccaacagcatctccccctacagatacttcggtcacactcacagcatatgtcggactattttcatttggtataaacaagatcacaggagacagaaacagaatcagtatagataatacatcaaattgaaaacttttattcgctgtcagatcaaattggactttactatgtaccttggttcggtaggaagtagtggcgtctccatctggtctgtgtatcctttgtcaccgaagctgattcttccgacaacgtcaatgatattcccgaaacacattgagaaagagtttgcagtgatttttgcttttgccagtatgctcggaacagagtaatctttcaaacctagcccgagaagaccattaacagccgcactactctggagaaaacctgtctgattcttaccgcaactgcaacgcaaacacatgttagttccaagagaggcaacttttttaacatttttagttttgaaactaagttcaatataatcgttactctgttttgctatgcatttcaacatatagaacacgaaatgaacataattttagaggtttaaatagcggcaacgtgatttttgttaagaaaaacaaagtcattacttacccaagcgtgatattagctttaacaggctctaaaccctcgtcctctgtgaccaaatgcaatacatcctcaaacaatgtcccggtggtaaaggtgtccttagaaaggtactggatctgataagggcaactacttgcaggagaagaacaccggctcgacccaaaacaacggtcatcactgcatctaatgcttgaacttgtagaagatgtgttggggctgtatagattgagtggtcgactctatgtcaaagaagaaaaagagttaaggaataaatagtttgaagaagatatatatctgaatgctttcgacaggagaaaaaggcacctgtgaaagtccaacttctttcaagtcacggatacaagtggaaccgcaattgcaaggcaaccaaaacaaatcgcttccggtgtccagagccaccaggaaccaagtggccggtgttcccacagagacattggcgtagtgcaagctgaagtcacatggatataccaatcagattcaataagcaataaagcatgaaacgaattgttatgtataaggatgagaagaggcattacaatcccagaaggtcgattgaaatcgtgcgatttccccgcatgaaagtaataggggtttcttcgttgttggaggcaagacctcgacctctgatcaaccgatcacgctgtgccaaaaccttgaagtactccaaacttcccttttccggcactagatcgtcaagtccaagactttgcttgaccctatcagagaacatatggtgaacttcaaagctaaacttcccagaagcctcacatctctccaatccccaacacacaactaacagagacaataacacaaacacttggcgtgcaacgaccatgacttcaatctcggagcttttccgagaaaacaaaaacacctccgggataaaaagacgtttaatttctcagataaagacataatcctcgaagaataacgtatatgtaaggaaattgaagaattggaaaagtcaacagattgactcgttcgcattgttccagagaagctgatttgattattggccctaataatatttaagctaatactagtttaatcggagtagtagccattattttgcgtcttcgtcttcttccctgaagctgaaaggttgacaaaggcagagtttttttatccggagggagacgactttttaaatcagccgttattataagtctgttagtcatctctttctttttgcataaaagcccctctacgcttcttatttcgtacttaactccttttatagtttatactatttatattcaacgaacaatttattttcctttttttggtgaaataatttcctagtcaaatcaatcattcgctcataattgttgctgatttaattatgccgcattagagtatctcaatactaaactcaaattcgaattatatgcaacaagttgagaaaaagattagctcttttagaaaagtcaacatacgatgagggcattatgaattaagtgaatcacaaatagacaatttgaatcattgctttacggatacatgtcctcctttgcttcaatcacttttgacacatccgaaacattttacataacaaaaacatacattgtaacaagggagataaaataagattcaacaatctcaaaccaatgaacattgtgttttgctcatcaaacgatgtttattattaaatgaacacaaaaatggttaaaccaacacaaaacgaacttttgtgattcagaggaaagccaaaagtggtaggagaaataggagttgagctgcaagagggctgagattggctgcaccgcctgtgccagagtttctggtggagttacgaggatcgattgtgggcggtgtagcagaagcagcaggtggtggagtggatacacttggtggaggagcttcgatctctggtggtggaggagactcagatgctaagctttcatcttcaaaacctgcattgacacaaaaccacatcattactaatgcttggttcctaagtatatacagtcacttcctgatttaggaacttacaattagactgcttccaacccaaaatcatcctctcccgatcaaatacaatgcggtggcccgacatcaagttctctgcattccacacatactctcattatatccatatatatatatatatatatatatatatatatatatataaatttgtgcatcagaattggttgttgagatacttacgtccgatgatattgagatttatgctcttcagaatacccaagcagtacatcttagtaccctcctgttaccagtgttcaaaaccaaaaacaaaaagaaaatgtaaatagatacgttaatacaggaaaagaaaaagaaaaattaaagaccatgtcatgccttagacgttgctgtaagaaacggattcctgagagtcattttggatcctccaacgaaaatcatctctacaggggttgtaacatttggactgcatatgacgaggacgagcatcagaattcagatgttcttctctataaaatgtttcccatctttcttactttttacgtgttctggcgtgcgttaaaagaatgtgctattaatataggcaaaagcatatataactacactgataagagtggaagcatgaccttaagtcgtaacagaactcaaacggaaaatcaggatcaactgggcgtcgcttgtcctccataagatcgtcaaactgcaaaagtaaaagatgtacgtcatatgatgtaacaaacaaagcttggaggaatggctttcttctgagaaatcttcatttcaattttcaatgcccactgcaaaaattacagatatatctaatggtttaacagcacaatagtttctccgaggaagaatagtttacacatatctcgcttttttacatgaatttggtcaggcagcattataatacatggtatagtctaatctaaacacttacagctttggtaaaaacaccatatgctgactccagtaagagtgtaaatgatgagccagtgtcgaatagtgcaaacaggggaacatcaacaggaacaccccctactgatactcccgtcacattcacaccatatgccgtactagttttcattttaggtcaaaaatgtgaaaaggaaaacataatgggagatagaagcagaattggtgtagtagatatacacaaattataaaactttggcgccgctaatctggaaatgacttcttaccttgtttcaagagagactaatggagtctcctcctggtctgtgtagcctttgtctccgaaactgattcttccaacaacgctaatgatacgcccgaaacacattgaaaaggagtttgcggtgatattcgcttttgccagaaggctcggaacagaatattctttcatactaagcccgagaacaccattcacagcaatatctgtctggaacgcacctgtctggttctgaccgcaactgcaccacaaacacggattcagttctttagcatctccttggtcatttctctaaacagaggacagttgatggaaccgtacatgagttctaagagaggcaaaagacctaaactttttacatgtccggaatctcacttcattcaataggttactccaggaatgaaccctttattcttaaaggtgcatagaagaaagacagaggaaaagagtcattacttacccaagcgttacattagcattgacaggctttaaatcctcatcctctgtgactagatgcaatacatcctgtaacaatgtccctgtcgtgactgtgttgctagataaggcaatctgataaggacaaatactttcaggagaagaacactttcccgatccaaaacaacgtttgtcactgcatcgaatgcttgaactcgtagtcgatgcattgggagtgtatagattaagtggtacactctgtctcaaagaagagaaaacgacaagagataaggaacaaatagtctgaaaaaaatgttcaactgcttggagaagggaaaggtacctcggaaaatctagcatctttcaagtcatggatacaagtagtaccgcaattgcaaggcaaccagaacaaatcgctgccggtgtccagagccaccagaaaccaagtcgccggtgttcccaaagatacattggcgtaatgcagactgaaaccatattcaagaggcgatggagtcaagcatcatacactaccaaattgtgtttgcgttaaagaagaaaacgaaatgttgtgaatcaaaaggaaaagaggaattacaatcccaaaaaattgagtgcaagcgtgaggttgcttccaatggaagtgagaggagtttcttcattgttggaggcaagacctcgacctctgatgaagcgatcacggtgggccaaaaccttgaagtactccaaacttccgttttctggcactagatcgtcaaacccaagagtttgcttgactacgtcagagaacatgtggtgaacttcgaagctaaacttcccagaagcctcacatctctccaaaccccaaaagatcaaaactaacatagacaataacacaaacacttggcgtgcaacgttcataacttcaatctcgaggcttttccgataaaataatacaacttccagagtaaaactctgtttaatttctcagataaacgatgtacactggtacgaatgccgtatttgtaaggagattgaggaaatgaaaaggtcaacagcttgacttgttcgcattgttccagacatgctgatttgaatgttcgagctaagagttgtttaatcggagtagtagccattactttggatcctcttctttttcccaagaacctaaaaggttgacgaaggcagagtctcttatccggagggagttgacttctgacattagccgttattaataagtctgttagtcaactctttttttttcggaaaaacccctttattcttcgtatatttcacttaactccctgtattctcttctgttcaacgaacaatttctttacttttctatttcgtgaaataatttcctatttaagtgagataacttctgacattagccgttataataagtctgtcagattatcacgaagtttatacactttatgtaattgatgattgctccatgcactttgacatatccaaaacactttatgtaacaaaaacaggggagacaagattaccactctcaaaccaatgaaaattgttttgcacatcaaacgaagtttgttactgaatgaacacaaaatggtcaaaccaaggaaaacatatggcttctgtgattcacaggaaggccaaaagaggtaggagaagtaggagttgagatgcgagagggatgagattggctgcaccgcctgtaccagggtttccagtggagttacgagggttgattgggggcggtgtagcggaaacagtaggaggaagagaacgaggtggtggagcggatacacttggtgcaggagcttcgacctctggtggtggaggagttgtagattccaagctttcatcttcaaaacctgccattaacacaaaacactttcattaccaatgctttcttcctaggtatatataatcagttaatcacttcctggtctggtcactcacaaagagactgcttccaacccaaaatcatcctctcccgatcgaatacaatgcggtagccagccacaaagttctctgcgagccacaaatattcccattagtattttgcatatatatacagaattttgtgtatcagtgtggagatacttacgtcctatgacgttaatcttgagacctacgctcttcagaacacccaagcagtacatcacattaccctcctgttacataaccaaaaacaaatatgtaaatacataagctagtaaatcaaagaaagaaaaattaaacaccatgtcttgcctgagtccgtgcagtgaaaaacggattgttgaggatgattttggatcctcctataaaagtcatctctactaaggggaactgtatggttgtagcgtttgggctgcatgtgaagatgaagaacatcagaattcaaatgtggtaccgatcagtccattttacaaagtcaatgattacttcatattcttctataaagtcaatgtttcctcaggcttttcttacttattagatgttctagcgtgcgttaaaattcgaacacattttactaaagtgggcaaaatcatctaataactacactgataagagtgcgggcgtgacctcaagtcgtaacagaactcaaacggaagctcgggatcaactgggcgtcgcctgtcctcaacaagttcgtcaaactgcaaaagttatggagaatgaacgtcatgccgatgtagcaatacccactgcaaaagttacagatctatctaatggtttaacagcacaacattttcagaagaagaaaagtttatacatacagatttggtaagaacgccatatgctggctcccgcaagtgtgtaaatgatgagccagtgtcgaattttgcaaacaggcgaatgtcaacaggatctcccgccactgatactcccgaaatgttcacaccataagcggtactagtttattcattttggatcaaaattgtcaaaaagaaaacaatgggagaaagaaatggaatcggtgtagaaactatgttgactttgtaccttggtgcaacagaaatgaatggagtctcctcctggtctgtgtagcctctgtctccaaaactgattcttccgacattgccaatgacacgcccgaagcacattgagaaggagtttgcagtgatattggcttttgccagaaggcttggaacagagtaacctttaataccaagcccaagaacaccattcacagaattgtttctctggaacagacctgtctgcttctgaccgcaactgcacgacaaacacggattcagttatttggcctttgaggtcatttctcaaacagaggacagttgatggagccatacatgagtgctaagagaggcaaaagacctacacattttacatctccagatttcacactatatctaatcttactgtatattatcggttatgctacgcacacctcggcgttaacaggacacggacagtatttaagcggcacaatagcgtacatgaaggttttttgtaaagaaaagacagaggtgaagaatcatttacttacccaagcgtgacattagctttgacaggtgttaaattttcatcctctgtagccagatgtaatacatcctgtaacaatgtccctttggtgcctgtgctgttagagtaggaaatctgataagggcaaatacttgaaggagaagaacactttttagatccaaaacaacgcttgtcgctgcaacgaatgcttgaacttgtagtcgacgcgttgggagtgtatagattgagtggtacactctgtctcaaagaagagcaaacgacaaagagttaaacaaaaatagtttgaagaaaccgtttagctgctttcaaaagaggggaaagtaacctgtggaactccaatgtcttccaagtcacggatacaagtagtaccgcaattgcaaggcaaccaaaacaaatcactgcctgtgtccagagccaccaggaacgaagaaggtggtgttcccacagagacattggcgtagtacagactgaaaccaaaccacatggagatacaaatcatatttcaacaacgaatggattcaagcatctcattcatacatatcgcttttactatcaccaactagcaataaacaagaaaacgaatagttgtgaatcaagatgagaagatgccttacgatcccagaagcttgactgaaaccgtgaggtttcccccatcgaaagtgatcggggtttcatcgttgttagaggcaagacctcgacctctaatcaagcgatcgcgatgagccaaaaccttgaagtactccaaacttccctgttccggaactagatcgccaagaccaagactttgcttgacggaatcagagaaaatgtggtggacttcgaagccaaacttcccagtagcctcacatctctcaaatccccaacacaccactaacacagacaataacacaaacacttggcgtgcaacgtccatgactttactctcaaaggtttttctcgtagaaaagaaaaacacttccggagtaaaactccgtttactttctcagataacgatacacaccatgacgaatcccgtatatgtacagaaatttgaggaaagtaaaaaggtcaaaagcttgactcggtcgcattgtaccagacatgctgagagaagctgatttgattctcttcgaactaatactagtttaatcggagtagtagccattattttgtatcttcgtcttgtttccctgaaggagaaaggttgacgaagacagagttctcttttgcggtgggagactttttgaaattagccattcctttttataagtgtcttcgtcaactcttttatttttgttgaaatgcccctctacacttcgtattttgcacttcattcctgttattttctcttttttgtcttattttatttaacgaacaatatctttttctattgttgttgatatcatataattccctagttactcataatagacaacattgttgatgttttctcttacagttgaccttctaatcatgccgcaatagagtatcaatagtacatgtatacctaatcttatattaaaaggttatacgagctttttattatcatactaaaattcgacttgtatacaaaaaatttagaaaaatagaagttccttcagagaaatcaacagacgaggagggcattatgcattataactttataaatcaaagatagacaagttgaattagtttccttttctccattttgtttaaagtcttggcttatacaatattatataggttaagtcattccatcgatttatttttggatattttaaattttgggagacgacccaaactttttgacccatgcgtgctcctatataaggtaagatattgtatttaaaaatgtcccacttggatgaatgggacgaacatggcaagaagatgagaaacaaagaatgatggggtggatagaataatatgtgaaactcagagggtagaaacgagaataagattagctctttgcacattagatgtaattaaattagtcactatcacaaagatacaaaagaaatgaagcaaatgatgaaaagtgaagaagccgcagccagagggttcaaacgactggaaaggttgatggttcttggagacgacgttggtgccatcgatggcggttttgctaaagcggtaggtcctgtgaaaccgttagtatcattacctgaaaatgtccacaagaaattagttattaacatgagtaatttttgtttttggagaagagtttagttcaagtaggacgtacaattagattttttccatcctaagatccttctctcacgatcgtggacgattctgtagttggtcatgaaattttctaacataaagaaaaattttcatctgatttaggaattggttaaaatgtacaagaagaaattgtgttgattgtgggaaaaaaagaacaaaaacgaacgtccgatgatgctgaagtcagcattaacttgctttaagacagccaaacaatagacttgaaaactaccctgttaatgcaatggagattaatatatttagatatagtaaatatgataaaatgatgatatgagaagatatgtgtatacatcggaagtgtcgaagacaagtatggggctgaaaacatcataagcagctcctcctttcatctcaaagctaactgaaggaagcttatcttcatctgaactgcaaacagctacacacacatgcatcaataattttttaactacaaacatttatcatatgtatatctaaagataagcctacgaacgttgatgtgataatgtagcaaaactcaaaagggctatccacacttttcgaaagtcgtctgtctggtacagagagatgaaactgcataacacaacacacagacgggtcggtttgtaatgttacatgcctcgaggttttaggtaatggaatgaactaaatgcaaaagtacgtaaagcgcacgtttgttgttagagcagtgtagtaaggctcgatcagccatgtaaccgcggttccagagtcaaatgtcgcggtgaattctgtatccaccgtaacttttcctaccttgaatttggtgatgctcacatcgtaaaacatcctgtgtttagatcatgcatgttcgttacatatgaatatacttattgggacaaataaaagaaaaaggtgtaaggagggtttacggtgagatggtgccactcaatggagtctcaagctggtctgagctacctttgtctccgaaactgattgttcctttcccattaggaccaaaacacattgagaaagagtctgacgcgacaccggctttaaccaacatgtttggaaccgctatgtcggctattgcaagtcccattataccatttacagccacttctttgaacaaccctagttgggactcactacatctgccaccatttaagtacttttcatatatgaagtaagaagagacctaaaatactatatgaaagacatattaatcagtgcattgccaattttagaaagaattacaaacccgaatgtgatccgagcatctctagcttctccttcttcagtgctcatgtggatcacatcctccaccaacacacctgtacttttgcttcccggagagagatatcggattctgtaaggacaatcgctgaccggagaaatgcatctgtttcttaatgcacagagtgtgctattgcacgtaacctttgagcttgattttgatttgctggggttgtagatgttgagttttattctctacgtatacatgtgtgtcttaaaagatgatcaagttttgatgtcataacaaataacattccaagattgtataaaattacctcgccttggtcagtctccatactccgtacacaagtggaattgcaattgcaaggtaaccaaaacaaatcactgcctgtgtctaatgccaccaagaaccattgagccggtgtccctatcgtcacattcgcataatgtagactgatcattaagaataaagaaacatataatcaaaggtctatatagtacttactaaatggaaatacagaggaggtgccaaatttttatcatacaaactgatttcttcggtggagttgccttgagcgaaagaaatagttgtctgattgttgttgttggaggttagctggcgacctcgatcacgatgaaccaaggccttgtagtagtctaggctgcccatttcaggcaaaccatggccacctagaacggttttgacttgctctgagaatctatggtgaatttcaaaggaaagtgatcctgaaacagaagaagccaatcccaaactcatagcacagaggaatccaaactgaaacatccatctcaacttccaattactccaaatcattctttgatcttcctatctttctctatgaatctaaagttaaagaagaaaaacaaagaataggtgtgttgattcttgctagttgagtttccttttactacacgaaacttgtttgttttgttttgtgtgtggaatatgagggagaaggtcaacgttttgtctggtgcttggtctttgtcaacggatttttaaagatcgttattaaaggaatatgttgccaacgaaattatcgtatttaattcaatttttgaacatcaactctcatatttaattattcatagaaaccttatcataatatttcttgttcttttatctttataaacaaaaccccacaagtatatgatctaacctcgaatcattgtgtttctgtggctgtttatatataaatttggtggaaatgtgactagagacgtggagggatgtttgttatcggtttggtgcagcccggtgtacattaggcaattggtaacaatattgtttaaatctgtacggaaaacaatggggtgaatttgtcataatatagagataagagagatcgaattgcaaatatgatacaattatttgaaaatagaaacgttgactattgataagtttttgtacacgtgtcatgtatatatgggacccagatcaaattcttcttcttaatccagccagctttgaattttgatatttgatgaatctcaattaattgtatgagaaaaaaaaagtttctctctttaaattagtagatcttagactgaatcataaacttttgatctctaatctcaacagatatgaaaataatcacttgattccatcatttgcttttctcttaacttttttttttccggaaaataagttttaattttaaactatagtaacaaaaatgatagaaagtacgtagaactctggaacttacacatactacgaacaactacattagataaaaggaaacacaagtcatgtacaagatgtgaagattagacgaatatcttggagaaaaacttttaaaaataaaaaatgtttgaaaagcaattactatgcattcatatatatgtatagacgaggtacgtagctagtctaagaagatgtgatgatcaagccttcgttcttgagaaattggggagaagatggaggcagtgaatgaaatgaaggtcgtgtacaagaggatttccggttctccttggtggagaccctacgtaccacattgactctatggttccaccttctatcggctgcacctacgaccacgatgaacatttatatttaaataacacccaagatcgattcatgcatgcaagtttgaaaaaatattttaagaaattaattaaaacaagtttatgttttagtattctcacaaaaaagttaagttttgatatatcattttacatttttaccaattttcatatataaattagataatttcatagaaaatagatgaaaaggactattgttttgaaaaggaagaaatctacaaattaaatgtctaatagaaatgatgaaagaagcaagaatgacgacgaccttatcgataatgctgagaacgtcgcttcttccctccttactttgttggctgattaaggcacacacatgtatgatgaatgaatcatcatgattaatttcaagaaacaagaagaaaatgatatatagtttcgattgttataaaaaaaacttttgtgtttacgtttacaaacaaaaagaatcatgttcttaactttttggaaagcacaaacacaaattacaccaaatgtataaaaaacacaaacaaacaatctagctagaccatgtaatgttaccaggtggaggagtgtaaggaacacgagagaggtttgatgaaatcaggaagagaatgacacacacggcgtggcttagggcaaagaggctgcttcacttccgaatgatgttgcatcttttctatattcccttaatccgatccaaaagaacaatgtagttatttaaatgttgatcctttgttaactggagtctgaaatgtagtaattaattagtttgaaatctatatatacaatatgtatcgttcgtttaagaagaaactgaaggattgtgtagtgatgagtgaagccaaagtttggttattctcagacaaaacattacttagaaagacgtgatcaatttacatgtggtgtctttatttcgtggtgaagagtgaaagtagggttggtgttcttgactactccccctcgttttttgcccttggttataaggccgagtagacatatctaaaggcccaatttgtgataagtagagagaaggcccgttttgttttcaagagccagagagcaaatgggaggaaagtgaggaaaagggaaggcacatgggagagaagtgaaggggaaaagaagagcaggtcaggtgcaggtggagttggatgtggaagttgcacacgtatgtctgtcttctttcgccagctaacctttctctctaatctcatttcatcacgtgtccctctcccttatcactcacacattttatctatatctttttttttttggttttttaactatcaatctttttcttctacatatatctaccaatacaaacacttgtctatatctgcaacactttttttttacctctccaagttataaggaatcgtcgaattcggagttgtgggtttaattgataacagaattagttatttggtataaattgtaagttattacaaagataaaggaccgtttgggtaaataaaaagaggaaagaaaagtcaattagaggagaaaagaagggttaggtttagaaaatctgatccagtaagtaatttgagagattggattgtctggttagaagcagtggagccctttcctttctctcttctctcttttctcctttgccttcttcctctccgagagaaggtcgacgctacttcttcttcttccttctttcttctggatctgattcggatccatcactctctctttctctacatcaatttgttttctcagatcttcatctttttttcgtatacctgtatttgtcgaccttttctctcaatcactaaaccctcaaatcctttttttggattataagattgcttctctgattgtaattgctttgatgtgtatcagttgacttgtgaaaagtctgcgagtgacttcttcctgtttacacatcagctactccagaatctctcaggtactaattttctcagagtttgaaaaagtttggattttgatctgatccttgttgaataaactattccctcttgcttatctgatccattaaccaattgggtttgcagtttttttagtttaaagttgggtttttgatatcatttttgctcagccaagtcgagagttttcagattctattaagcttataaaattgttgttttgttcagatccttacttttaattctgttttgaattgcagattcttaaaagcttaaatcttttttcgactttgattgtttctgtgcatcgctttgacggatgtggaggaaaaaaggggtgtcttgatgaaatgagggatgttatcaacgttaatgaaactcttgagtgcttgtctgtggccgtcttcttcctcgggcaagtcctctgattcaactggaaaacaagatggattgctttggtacaaagactttggtcagcacctcgttggtgaattc

SEQ ID NO: 1076 - DNA, 94349 bp, Arabidopsis thaliana
gaattcaaatgtgtatcagagacttctttgaaaatccaacacatctctagttaaatgagaagaagcatatgacaagagcgcacacatgaccttaagtcgtaacagaactcaaatggaagctcaggatcaatcggacgtcgcttgtcagtgacatgatcgtcaaactgcaaaagtataagtttgatggtcatgtgatgtaaaaaaacacaagcttggaggaatgacacaagcttttgatagcacaaagtttcttgaagaatgaaaacttcactcagatatggtattagtacaatgaattctgtcaggcagtattagaatagatgactagtctgatctatggcacttacagctttggtaataagaccatattctggttctagtaaatgtgtaaatgatgttccagtgtcgaagagagctagcagctgaaccccaacagcatctccccctacagatacttcggtcacactcacagcatatgtcggactattttcatttggtataaacaagatcacaggagacagaaacagaatcagtatagataatacatcaaattgaaaacttttattcgctgtcagatcaaattggactttactatgtaccttggttcggtaggaagtagtggcgtctccatctggtctgtgtatcctttgtcaccgaagctgattcttccgacaacgtcaatgatattcccgaaacacattgagaaagagtttgcagtgatttttgcttttgccagtatgctcggaacagagtaatctttcaaacctagcccgagaagaccattaacagccgcactactctggagaaaacctgtctgattcttaccgcaactgcaacgcaaacacatgttagttccaagagaggcaacttttttaacatttttagttttgaaactaagttcaatataatcgttactctgttttgctatgcatttcaacatatagaacacgaaatgaacataattttagaggtttaaatagcggcaacgtgatttttgttaagaaaaacaaagtcattacttacccaagcgtgatattagctttaacaggctctaaaccctcgtcctctgtgaccaaatgcaatacatcctcaaacaatgtcccggtggtaaaggtgtccttagaaaggtactggatctgataagggcaactacttgcaggagaagaacaccggctcgacccaaaacaacggtcatcactgcatctaatgcttgaacttgtagaagatgtgttggggctgtatagattgagtggtcgactctatgtcaaagaagaaaaagagttaaggaataaatagtttgaagaagatatatatctgaatgctttcgacaggagaaaaaggcacctgtgaaagtccaacttctttcaagtcacggatacaagtggaaccgcaattgcaaggcaaccaaaacaaatcgcttccggtgtccagagccaccaggaaccaagtggccggtgttcccacagagacattggcgtagtgcaagctgaagtcacatggatataccaatcagattcaataagcaataaagcatgaaacgaattgttatgtataaggatgagaagaggcattacaatcccagaaggtcgattgaaatcgtgcgatttccccgcatgaaagtaataggggtttcttcgttgttggaggcaagacctcgacctctgatcaaccgatcacgctgtgccaaaaccttgaagtactccaaacttcccttttccggcactagatcgtcaagtccaagactttgcttgaccctatcagagaacatatggtgaacttcaaagctaaacttcccagaagcctcacatctctccaatccccaacacacaactaacagagacaataacacaaacacttggcgtgcaacgaccatgacttcaatctcggagcttttccgagaaaacaaaaacacctccgggataaaaagacgtttaatttctcagataaagacataatcctcgaagaataacgtatatgtaaggaaattgaagaattggaaaagtcaacagattgactcgttcgcattgttccagagaagctgatttgattattggccctaataatatttaagctaatactagtttaatcggagtagtagccattattttgcgtcttcgtcttcttccctgaagctgaaaggttgacaaaggcagagtttttttatccggagggagacgactttttaaatcagccgttattataagtctgttagtcatctctttctttttgcataaaagcccctctacgcttcttatttcgtacttaactccttttatagtttatactatttatattcaacgaacaatttattttcctttttttggtgaaataatttcctagtcaaatcaatcattcgctcataattgttgctgatttaattatgccgcattagagtatctcaatactaaactcaaattcgaattatatgcaacaagttgagaaaaagattagctcttttagaaaagtcaacatacgatgagggcattatgaattaagtgaatcacaaatagacaatttgaatcattgctttacggatacatgtcctcctttgcttcaatcacttttgacacatccgaaacattttacataacaaaaacatacattgtaacaagggagataaaataagattcaacaatctcaaaccaatgaacattgtgttttgctcatcaaacgatgtttattattaaatgaacacaaaaatggttaaaccaacacaaaacgaacttttgtgattcagaggaaagccaaaagtggtaggagaaataggagttgagctgcaagagggctgagattggctgcaccgcctgtgccagagtttctggtggagttacgaggatcgattgtgggcggtgtagcagaagcagcaggtggtggagtggatacacttggtggaggagcttcgatctctggtggtggaggagactcagatgctaagctttcatcttcaaaacctgcattgacacaaaaccacatcattactaatgcttggttcctaagtatatacagtcacttcctgatttaggaacttacaattagactgcttccaacccaaaatcatcctctcccgatcaaatacaatgcggtggcccgacatcaagttctctgcattccacacatactctcattatatccatatatatatatatatatatatatatatatatatatataaatttgtgcatcagaattggttgttgagatacttacgtccgatgatattgagatttatgctcttcagaatacccaagcagtacatcttagtaccctcctgttaccagtgttcaaaaccaaaaacaaaaagaaaatgtaaatagatacgttaatacaggaaaagaaaaagaaaaattaaagaccatgtcatgccttagacgttgctgtaagaaacggattcctgagagtcattttggatcctccaacgaaaatcatctctacaggggttgtaacatttggactgcatatgacgaggacgagcatcagaattcagatgttcttctctataaaatgtttcccatctttcttactttttacgtgttctggcgtgcgttaaaagaatgtgctattaatataggcaaaagcatatataactacactgataagagtggaagcatgaccttaagtcgtaacagaactcaaacggaaaatcaggatcaactgggcgtcgcttgtcctccataagatcgtcaaactgcaaaagtaaaagatgtacgtcatatgatgtaacaaacaaagcttggaggaatggctttcttctgagaaatcttcatttcaattttcaatgcccactgcaaaaattacagatatatctaatggtttaacagcacaatagtttctccgaggaagaatagtttacacatatctcgcttttttacatgaatttggtcaggcagcattataatacatggtatagtctaatctaaacacttacagctttggtaaaaacaccatatgctgactccagtaagagtgtaaatgatgagccagtgtcgaatagtgcaaacaggggaacatcaacaggaacaccccctactgatactcccgtcacattcacaccatatgccgtactagttttcattttaggtcaaaaatgtgaaaaggaaaacataatgggagatagaagcagaattggtgtagtagatatacacaaattataaaactttggcgccgctaatctggaaatgacttcttaccttgtttcaagagagactaatggagtctcctcctggtctgtgtagcctttgtctccgaaactgattcttccaacaacgctaatgatacgcccgaaacacattgaaaaggagtttgcggtgatattcgcttttgccagaaggctcggaacagaatattctttcatactaagcccgagaacaccattcacagcaatatctgtctggaacgcacctgtctggttctgaccgcaactgcaccacaaacacggattcagttctttagcatctccttggtcatttctctaaacagaggacagttgatggaaccgtacatgagttctaagagaggcaaaagacctaaactttttacatgtccggaatctcacttcattcaataggttactccaggaatgaaccctttattcttaaaggtgcatagaagaaagacagaggaaaagagtcattacttacccaagcgttacattagcattgacaggctttaaatcctcatcctctgtgactagatgcaatacatcctgtaacaatgtccctgtcgtgactgtgttgctagataaggcaatctgataaggacaaatactttcaggagaagaacactttcccgatccaaaacaacgtttgtcactgcatcgaatgcttgaactcgtagtcgatgcattgggagtgtatagattaagtggtacactctgtctcaaagaagagaaaacgacaagagataaggaacaaatagtctgaaaaaaatgttcaactgcttggagaagggaaaggtacctcggaaaatctagcatctttcaagtcatggatacaagtagtaccgcaattgcaaggcaaccagaacaaatcgctgccggtgtccagagccaccagaaaccaagtcgccggtgttcccaaagatacattggcgtaatgcagactgaaaccatattcaagaggcgatggagtcaagcatcatacactaccaaattgtgtttgcgttaaagaagaaaacgaaatgttgtgaatcaaaaggaaaagaggaattacaatcccaaaaaattgagtgcaagcgtgaggttgcttccaatggaagtgagaggagtttcttcattgttggaggcaagacctcgacctctgatgaagcgatcacggtgggccaaaaccttgaagtactccaaacttccgttttctggcactagatcgtcaaacccaagagtttgcttgactacgtcagagaacatgtggtgaacttcgaagctaaacttcccagaagcctcacatctctccaaaccccaaaagatcaaaactaacatagacaataacacaaacacttggcgtgcaacgttcataacttcaatctcgaggcttttccgataaaataatacaacttccagagtaaaactctgtttaatttctcagataaacgatgtacactggtacgaatgccgtatttgtaaggagattgaggaaatgaaaaggtcaacagcttgacttgttcgcattgttccagacatgctgatttgaatgttcgagctaagagttgtttaatcggagtagtagccattactttggatcctcttctttttcccaagaacctaaaaggttgacgaaggcagagtctcttatccggagggagttgacttctgacattagccgttattaataagtctgttagtcaactctttttttttcggaaaaacccctttattcttcgtatatttcacttaactccctgtattctcttctgttcaacgaacaatttctttacttttctatttcgtgaaataatttcctatttaagtgagataacttctgacattagccgttataataagtctgtcagattatcacgaagtttatacactttatgtaattgatgattgctccatgcactttgacatatccaaaacactttatgtaacaaaaacaggggagacaagattaccactctcaaaccaatgaaaattgttttgcacatcaaacgaagtttgttactgaatgaacacaaaatggtcaaaccaaggaaaacatatggcttctgtgattcacaggaaggccaaaagaggtaggagaagtaggagttgagatgcgagagggatgagattggctgcaccgcctgtaccagggtttccagtggagttacgagggttgattgggggcggtgtagcggaaacagtaggaggaagagaacgaggtggtggagcggatacacttggtgcaggagcttcgacctctggtggtggaggagttgtagattccaagctttcatcttcaaaacctgccattaacacaaaacactttcattaccaatgctttcttcctaggtatatataatcagttaatcacttcctggtctggtcactcacaaagagactgcttccaacccaaaatcatcctctcccgatcgaatacaatgcggtagccagccacaaagttctctgcgagccacaaatattcccattagtattttgcatatatatacagaattttgtgtatcagtgtggagatacttacgtcctatgacgttaatcttgagacctacgctcttcagaacacccaagcagtacatcacattaccctcctgttacataaccaaaaacaaatatgtaaatacataagctagtaaatcaaagaaagaaaaattaaacaccatgtcttgcctgagtccgtgcagtgaaaaacggattgttgaggatgattttggatcctcctataaaagtcatctctactaaggggaactgtatggttgtagcgtttgggctgcatgtgaagatgaagaacatcagaattcaaatgtggtaccgatcagtccattttacaaagtcaatgattacttcatattcttctataaagtcaatgtttcctcaggcttttcttacttattagatgttctagcgtgcgttaaaattcgaacacattttactaaagtgggcaaaatcatctaataactacactgataagagtgcgggcgtgacctcaagtcgtaacagaactcaaacggaagctcgggatcaactgggcgtcgcctgtcctcaacaagttcgtcaaactgcaaaagttatggagaatgaacgtcatgccgatgtagcaatacccactgcaaaagttacagatctatctaatggtttaacagcacaacattttcagaagaagaaaagtttatacatacagatttggtaagaacgccatatgctggctcccgcaagtgtgtaaatgatgagccagtgtcgaattttgcaaacaggcgaatgtcaacaggatctcccgccactgatactcccgaaatgttcacaccataagcggtactagtttattcattttggatcaaaattgtcaaaaagaaaacaatgggagaaagaaatggaatcggtgtagaaactatgttgactttgtaccttggtgcaacagaaatgaatggagtctcctcctggtctgtgtagcctctgtctccaaaactgattcttccgacattgccaatgacacgcccgaagcacattgagaaggagtttgcagtgatattggcttttgccagaaggcttggaacagagtaacctttaataccaagcccaagaacaccattcacagaattgtttctctggaacagacctgtctgcttctgaccgcaactgcacgacaaacacggattcagttatttggcctttgaggtcatttctcaaacagaggacagttgatggagccatacatgagtgctaagagaggcaaaagacctacacattttacatctccagatttcacactatatctaatcttactgtatattatcggttatgctacgcacacctcggcgttaacaggacacggacagtatttaagcggcacaatagcgtacatgaaggttttttgtaaagaaaagacagaggtgaagaatcatttacttacccaagcgtgacattagctttgacaggtgttaaattttcatcctctgtagccagatgtaatacatcctgtaacaatgtccctttggtgcctgtgctgttagagtaggaaatctgataagggcaaatacttgaaggagaagaacactttttagatccaaaacaacgcttgtcgctgcaacgaatgcttgaacttgtagtcgacgcgttgggagtgtatagattgagtggtacactctgtctcaaagaagagcaaacgacaaagagttaaacaaaaatagtttgaagaaaccgtttagctgctttcaaaagaggggaaagtaacctgtggaactccaatgtcttccaagtcacggatacaagtagtaccgcaattgcaaggcaaccaaaacaaatcactgcctgtgtccagagccaccaggaacgaagaaggtggtgttcccacagagacattggcgtagtacagactgaaaccaaaccacatggagatacaaatcatatttcaacaacgaatggattcaagcatctcattcatacatatcgcttttactatcaccaactagcaataaacaagaaaacgaatagttgtgaatcaagatgagaagatgccttacgatcccagaagcttgactgaaaccgtgaggtttcccccatcgaaagtgatcggggtttcatcgttgttagaggcaagacctcgacctctaatcaagcgatcgcgatgagccaaaaccttgaagtactccaaacttccctgttccggaactagatcgccaagaccaagactttgcttgacggaatcagagaaaatgtggtggacttcgaagccaaacttcccagtagcctcacatctctcaaatccccaacacaccactaacacagacaataacacaaacacttggcgtgcaacgtccatgactttactctcaaaggtttttctcgtagaaaagaaaaacacttccggagtaaaactccgtttactttctcagataacgatacacaccatgacgaatcccgtatatgtacagaaatttgaggaaagtaaaaaggtcaaaagcttgactcggtcgcattgtaccagacatgctgagagaagctgatttgattctcttcgaactaatactagtttaatcggagtagtagccattattttgtatcttcgtcttgtttccctgaaggagaaaggttgacgaagacagagttctcttttgcggtgggagactttttgaaattagccattcctttttataagtgtcttcgtcaactcttttatttttgttgaaatgcccctctacacttcgtattttgcacttcattcctgttattttctcttttttgtcttattttatttaacgaacaatatctttttctattgttgttgatatcatataattccctagttactcataatagacaacattgttgatgttttctcttacagttgaccttctaatcatgccgcaatagagtatcaatagtacatgtatacctaatcttatattaaaaggttatacgagctttttattatcatactaaaattcgacttgtatacaaaaaatttagaaaaatagaagttccttcagagaaatcaacagacgaggagggcattatgcattataactttataaatcaaagatagacaagttgaattagtttccttttctccattttgtttaaagtcttggcttatacaatattatataggttaagtcattccatcgatttatttttggatattttaaattttgggagacgacccaaactttttgacccatgcgtgctcctatataaggtaagatattgtatttaaaaatgtcccacttggatgaatgggacgaacatggcaagaagatgagaaacaaagaatgatggggtggatagaataatatgtgaaactcagagggtagaaacgagaataagattagctctttgcacattagatgtaattaaattagtcactatcacaaagatacaaaagaaatgaagcaaatgatgaaaagtgaagaagccgcagccagagggttcaaacgactggaaaggttgatggttcttggagacgacgttggtgccatcgatggcggttttgctaaagcggtaggtcctgtgaaaccgttagtatcattacctgaaaatgtccacaagaaattagttattaacatgagtaatttttgtttttggagaagagtttagttcaagtaggacgtacaattagattttttccatcctaagatccttctctcacgatcgtggacgattctgtagttggtcatgaaattttctaacataaagaaaaattttcatctgatttaggaattggttaaaatgtacaagaagaaattgtgttgattgtgggaaaaaaagaacaaaaacgaacgtccgatgatgctgaagtcagcattaacttgctttaagacagccaaacaatagacttgaaaactaccctgttaatgcaatggagattaatatatttagatatagtaaatatgataaaatgatgatatgagaagatatgtgtatacatcggaagtgtcgaagacaagtatggggctgaaaacatcataagcagctcctcctttcatctcaaagctaactgaaggaagcttatcttcatctgaactgcaaacagctacacacacatgcatcaataattttttaactacaaacatttatcatatgtatatctaaagataagcctacgaacgttgatgtgataatgtagcaaaactcaaaagggctatccacacttttcgaaagtcgtctgtctggtacagagagatgaaactgcataacacaacacacagacgggtcggtttgtaatgttacatgcctcgaggttttaggtaatggaatgaactaaatgcaaaagtacgtaaagcgcacgtttgttgttagagcagtgtagtaaggctcgatcagccatgtaaccgcggttccagagtcaaatgtcgcggtgaattctgtatccaccgtaacttttcctaccttgaatttggtgatgctcacatcgtaaaacatcctgtgtttagatcatgcatgttcgttacatatgaatatacttattgggacaaataaaagaaaaaggtgtaaggagggtttacggtgagatggtgccactcaatggagtctcaagctggtctgagctacctttgtctccgaaactgattgttcctttcccattaggaccaaaacacattgagaaagagtctgacgcgacaccggctttaaccaacatgtttggaaccgctatgtcggctattgcaagtcccattataccatttacagccacttctttgaacaaccctagttgggactcactacatctgccaccatttaagtacttttcatatatgaagtaagaagagacctaaaatactatatgaaagacatattaatcagtgcattgccaattttagaaagaattacaaacccgaatgtgatccgagcatctctagcttctccttcttcagtgctcatgtggatcacatcctccaccaacacacctgtacttttgcttcccggagagagatatcggattctgtaaggacaatcgctgaccggagaaatgcatctgtttcttaatgcacagagtgtgctattgcacgtaacctttgagcttgattttgatttgctggggttgtagatgttgagttttattctctacgtatacatgtgtgtcttaaaagatgatcaagttttgatgtcataacaaataacattccaagattgtataaaattacctcgccttggtcagtctccatactccgtacacaagtggaattgcaattgcaaggtaaccaaaacaaatcactgcctgtgtctaatgccaccaagaaccattgagccggtgtccctatcgtcacattcgcataatgtagactgatcattaagaataaagaaacatataatcaaaggtctatatagtacttactaaatggaaatacagaggaggtgccaaatttttatcatacaaactgatttcttcggtggagttgccttgagcgaaagaaatagttgtctgattgttgttgttggaggttagctggcgacctcgatcacgatgaaccaaggccttgtagtagtctaggctgcccatttcaggcaaaccatggccacctagaacggttttgacttgctctgagaatctatggtgaatttcaaaggaaagtgatcctgaaacagaagaagccaatcccaaactcatagcacagaggaatccaaactgaaacatccatctcaacttccaattactccaaatcattctttgatcttcctatctttctctatgaatctaaagttaaagaagaaaaacaaagaataggtgtgttgattcttgctagttgagtttccttttactacacgaaacttgtttgttttgttttgtgtgtggaatatgagggagaaggtcaacgttttgtctggtgcttggtctttgtcaacggatttttaaagatcgttattaaaggaatatgttgccaacgaaattatcgtatttaattcaatttttgaacatcaactctcatatttaattattcatagaaaccttatcataatatttcttgttcttttatctttataaacaaaaccccacaagtatatgatctaacctcgaatcattgtgtttctgtggctgtttatatataaatttggtggaaatgtgactagagacgtggagggatgtttgttatcggtttggtgcagcccggtgtacattaggcaattggtaacaatattgtttaaatctgtacggaaaacaatggggtgaatttgtcataatatagagataagagagatcgaattgcaaatatgatacaattatttgaaaatagaaacgttgactattgataagtttttgtacacgtgtcatgtatatatgggacccagatcaaattcttcttcttaatccagccagctttgaattttgatatttgatgaatctcaattaattgtatgagaaaaaaaaagtttctctctttaaattagtagatcttagactgaatcataaacttttgatctctaatctcaacagatatgaaaataatcacttgattccatcatttgcttttctcttaacttttttttttccggaaaataagttttaattttaaactatagtaacaaaaatgatagaaagtacgtagaactctggaacttacacatactacgaacaactacattagataaaaggaaacacaagtcatgtacaagatgtgaagattagacgaatatcttggagaaaaacttttaaaaataaaaaatgtttgaaaagcaattactatgcattcatatatatgtatagacgaggtacgtagctagtctaagaagatgtgatgatcaagccttcgttcttgagaaattggggagaagatggaggcagtgaatgaaatgaaggtcgtgtacaagaggatttccggttctccttggtggagaccctacgtaccacattgactctatggttccaccttctatcggctgcacctacgaccacgatgaacatttatatttaaataacacccaagatcgattcatgcatgcaagtttgaaaaaatattttaagaaattaattaaaacaagtttatgttttagtattctcacaaaaaagttaagttttgatatatcattttacatttttaccaattttcatatataaattagataatttcatagaaaatagatgaaaaggactattgttttgaaaaggaagaaatctacaaattaaatgtctaatagaaatgatgaaagaagcaagaatgacgacgaccttatcgataatgctgagaacgtcgcttcttccctccttactttgttggctgattaaggcacacacatgtatgatgaatgaatcatcatgattaatttcaagaaacaagaagaaaatgatatatagtttcgattgttataaaaaaaacttttgtgtttacgtttacaaacaaaaagaatcatgttcttaactttttggaaagcacaaacacaaattacaccaaatgtataaaaaacacaaacaaacaatctagctagaccatgtaatgttaccaggtggaggagtgtaaggaacacgagagaggtttgatgaaatcaggaagagaatgacacacacggcgtggcttagggcaaagaggctgcttcacttccgaatgatgttgcatcttttctatattcccttaatccgatccaaaagaacaatgtagttatttaaatgttgatcctttgttaactggagtctgaaatgtagtaattaattagtttgaaatctatatatacaatatgtatcgttcgtttaagaagaaactgaaggattgtgtagtgatgagtgaagccaaagtttggttattctcagacaaaacattacttagaaagacgtgatcaatttacatgtggtgtctttatttcgtggtgaagagtgaaagtagggttggtgttcttgactactccccctcgttttttgcccttggttataaggccgagtagacatatctaaaggcccaatttgtgataagtagagagaaggcccgttttgttttcaagagccagagagcaaatgggaggaaagtgaggaaaagggaaggcacatgggagagaagtgaaggggaaaagaagagcaggtcaggtgcaggtggagttggatgtggaagttgcacacgtatgtctgtcttctttcgccagctaacctttctctctaatctcatttcatcacgtgtccctctcccttatcactcacacattttatctatatctttttttttttggttttttaactatcaatctttttcttctacatatatctaccaatacaaacacttgtctatatctgcaacactttttttttacctctccaagttataaggaatcgtcgaattcggagttgtgggtttaattgataacagaattagttatttggtataaattgtaagttattacaaagataaaggaccgtttgggtaaataaaaagaggaaagaaaagtcaattagaggagaaaagaagggttaggtttagaaaatctgatccagtaagtaatttgagagattggattgtctggttagaagcagtggagccctttcctttctctcttctctcttttctcctttgccttcttcctctccgagagaaggtcgacgctacttcttcttcttccttctttcttctggatctgattcggatccatcactctctctttctctacatcaatttgttttctcagatcttcatctttttttcgtatacctgtatttgtcgaccttttctctcaatcactaaaccctcaaatcctttttttggattataagattgcttctctgattgtaattgctttgatgtgtatcagttgacttgtgaaaagtctgcgagtgacttcttcctgtttacacatcagctactccagaatctctcaggtactaattttctcagagtttgaaaaagtttggattttgatctgatccttgttgaataaactattccctcttgcttatctgatccattaaccaattgggtttgcagtttttttagtttaaagttgggtttttgatatcatttttgctcagccaagtcgagagttttcagattctattaagcttataaaattgttgttttgttcagatccttacttttaattctgttttgaattgcagattcttaaaagcttaaatcttttttcgactttgattgtttctgtgcatcgctttgacggatgtggaggaaaaaaggggtgtcttgatgaaatgagggatgttatcaacgttaatgaaactcttgagtgcttgtctgtggccgtcttcttcctcgggcaagtcctctgattcaactggaaaacaagatggattgctttggtacaaagactttggtcagcacctcgttggtgaattctccatggctgttgttcaagccaacaacttgcttgaggatcagagccaagttgagtctgggcctttgagtactcttgactctggtccttatggaacttttattggaatctatgatggccatggcgggcctgagacgtcgcgatttgttaatgatcacctttttcagcatctaaagagtgaggaaactgaatgatatatgcataccaggttacaaaccaaccgtgcggaaactaaaatcttgtttgaattttcaggatttgctgcagagcaggcctctatgtcggtggatgtaattaaaaaggcgtatgaggcgacagaagaaggttttttaggggttgtgacaaagcagtggccaactaagccacagattgcagcggttgggtcttgctgcttggtgggtgttatatgcggagggatgctttacatagctaatgttggggattcccgtgcagttcttggaagggctatgaaggcgacaggtgaggttattgcccttcagctctctgctgaacataatgtgagtatagagtctgttagacaggagatgcactccttgcacccagatgactcgcatattgtcatgttaaagcacaatgtgtggcgtgttaagggccttattcaggtatgtttctcaatctgaatgatatttaattagattttatggttaaatgacggctttaattcaggtacatgagtatcttagtgaatcactcgttgaattgatatatagttgtcttgtaaggcaaaaccggagctaatttgaattaaatggccttggaacttcttgctggtttcatgaagccaaaatgctaaacttcgaatcaaaaaagcagtgtttttttcttacttttaagatgtcaagatcaaccaagaaatttgtcaatgttttatctgtttggcgataaggtctctgcattaaattagactttacattcaaaaggctagatttgtcgtaaccttgactttgacattgccaataccaaacccaccaacccgagaaagtcagagctctggttgaagttgaaataggtattatctaaaagccagtgtatgtatgcccctcctacacaaagatacagatattatataattgactcaacagttgaatccatattttatccctatcactgcatgtagacagtagacactaggtgcaaacgctagatatgtcaagataatcctggagattgaaattgaaaaggctaagatatgtttgttcctttgcagatatctagatccataggcgacgtgtatcttaaaaaggcagagttcaacaaggaaccattgtacacaaagtatagaatccgtgaaccgttcaaaagacctatcttgagtggggaaccaacgataacggagcatgagatccaaccacaagataagtttctaatattcgcttctgatggactatgggaacagatgagcaaccaagaagctgttgacatcgttcagaaccacccacgaaacgtgcgttagacccatttcttcctttttttttcactttcagtaaaaaccaattacaaaaccaaagattgactctatcctttgttgtggaaatgaatgcaggggattgcacggagactggtgaagatggcactgcaagaggcggcaaagaaacgagagatgagatattctgatctaaagaagatagagagaggtgtgaggagacatttccacgatgacataactgtggtcataatcttccttgataccaatcaggtgagctctgtgaaaggacccccactctctatccgaggcggtggtatgacattccccaagaaaatctaagatactccacttttaggctccatcttttgtagttatataaaaaaaaaagtcactgttgttggtataagaatgtataattttaacgtgaaagccacacaatactgatgtttggaactcattccagtaattattaatttttatttattcagcaaactttgtgtaacgatgtaatttgttgttgatgatgaatgaatatgaatgtaggccttcttcttctgtcatgtatttgtattgcattcataatacagaggtgcttgatattgctttttattctatatatgtgaatgaagccaagaatcagttaatactaaagctcaagtgtgcaatatacatcacaatacctttgtccttgtttcaggtctacttttacatcatagaacttgctcctatagataatacaatgcatggtattgacgtaagaactcttagcttttcatattagtagcttataatgttccttaaatgcgacattgatattaagctactactcaataactcaatggtaacgaatcataagtctgaactattcgaaaacagtaatcctgaaaagaaagaatgaagcgtgttgataagtaatgatatgatttgatattgcaagtcaagaaaatataattgggtagagaaagaaagagagataatgtgtgttctgcataaaatttatggcaatggtggaccggagaggttaatgtagtaagaaagcatgagagaagtaaataggggttgcaaaagtttttgccatcccaccagtcctaaccagacaaaaaagaaaggtgttggttttaaacaagctctggtgttacaatgtgacattaaaacacgaatcttttctcttgagaatcatcaatagagagagagagtgagtggtcatattagggttcataacttgcttgaggttttgtaaaaagcagagaaagagagagagaggggcctagaaagaaagaaagaaaagcagtaagagactattaaatgttgcaggcaggtccagccagtgtcccctctcttctgcgagattccctcaaaatttattacaaagcatcttcatcgatgttcttttaattcttcctcaaaatcttttctctttttttggttatatatatttgaattttgatttatgaacctcctcaagaaggaaagacagaggaggagacaaagaagtataggttcacattgcatagccagtttagttttgaaggatggatatatgaaaaaaatatgaagagagagaagagagaagaagaggaggattaaagagggtgaggccagcttttgtgctttggtagtagatgaggtttaaatgctccataccttccatttccttctctcttaccctaatttaattcttcctctcctttataactccccacagacattctcacttctcctcctcacacttcacatcaacacttctttcttgttttttcattttacaatgtttcctttgatatccgcactttaagcatgagagagtccctttgatattggcctggttcactcagatcttacctgaccacacacgtagatatacattattctctctagattatctgattgagccgcgccaatatctcagtactctctcgtctctattttggactttgtggtcttgtagatcgatttgtatgtgtgtgttgaaatggagacaagtacttgtaacttctttgttgttatattgtttacctataggctgatgtcataaactcttttgatcttgtttctaacttccagattcttgaaaaatcaagtcgtgtgtgtgtctccatggaagccttttccatttcttcttttccaaggtatccccttaatcagcttccttgccaagtataaatctgttgtagggttttgcttcaaataatctatatggatccttttagaatgcatattgtgttgataccaattttgagacagaatgtgtcagcgaaactgatcttgtttattagtacaaatgcaggatgttagagagttagctaataacatatacaacaaaatcacaaaaccggtgaagcaatgtaaaatgtcacaatcacaagatgtttttttcaaaaacaggggaaaaagcagagttaatgagagagaagctgacgagcacgaaccctaacctgcaagcgagcaagagcatgcatacaatgtaaagcaattcgtgcttgtctcctcacaagcactcctctagccaccgcctgtaacttcaccagactcttcaatgctttaaacgctcttcttgcctgcaaaacactttaatggttttaccaattttgttttttcaggttttcaaaatctacagagatagaaaatgtaaattaccaggtgccctctgaaaaaggcttggattttaacggcggcaatctcttctcgagttgtttctggagctgaagagcgaatgattgtgattctgctttgagatcgtcggagaagtttccttcttacaacaccaaacaaacgtttggagttggccatgtttatgggtggatcttgtcttcttttggttttggttttggttttaaaagaggacgtctaaggaaacgtaaaatgtgaataaaaagtgaagacggtggctttaagggatatatggaacatgatgtgctctcctcatttctaactaacgaacgtgctcgcatgctcctctctttacacttggtttcgttttgtttattagtagttttcaagacacacgagtctttggtcttttttacatttagttattgaattatagttatgttatgcctaactcaataaaaagaagcttattgagattttgaaaaggttattataaagggtgattgttgcatttcaatgctcaaaattaccatgttatgatatatcttataatcacatgtgaaatctacactatttttaaaatttatgatttagacaattttttcgaaaatgtcactctatttttcaacaagaaaataaaattaggtcattggtattgtggtttgtaatatactaatgacccccactacaatcctaccgacaaagcgtccactctttgtaatgaagttctttgatcatttctctattcaatcttgacactatgaatgtaatcgcgcagcggaagaatggttcatcatactcttacactgttacacaggtccagccctgaactaaagtgtttgtgtttttgtatcggatatgattagcaattgtgcatcaagttagttacggtctcttctcaaatccagtaaaccaaaaaatatataaaaaaatcatactctataataaacttacatcaaatgtcctttttttaacgtttatgttgggagtacgtagtgagatttttcagatatgataaatgtttatgtttgaagttctattttgagtatcatcattttacacgtctcctatcttttcttcaatcaataaagcctttgagcccacaacttcgtaataccgttaaacccaattgttattgggcatgaaaacaaggcccaactcaagtctatctcccccacttgttcatcttctattgtcttgttgcgagtttgcgacttaaacagtaattaaattactaattacgcaataatggcggattaatcgaacctactctctctctctctctctctctctctctctctctctctctctctctctctctctctctctctcgtgcatctccataaactatcttcaaagattaaattttgaagatcttctttttggcttattacccgattctgtcactgtctcttcttcttctccaatcccaatgtttgcttgagagaaagagagagagtcaaaccaaaacatgggcgtttgttgccctttccttcaaccctgggatcgagctcgtgatcaatgtctcctcaacctcccttgtctctccgatcctggtaccaatttcctctctttttaccctaatctatctcacgatccggtgtttcattaggttcttatgattctgtatctaattgctatcttcttcatctacccagttcgaagatcttctctacttctgaaattggcactagtagctctccacctcgtctttatcggctttctcttccttttcgatgctgaatttattgagaaaactaaacgagatccatggttattactccttatctctctctgcttattcaattactgtatccttgagcttaatgttgattactctgtgattctttctctgataggtatatgggctgttatatcttactgttttctgcaacgcttctgcagtattttgtaacttctggctcttcacctgggtatatctacctatctatgcctaaatgtgtgtttcattttgattctgaaacctaaaaaatgggtgcttgaccttcttccttgtcttttaggtatgttgttgatgcaatgagggatgtttgcgaggctagtgcaatgtatagaaacccatctacgacctcaatgtaagaattgttctttcgttcttgtagtggcaaaaactctatgaagtttgatgaaaaaagtgtgattgacactagaatagattataatataggggagggataggaaagtaagaatcttttgatcgtttggttagtgagagacgccttttggatataggagagttaggagagctctacaacagttttccaaggtagttagggttcttgattgtaattcagtgataagaaatacagtttgattacttgattcttatcgaagtgatggaagtgagttctacgttactgtgtctcactgttgtgtttatacttttattattatttaagcgaagacaacatgcttccagaaaaagtgagagcgttgttgttaatgtcgaaggaggatcagcctcatgtcccagaaggcctccaacgccctgggggaagttggttctggacttgtaccctccagggacatccattaggtacatataaacttcaatcaaggttttgtattgtgtgaatcctgaagaatcagcttataacttgtaattgttagtagaaaggagtgttctgaattgttttgtttatgacttgcagaaatttgacatgcggctattgtcatgtggagcaggtaacatttgaatcttgtatgattcaattggacactctaattgttctttcggatttcacctttacctgtttgttcaagttcccactctctaaaactttctctcgaaacacgtaatgctttgcagcctccacgaaccaaacattgtcatgattgtgatcgatgtgttcttcagtttgatcatcactgtgtttggttaggaacatgtataggccagaaaaaccatagtaaattctggtaagcctgcaaaagctgaagtcgttctgttttattgtccaataactcggtactgttatgcaacagactttttcttttttagatcccagtaaagagtttctgtgataccaggtggtacatctgtgaagagacaactctatgcatctggacgctcatcatgtacgttgactacctgagtaatgtagcaaaaccttggtatgatactttcttatctcctcatgtattggccaatttcttctccggccctttagcagctccaacttgttaaaacacgaatttcaaatggaaatgtgaacaggtggaagaatgcaattatcatactgctgcttgtcatattggcgatctctttgatttttgtgctgcttctattgatttttcacaggttggtgttcacattttgtgttatttttcacaatctcatatcttttttctttgtctaactgcttctgtttctatttcaactgatttcttgcagctacctaattttgacaaatcaaagcacttatgaacttgtgagacgaagacgtattccatacatgaggtaattcaatttctatcacctagtaataatatcaggtttgtttgcatgatactaaagctattggggtttgcaggaatattccgggacgagtgcatccgtttagcagaggaattcggaggaacctatacaacgtctgttgcggaaactataatctagactcacttcccacagcgtttgaactcgaggatagatcaagaccctacacctgcatcgatatgttgaaatgtcgctgctgctaagtttttcatttatagttttatacatgcaattgtttcagtgtccaaaaatatgtgaaggtaacatgtttcctctaaaatttggatgatattgtatacatacaaggattccaattaatgagttatatatgcaaagagagtatgttcaataaagaaactctagcttggatcatacgtctgtacaatctttcgagcgactcctccagatcttcaaccgctacatctactttatccaagttggtgatcatagacttgatccgatccttctttatctcttctgccatgctgaatcttcgcagttcttcgtccatcatctggaattcgtttctgtgtccagtcctaacttgaccacttgtactagtaacgttcttgatcaccagtttggtgaccagggcccatttggaaggcctgggcttaggtacagctgtggatagggacaacaagactgtcctaaaggtttgacatgtttgggaacaaacttgttggagcagtgtgatcaagggatgagaggactcagatgaggataggccggtttgtttgagcaacaagagtagcttagcaatgtccttatgaaccgctttcctagagcggataaaagctttgacgtgacaccgaatggtagaatctccactgtgtctcctccgtctgaaagcagaacggaggtcgcggaggcaatccttgatgcggcaagtgatgtctcttagcttggaacacaagtcaaggtgtaaaagggagagatcaagaaggtgagtgaagaaagagtgatgagggactagaagtgaagaaggtgaatcgttgaaaagatgagagacagagtcgtagagatttgagagaagtgagagactattgttatcatctgcacgaagcttattaaggagttgctgaatttggttgagaccatgtgggtgtagccgagctggtaagctactagatcggacgtggtatgaggcagccattgatgatgatgttttgagatagagctagaaagttttagctaaaatgaagttgaataagaatatatatagagggagctagagagagagaggtcaagaaataggaaatagggttgtgaaagtaaaagccacgtgaaggggataatgttctttgttccatcaaagccaacttcatgtccttttctttatgcacttcattatgatctcgacatatatcattagttcgctcaatatgtacctaatttcatgtctttgttttcttaatcctttgttaaatcataatttgatgtacgtacccactaattagatcttaaattaggcaagcaagaatcaaaacaaagatattttgtcaagcccttcctcaactttgggtatattgatgcatggttatgaatggttctaattacttaattagtgagcatatctttatctcatatttgtgtgatcaaatgaagatttagcatcatctaaaacaaaaacaccaaataattgaaactgaaaatgattgatctagctgaagctggtggttggataacactaaatatgggaccgtgtgcacgagtgtcttgttgaaaacttccaaaggaaacgatcaaatagtaattaataatcaatcaatcacaatcgcaccgctttccttttcttaactaatatgaattcatgaacttgacttgtctctatcaaagtacagcctgcaactataatatctctcatctctaattagattacatagtccaatatctaacttcaaaatatctaccctaactattaggcatttgataataatatcttctcgtgacttggatatgtaactttttccttttttgatttccttagatatgtaacttaattggtctacaagaagatatttcatttgagatattttgttcgatcacattcccatgcatgtctgaaaagtttaaacaccaacttggttcttctacgtacagtataaaactaaactctatacacactctccaactaacttttgttttctttaaatatttatccaataataaccaccaatccaagcaaaaaaatatgtagaagaagttgaaactatacatagaaaaaggctagtatatattgtaagttgttcatttgtttgaagtaacatcgatcgggggttttggaaaccgacaaccctaaggtttaggtattgcgagtttacgacgatagacaagaaaaaagttgggccatgtgaagtcacgttactcttggaatggaccctcaattacgtaaaaatagcaactattaacattacaattgtttctcattattgtttgtttgggtttttgtcattttgtgtaataattgtgccacccaattgccataattagtgagccattgctcccatcacctcacctctctattgccgcctccattaccttgtatatctctactgtctcttcctttcttcatctctcacttcaataaaatatcatgcatgatattgttgtagagaattaaagaggtatgaagaagccttatgcttttgtttcatgctcccatgttttctcttctattatatatgatttttggtgacacaaaagaaaaaactaacttttgatatatagatggccattatattcttattaggaaaggtgattcaaagccatgcattcctaataaatgggaagtaacatgcacaaattaactaccgttttgtatttataaaattgatttttaattataatttcagcttttaatcctataatttgatttcttagttatagagaaatgaacttcaataagatcataaaatgatatgtataatgaaacataattttgtattgaaatgtgttagttgcttatatttattattagtatttttcaaattgtttataacttatacatgcatccttttagttgaaaacaataatgtaaaccaggctgcaaaagttgatttatttatgattttcgatttttcgtaataaaacttgttagatttatttttgtcttatatgattacttaagtacaatataaaattgaaatagggtcggcctcgtagcaaccttgaacagttggctgtatcaatgtgtggggacaagaggaatcaaagatccactcctctctcctttttaaatattcattaagagattaacaatttactaaatcattggatcatccgaaattaaagatcttgatgatgatgacttgatcattggtggtatcaaaactcaattagaaaaataataatgtgcacgagggatgggacttttaccaatgctaggctgacatgtaagagtacggacacaaatcttacaaagttcttattgtaccttccctaactttgctctgttgagataagtttctttggtaattaagaagtgtttgaattatgtagctataatttgctgatttatattaaattcttcactacaagaatctgtatctataactataatatgttttgtgtacaattagagactaactaaactaagagtgtgttgtaagaatgttaagcaaataaactctatattggacaagtgacttgaaaagagaatcaagtgcagtctcaagttcctctgttctttcctctaatctctctaacatcttcttaatttccttggagttatccccatctgaacgtagaactgcatccaagttctgcaactcgctcattatcgacgatgacgatcggtgaccaccactgatcagcctggagacgaatttgagagaacatgtctttgtcttcattgttgatgttgtggacaggaacatgaaaagagagcggaagatggagacagagagctcggttgtctcagagtcatccaacttcttcttgaggccaagaagaagcttgttagtctctttcttgatcttcttcctaaaggaaaagtactctttgatctgaacttccatggatttgtcttttcttctcaatgcagactgaagattaaggagatgctctctgagagtgagaactaggtttctcgctgcgtcgcaagagtctagtaacgtggctgacacgtcaagagaatgttcagcttgagctgtgggaagagagtgattgagttggtgaagggaatggtaaagctcagagaggttgagtaacgaggcgtgaagagattgagaatcagatgagttttggaagagatgaatctgagagagagcagcttgaaacttagcagaaggatggtggattcttgatggaagacttatagatctaactggcatttggagtttggtttctggaaatgccatgtttcttaattctgctgaagaaaaagaaagaagagaggtttggtatatatatgatgaagccaaggcatgtgcaggaaacatgggatattatatttgttaaaaataaacagtgattgtttagtcaagccacgatgcacatggaggtggtgaaggaagctttgaatgctctgttttatgctctgtttttgaacgtgaaaccaattttagaggaccaaagatagatagagccattactagatgttgcctttgtgattcccatttagttagccggagagagtgggcttgtcagagtaaggagacatggaaacatttgtcgcagaccattttcagatttcaactctttcttgtttcatccaattgtcaattttttttttcttcctattaacttattcaccattggttcccaagacggtcgtgaagagaaaaaagatgtcacaacactacaaagttgttgtaaaacaaaaaaaataaatactatatacacgaaagatgttacaaaaaaagtattattttgcattttcaatgcaataattaaaatgaattccaagtttattctttttttttttttttttttttttggtgcaccttccaagtttattcttataaactgattcttattatgtaaaaagtagagaaaatgcagagagttacatggaaaaaaattcaatgtagtcttaatttgtgagattttttttttatagaatgacacttagtataaaatcgggaaatattatattaagaataatcctaatcaggattatacaactgtacctactttaaataatgttgattagaatttaggagggcggttcaatgttttgtgccctaataatagaacgttgtattataagtttttgattgagtgcttcaaggctgtcattggattcatgatcaattggaaacattgttaagtgagagggacaaacttatgaattaagatattggccctttgtctccgttacaagagctatgcttatatgataaaatttgtttattaaagaaagaagggatcattgtagatcgcatataaatgatatgatgcaaaattacgggacgatgtaatgtacggggaatcttaaaagtggtacgtttcagacagaagatcttcatggaatttgatacattgaacctcttctcaaagtgttaatcaactcatctttatctgtcagaacccaaacttaaaactcagtcgaaatgtattctcaaaatatagttaataggcaacaaacttcgactatcaataataaccacataatttggtcggaaactagaagacgtcgcaacattatcaaacttaaactatgtagaaaatttccaaaactataagctactttaatgttgattaaaatgtaggagctagggctagtagctgttcaatgggttgtcccctgattcaccatatccattttagtataagtttttctttaatttgattgagtgattcaagactgccattggattcatattgatcattatcaattggacgcattgttgaattagagagacaagattatgaatcaagatcatggcttgtccccgtttaaaaatggtttaaactatatgataagtttatttagaaagaaaaaaagatcatgtacggggaatcttagagaagtggtacgttacagacaaaagatcttcacaaaatttgatacattgaacctcatctcaacgtcaatctacaactacgccttcaatagtaacagaaacaaaacacaaaaagtccataagttaaacactgggcctgacaatttaggcccatatactgaaggaaaacgagtctataaataattgggcctaatgaaatataaaagcccacgatactagattatcgaatggtggtccctattagttacgtaacgtacgaagatttatctacaagtttgaatcactccaaaaatttaaaattcagtgttcaccattttttatttttctccacaaacccaatctttctacaatggttctcttcttctccactcgttttctcttcttctccatcttcttcccttgcctcatctctatcactctctaccaactcgactcattcgagccagcttcacttcccgcggactcactcatcacctctcccacttcaatcccgccacttctcaacgacagatttctcaccggagctgagtttatcggcgtcggtcttctcaataaccccgaggatatcgcctaccataaggactctaatctcatctatactggttgtgttgatggatgggtgaaacgagtcagtgttcacgactcagctaatgactcaatcgtagaggattgggtcaataccggtggtagacctctcggtatcgcttttggacttcacggcgaagtcattgtcgccgacgcaaacaaggtttagacgattctttattttttgaaatcgaattttgaaaatcttatcttaggtttgatattgttggtgtgtgtagggattgttgagtataagcgatggcgggaagaagacggaattgttgacggatgaagcagacggtgttagatttaagctgacggatgcagttaccgttgctgataacggcgttttgtatttcacagatgcttcttcgaaatacgatttctatcaatttatctttgatttcttggaaggcaaaccacacggtcgtgtcatgagctttgatcctaccacacgtgccacacgtgttcttctcaaagacctctacttcgctaatggcatatcaatgtcccctgatcaaacacatttcgtcttctgcgaaaccatcatgtatgtgcattacatttgttatgtttctaactcaaaaccaattggtaattagtttttatttatagattttgtatattactttaggagaagatgcagtaagtattatattagtgaggagcgtgttgaggtatttattcagggcttaccaggttatccagataacattcggtacgacggagatggacattactggattgcattgatttcggtatttatactataattgaaatcttttcattaaagtttatgatgagattattatatcatctttaatcttttatttgatcattgtgttgtgaaaacaggaagtaacaacgtcatggaaactctcgatgaaataccttttcttgaggaaactcatatacatggcggctaagtatggcgtggaactactgtctataaagaatgcagccgttttgcaagtggatttggatgggaatcctatcgcaatgtaccatgatcatccattctctcacataacaagcggagtcaagattgggaaccatctctattttgggagcctcttgcattcctacattactagactcgatcttttaaagtatcccgcacaaaagaagctttaaacatcaagtttaggagtattcactgtcacaaaatgtaaagtcttcgtccctggcacatcatcatgtccttttgtcttcgtccctggcacatcatgtacggttgttgtaaggtcgagttttggtgttaaggtgttgttagtttataatctttgtgaatatggttagcttcttggtgcattgcaaggttaggtgaggtgaatagaggtggcgaataggttttagtggtttcacttttcgttgagctagtgtattagtccatgtttgctcgttcgttttgcgttagttttcggagaagctataagcttctatctggaggttttgtggacggtgttgttctcggaaaactaaagtatagcagaagattgcaaaatacttcgatggtttattgatatgaattgcatgcctttaaatagccatgactacaaagactacgtcgttcacaactaaacaatgagaaacttgcggaagtaagctaaagactaggaccactataacaactactactcgactcttaaagaccatgagtttattcaaacatgagaacaacttaacgacttattcaaaacccaacagacggagagtaatgcttgtgacaactcagatgaggattccagtgcttcggtattgcggcaacagcgtacttttccgagcttcgcggattcggtgtttctcctcctaacttggtcttgatcactcagccgcgatcttttgtacttagagttatagtgttgttctttaattttctgtagattgcttctctctccttctattcttctttgtcaaaaataaaaatggtataaaacttcatcttttacccaaaaaaaataaatgtaaagtcgtgtacagtgaatattactctgttttcaactccagaaaacataattgggcctattgggaatataattaaagcccacgagattcgactagcgagagttgttgttggttacgtaatttagcgcactacggaacaaagaagaccaaatttatacgagtcaacactcaacagcgatttgatctgcgatttgatcatcaacaacaatcactccaaattttgtctgctcaccatttttccacaaagccaattctcttgtatccaatgcctatgttctactcctctcgttttctcttcttcttcaccatcgtccccttactcgtctctatcgctctctaccaactcgacacatttgacccagctccggttccttccgaggcatacgcctcctctactacttcaatcccgccgcttatcagcgacaaatatctcaccggagctgagtttattggcgtcggtcttctcgataaacccgaagatatcgcctatcatcaagactctaatctcatatatactggctgcatagatggatgggtgaaacgagtcagtgtccacgactcagctaatgactcagtcgttgaggattgggtcaataccggtggtagaccgctcggaatcgctttcggagtccacggcgaagtcattgtggcagacgcatacaaggtttggattcgtgaactttttagaaatcgaattttgaaaatctcgatcttaggttgattagtgtgtgtgtcggtagggactgttgaacataagtggtgacgggaagaagacggaattattgacggatcaagcggaaggcgttaaatttaagctgactgatgtagtcgccgttgcagataacggcgttttgtatttcactgatgcttcttacaagtacactctgcatcaagtcaagtttgacattttggaaggtaaaccacatggccgtctcatgagctttgatcccaccacacgtgttacacgtgtacttctcaaagacctttacttcgctaatggcgtctccatgtctcctgatcaaacgcatctcatcttctgtgaaactcccatgtaagtccactgactctgttggattttactaatatccgactcataccagttagcaatgtgttaattcatcgatatactatatctaggagacgatgcagcaagtattacattaatgaagagcgtgtagaggtgtttattcaaggcttaccaggttatccagataacattcggtacgacggagatggccattactggattgctatggtttcggtatgtaaaccagttgaaatattttctttaaggtttatgatgatgagcttttgtatagttttgctcatagtgttgtgaaaacagggagcatcaacgttgtggaggctctcgatgaaataccctttcttgaggaaaatcacagccatagcggctaagtatggcgtggaacttatgttcatgaagaatgcaggtgttctgcaggtggatttggatgggaatcccatcgcttactaccatgatcagagactctctcacattaccaccggtatcaagattgggaactatctctattgtggaaatatcttgcattcgtacattatccgactcgatctcctgaagtatcctgcacagaagaagaagctttgaaacatcaaagtttatacaagcactaaaaatttccactttaggagtatgcactttcacaaaaatgtaaacgtatcgtcccttagaataaatgtatgataatgtctcttaaggagtacatagtagcctgaaacaatgaatacaaaaccaatcaaccatacaagccattccaatgtgtcataaaacttaacaaagtttagtgcgcatgttctttatatattaatgattagaagacgtcccctgactacggttacggttattacgtttacggtttattaaccaccggttacggttataaatttttgttaatcttaaccttaaccgttacatgtacggttaaaacggttacggttaaatacggttacggttaaatacggttatggttaaatacgattacggttatttgataattatgatatagttaatatacgaagtaaaatattatattttttaaccttcataataaaaaaataaataaatagtaatatatcaaataatatttattttacgcgattatgtgcttcaaatatctatagtgaatcatctatctattttcttaagtaaatcaacgaataaacaaattaatggtcataattataataatttaattacattttcgaaacaaaaataattctaaagagaagatgttgtgaacattaaaaaacaattttaagagtataaataataataatatgaactacttataatttaatttatggtcaaaagagtagtggagtaacttcgattgtagtagtgacatattaaacgatttaaggtgatgttttagtaaaataattattcatttaaaattatacacaattacaactatattttaaaagttttaactatacggttaaccgacggttttgatacggttacggttaattaacggttacagttagtatatttttttaaccgtaactaatctattttcacggttaacggttacggtcaggttacggtcagttaattaacggtccggttacgatccgaaatacggttacgattagattttggtcatgcgccttgagctcctctagaaaaatattgggcctactgggaatatggttaaagcccataagattccgtaacataacgtactacggaaaagaagaagtcaacgatttgatctgtgattgtttttctctcaatcaacttcaaaatttgttgattcaccatttttttccacagaaccaatccttctacaatgcctgtattcctctcttctcgttttctcttcttctgcatcatcgtccccttactcatctctatcactctctaccaactcgacacgtttgacccagctcatcatcccgctgactcactcatctcctctactgcttcaatcccgcctctaataaacgaaagatttctcaccggagctgagtttatcggagtcggtcttctcaatagccccgaagacatcgcctaccatgaagactctggtttcatctacactggttgcgttgatggatgggtcaaacgagtcaaggtcgccgagtcggttaatgactcactcgttgaagatttggtcaacaccggtggtagaccgctcggaatcgctttcggaatccacggcgaagtcatcgtcgctgacgcttacaaggtttgggttcgtgacttttttgaaatcgaagtttgaaaattttcaattaataggttggtttctgtctgggtagggactgttgaatataagcggtgacgggaagaagacggaattgttaacggaagaagcggacggcgttagatttaagctaccggatgcagttactgttgcagataacggcgttttgtatttcactgatggttcttataagtacaatctccatcagtttagttttgatatcttggaaggcaaaccacacggtcgtctcatgagctttgatcccaccacaaaagtgacacgtgtacttctcagagatctctactttgctaatggtgtctctctgtctcctgatcaaacccatctcgtcttctgcgaaacccccatgtctctctcacatttcatctctgtttcttttattttccatctgtgttcattgaatcctcatgatctcaagttgttattttgttgttctcagaagaagatgtagtaagtattacatcaatggagggcgcgtggagttatttattcaaggcttaccaggctatccagataacatccggtatgatggagatggacattactggattgcaatgccttcggtaactataaaaattgaaacccttcttagagtttattgagttggtttaggtctcggtcatattcagtatgtgtgtcatcttttatatcatcttttattgatcactattgtatcatcttttattgatcactatagttgaaaacagggagtaacaacgttgtggaagctttcaatgaaatacccattcttgaggaaaatcacagctatggcggctaagtacggctatgaacctatgtttatggagaatgcaggagttttgcaggtggatttggatgggaaccccatcgcatactaccatgatcaggcgctctctcacataaccaccggtgtcaagattgggaactatctctattgtggaagtctctggcattcacacattctccgacttgatctcctaaaataccctgcacaaaacaagaagctttgaaacttcatgtttataaaaaaaaaagacttttacattttaggagtattcactgtcacaaaatgtaaactcattgtcctgagaatgaatcatgatgtttctctatctctaaggatattagtaacctgaaacaatgaataccaaacgaaaaaaatacaatgaagacaaaccaaatcatacttaagatgcacaattcctaaacaaagcagatatttttctttgtttagaactcaaggcaacccattgtccatacaatattggccctactggtaacatagtaaaaccccacgagatttcgactaatagttggttacaacttacaagggactagagtcaaagattattatgagtcaacgatgatttgcgatttcatcattaaatacacgtgtttaatttagttgtttttctcttcaatcacaagttcacaactacaaaattggcatgttcaccatttttccacaaactcaaatttgctccaatgcctgtacttttctcctctcgttctctcatactctccattattgtccccttacttatatctatcgctctctacaaactcgacacattcgaccccgctattgttccttccgatgcattcacatcctctgctacttcactcccgccgcttataaacgacgaatttctcaccggagctgagtttatcggtgtcggtcttctcaatatacccgaagatatcgcctaccataaggaatctaatctcatctacactggttgtgttgatggatgggtgaaacgagtcaaggtcgccgactcggttaatgactcagtcgttgaggattgggtcaatactggtggtagaccgctcggaatcgcgttcggaatccacggcgaagtcattgtcgcagacgtacacaaggttggggttttgaaatcgaattttgaaaaatcacaatcttaggtttgactttgttgttatgtatagggactgttgaatataagcggtgacggaaagaagacggaattgttgacggacgaagcggacggtgtgaagtttaagctgacggatgcagttaccgttgcagataacggcgttttgtatttcacagatgcttcttacaagtacactctcaatcaattgagtttagacatgttagaagggaaaccttttggacgactcttgagctttgatcccaccacacgtgttacaaaagtacttctcaaagacctctacttcgctaatggcatcaccatctctcctgatcaaactcatctcatcttctgtgaaactccaatgtatgtgcattggatcagttaaattttttataaatttccgactcagtttgatttggcaataagttaatttatctatatctgttatatactactttaggaaaaggtgcagcaagtattacatcagtgaggagcgtgtggaggtattcactcaaagcttaccaggttatccagataacattcgttacgatggagatggacattactggattgcattgccttcggtaacgttacaaattgaatttcttttcttttctttgaggtcatgttattaactcattacatgctaataaaggatcatctttgtgttgtggttgtgcaaacagggagtcacgacattgtggaatatctcgttgaaataccctttcttgaggaaactcacagcaatggtggctaagtacggcgtggatcttatgtttatggagaatgcaggcgttttacaggtggatttggatggaaatcccatcgcgtactaccatgatccaaaactctctcacatagccacatgtgacaagattgggaaatatctctattgtggaagtctctcgcaatcacatatcctccgacttgatctcctgaaatatcctgcacagaacaagaaactttgaaatattatgttttcacaaataaggaaagtttccattttaggaaggagcattcactgtcacaaaaaatgtaaactcatttcctgagaatgaatgatgattgtatctcttttttttttttttttttgtctctctcgtagatttgtatcattgattccaaaagcatatactatctagcatgatgtgagtgttattgttcctttaattagactcgatacattcctttaattagacttggtcataattaaaggaataataacactctgtgatatatgaaaagcatataaatggtattaagtaagaatcgaacctgtgacctttaagaagttaagctggcttggaaaggtgtatgaggtggtcgtccactaattagattcagagagtcaggacttgatccaacgattaacgcaaaatcatttgcacgttctacgcaactccataatttcaattcctctcgacgtttcacggcgaagcttcagatctacttttccccagctcaggtgatcttttccatcttccatcatcttcgttcgctgttagagattatcttcttcttcgtcttcgtcttttcctttacgatttctgaatcttcttttgtctcttgtttgattttagtatggagacggttgattctcggaacaaattgcattcccggttacgtttatgggaattccccgatcagtacatcatcgagccagctgatggctcaggctcttcatgtttggatattagtcgtgttgatgcttccatgaagctcatcggttggttttttctgttcacaacattttgtttgattccgtttactggcaaatgcttgttatctcaatcctcttcccttgcgtatactgtgctcagatcaagtcccagaaagcaattccgtgcgtgtccctaaaatccgttccatttttggtgtggttgggatgttgaagctccttgcaggttagtaacaattatcatgtggaacaatactgtatatagatagagccttgtgtatgctgcaggtgtttctgctctatttccattttagatctgagacatattcgagagttttgattagattgcgtatttatttacttaaggatcatacttggtggttgtaactgagagtgaacgtgttggatcgtttctggggcatcctatattcaaagttacaacgcttaaggttcttccttgtgatcattcacttaaaaactcgcctgaagaacaggtaaattctgtggtgtccagttttctgtggaatatattggtagtaatgatggatctcaaaatctcaaagaattgtgtattatttccggcagaaaaagatggagaccgagttctccaagctcttaagtgtagcagaaaagacaactggtctctatttctcatatgaagttaacttaacattgaggtaaaatggtttatttctttccttgtgatgttttatgtttactcattgatgttgaaaattatgttgtattactgtactaaggcatgtacaaaccaatttagctataatagctgacattagtctgaatttcagtagttatttccttttagtttgatctttatttttgcgatttcagctcacaacgcttgcatgaaatgggtgatgagtctaagtcacttcctctgtggagacaggtgaccatataactacttctgggaagtttattaaacttccttggaagcgttcattagtttttccttgttgcaaactgaaaataacttctgctggtggttcgttctttttttacaggctgaaccgaggtttctttggaacaattacatgttggaagttctcatcgataataaggtgtgtatctttgaggtcctttaaatatatcacatccccttgttctgtacttgcagaatttcttaccctttctttcttatgttgtcttaaatttgcagcttgatcagttcttgcttccagtaattcaagggaatatcctttgttatcagttgtttcacttccttttcttctattttcgcttcatggttacgtttatttgtaaaataaatctttccttaaccctgattcacgctttaatagctttgaaacagccattggaagagatattgttgacattactctgattgctaggagatgcactaggagaaacggtacttgtctctatgtgcttttttttacccattattcttcgatttcaagttactcaatcttttttattgcattaaagcctagtgtgaatctgtaagtaggtcagtcatttgtttgactgttagaatctttctactagacatagcaagaaattcagatattgacagcacttgatgggacttgtttttaaaataggaaagcatgatgtttggcaccttaacttcagttgaaacttaattcttttagatagataagagagatatatgtccttgcctgctggaaatttaaatgctgagtattgtgttgtgaatgtgtcttctcccttatcctggatcgttttacaaggtacacgtatgtggagaagaggagcggatcttgatggctatgttgctaattttgtggagactgagcaaattgtacagatgaatgggtatacgtcatcatttgttcaggtagcttttcttacatgcttgcatattgtgaattcccttaatgctgcaaatctttggtcattttataattacctttttttttcatacaacttttctcgagactgagttatccacgattaaactcttaatgttattttgcttcctacatttgcaggtcagaggatccatgccttttatgtgggagcaggttgtagatctgacttacaagcccaagtttgaaattgtccaacctgaagaagctgtgagtactaatttctgactaattacctactcttttagtaatttatctatttctttcaagtaaattgcatagggtgcttttcttgtagaaacggatagctgagcgtcactttttggaccttaggaaaaaatatggatcagttttggcagttgatctcgttaacaaggtacaaattctttcaaattgacatgaatacttgtgtagttatgtgactcaagatgttgtacaggtcatgtttgtgagctcaccttggtctttaaattaattgcattgcataaatctactccaactttttattccttaatttctctaatcagcaaggcggtgaggggcgcttatgcgagaagtatgctactgttatgcaacacattactggggatgatataaggtagtcaatctgttcgtctaatgtgtttcttagacaacttgcttattgttttgcaactcattaaaggaggttccttatcctgtaggtacctgcactttgatttccatcaaatttgtgggcatattcattttgagcgcttatcaattctgtacgagcagatcgagggttttctcgaaaagaatgggtatgattctttgtacatttctatttatgtaatcttgaaatctgaataattataaataaaaaatggcacgtcattttgcattctctgaaatacgcaggtactttctgttgaatgaaaagggtgagaaaatgaaggagcagcttggtgttgtccgatcaaactgcatagattgcttagaccgtacaaatgttacccaggttagccataagaaaactatgatgcagctaatatcatattggcctttgctcatccatgctgcatacttcctgccaaatgcagagcatgataggtcgaaagatgttagaagttcaactcaaaaggattggagtttttggcgctgaagaaaccataagctcacatctgaattttgacgaacactataaaatatgtcagtctcttacctttgtaggaaatctattgtagaacttagatgtaaaattccgaatttattcatgttgcttatgtgctttcgcctttcagtatgggctaatcatggtgatgaaatcagcattcagtactctggtactcctgcacttaaaggagatttcgttaggtacttttgccatatgtttaatcttgggtctgaataagtcctggctataaagcaatataagggagtgttttgtagattactctacattgcaatctaatgcgtctctaaccggctcaattgtaggtatgggcatcggactgcccatggtgtccttaaagatggttggagctccctcagacgctattacctgaataactttgctgatggaactaagcaggtcagtgaattttcattctcagtaactctagttgtatcatctaataatgttcagttgcaactgtgtgcgactacttttggtgtcacttacccctgtaactggaatgtgtcctgacgcaagttaatatggctatgtgcaataggatgcaattgatctcttgcaagggcactacatagttgctgtgagccgagacatggctcctgtacctcaaaagggaggccttgaggctgtagccgtaagcatttatcaattaagattagaactaatttccactatattagcatacaaagaattctagtcttataacaatgtaaatttcatgtctcagaacttcccagtggcattgttcgtggttctgatgagtttctggtttgcaacaatgtctctaaaacaaagtaagtatggtatttcttttgctggatagttaagattttctttcaaacttaatctgaaactgtgtaaaatttgctgagcagctgggagtgattataagcataagcacttgttcttctcattgttgtggacgggaatttgcgtgggcatggctgcactggtgagggccaatggcaggatcttctgtaaccgacctcgtctgcacaagcccagaggctgattcatttcgtgagatcaattaattaaagacatggaactcaagtcggagacaaaagttttctcccttcgattgttttattttattgtatcaaaattggaccttgtgacaccatctagaggcaattgtctcaggtttggatccctcatgatttaatactcccacagccatcaaatgactcgatacagttacacatctttcttcatgttcattctatgattactcggtccgacaaatggctttctaaatccctacttcttgttgagtgattccattgtagaattcatcatgaggcatgatagaccaatggcagacaaaggaagtgcatgttctaggttgtttagccataacctatgcgcatctttgttattcaggctcagtccctagatggtcaatcgttatattagtgttaggatccattattttgtggcagatgcacatctaccctctgttaaatcttttctacggttgtttctgagagattgtgctccattgttgcttgatcattttttggatatttggtaaggattcaaacaaaccaaaaagaggcctcacaagttcaagaagcagttcaatgaggcatttttaaattatgaaaccaaatattaatcatttaaatatggttaagatctacagtacaaaaaatggaatcaatcaaaacttggaaaaaccagagaaaaaagcacacaaccttgaatatctctctgactttcctatcaaaagaggaaacaaaaaaagaataaagtaactcttcttacctttttccaacttgctctcagttccttcacaactcgttcaaaacacctttgaggagatccaatccctctgcagagatgctcctcctcttatgcgacttgggaatctcaatccgaggaggcgcttcgggcgagaaacagacaaccactacagtaagattgtcacagctgtttcgttgaagagcctccttaaccaaagcttgagagcatctctcaggatcattatgctgcatcagctccctcctcaccatcgtcactgcacactggctactcatcacatcccagagtccatcacagcccattataagatactcatcctcttccgtcagcacaatctcttccagctcaggctcgcagctgagcgggcagagtgaacctttagttcccttaatgtgccaatctcctaaggctcgagccacagatagctgcccgttaaggtaaccatcgtagatcacacctccaagcttctcaatacgtagccgctcggaagtacagttaggtttgtggtcctttgataactcaatggctctgcctcgtttcccaagcaccgctctggagtcaccagcgtttgcaatcaacatagtcttgtccaaaatgagagcagtgagtgcagtagtgccagaggatctatcaagagaagaagcatcagccaaagcatgatcagtcttcacaaaagcactccttgttgccttctttgtgctggttgggaaatgtttgtcttccattacaagcttcataatgttcttttttgtgaatgatgcagcatcaacacctccgtgtccatcaaacaccttcataaacaaacaatcattttaaaaaagagaacttttttgaaatattcgatgaagcaaatcttatataccccatagaaagctccagtggatgatccaatatactcagtgagatcatcaacacaaatgaattcatcttccattgattgttttggtcctttatcagaccaacttccagatctaaacacaggctggaatgttgaatttactccttccggagattttgcaccaaatctctcatctccttcctgcaaacaaatcattttcacattgtaagtttcaaactttggattgtttttgagtcacgagatccgatctaagctacattatcttatctgttcgtgaccgtgcaattacaatcacaagcatttgaatttaaaaaaaaaaaaaagcaaagaagagatgaaccaacgtaatcggtcaaccaggcagtgctgttgcaatggcgcattgcagagatgtttcttggaggtttcccagaggaactgagattcgtcattttgtcatctgcgacttccaatgtgttgatcatcggagaaacttcagtcaccggtgccatttccagattccgatcaaaagctttctttttttgtcagagtcatctcttttaaattataaaaatagcttctttcttcttcttcctccttattttactcaccaatcagctctctggatgccacgtgtgcttccaatctccatattttttttttagtttgaatataaaagagaattaaatcttttattagtttcccattagcgaaagatgaagattgtgtctgggttttactctcaagcaaacccatttctttttggtggtgtcgtcggagtctttgtatcattttacttagagaaccctaatggtacattttttcatttctgctccgatttttgttggtttgtttgttgctatctactttacagaaaatgacaacatttttgtgaatttcggtctctatagtgctacaattagccattaaacaattgcaaaagctcgcatttgtaggggtattagatagcaaaaaaagtgttgacttgagatgtttgtttatgcgcactaactcgattgtgtaaaagctgagttttttttcaagtatctatcatctgagtggtctttttggtatttgaaggagcttctgattttgatgtggaagtaatcatatgagattgatagtaagttggggagatatgaattgatggttccactgagacacaaggatatgagtgagtgagagttgaatctgtgaacgagttatggactgtatgcttatgacactgtatggctgcttgcttacgccattgatgattttgagagcatcttacaggttgacagaatcggcttaaccgctaggataaagtttactagagacaggaaccttgtaaatccagcttttgatttgcttaatgtcattggcactggttacaggaccattggttactggtataataatttaggcttgtctgtgacgccgactgacgagctggagaacacatccttttcgggacagaagcttcatagtgttgtctggccatgacagaatttgaacaatggaaggcatttgaggagtggagttccaaatcgttccgaagaggttgtctcagtcaaaagcaacgggatgatctctggcttctgtgttgatgttttcattgctgctctcaacttattaccttatgcagtcccgtttgagcttttagcttttgggagtggtcatgacaatccaagcaactctgagctagtgcgcttgataaggactggggtgagtacataagcactcttttagaacttgttttgatgatccctctgttagcataactcaataataagtatacctctttgttgatcaaaactctgtttgtaaaatagtaaatcatttcgattaatgaatatttaaagtttaatattttattagtttctcttcttctttttgtcactttcatcttcctcagtcctcacgcttgtacatattatacagtagacaaaagcttgaacgaaatatgaaggttgtgtctggctttttgatcaacctttgaatcaatttccaaaacccttaaggtatacacttttttttatctcggtctctatggaaaagctttgattttgtgaatctgggtttctttctttctacatttagccaattatcactttttagggtatagaaagccaaaaaaggtgttcacttgagagtttctttttgcgcactaacttgattgcgtgaaagctgagatttttcatctgagtggtatgtttagtatttgaaggagcttctcactgtgatgtggaagtaatcatatgagattagaagtgggttgggggaaatatgaaggatttgagtgagtgagagttgaatctgtgagtaccattacataaagaagatctccactttacacctactataatgggcactcaattacttcctccaccattgcctcatgcttagtgagagaaagtgacaggtcaagcatctttcttccctcaaacattctatatctgctcgtaatggtggctaaattcagtgacttgaccttcctctcttttttactttgtgaaacaggaatctcctgaaattgagaagatgaagtggtttctgcttatgctcatcatctgcaatgctgttcctttacaaggactcaccaaaattgtctctgcgagaccccaagttgtgaacatcggttcggttttcacatttaattctctcattggtaaagtcatcaaagttgctatggatgctgctgttgaagacgtcaatgctagccccagcattcttaacaccactacacttaggatcatcatgcatgacaccaaatacaatggattcatgagcatcatggaacgtaagtgagacaactctgtgattattggatgattattatgtgtttgtctgtcgaggttcaatcatttcctttttatgttttgctcacggattattcgaaaggtctctactcctctggtcttctttacctttgaatcaactttttatgctcgctgattcattttcatgtcttggattgttctgctatctactttaggttatgatactgcaacatgcaagtatactcatgtccatattctggtatccggttaactgactgattgttttatgtatcatattaaaagctctgcagttcatggaatctgagacagtggccataattggccctcagagatctacgaccgcccgtgtagtagctcatgttgcaacagaactaaaaattcctatactatccttctctgccacagaccctactatgtctcctctgcagttccctttcttcatcagaacttcacaaaatgatctctttcagatggccgccatagcagatattgttcaattctatggttggagagaggtggtagcaatatacggcgatgatgattatggccgaaatggggtagctgccttgggagacaggttatcagagaagcgctgcagaatctcatacaaagcagctttgccccccgcacctaccagagagaatatcaccgatttgctgattaaggtagctttgagtgagtcaaggattatcgtcgttcacgcttctttcatctggggcctagagttgttcaatgtggctcggaatcttggtatgatgagcactggttatgtgtggattgctaccaactggctttctacaattatagacacagactctcctctcccattggacaccataaataacattcaaggggtcattacactgcgcctgcacactcccaactctatcatgaagcagaacttcgttcaaaggtggcataacttaactcatgttggacttagcacttatgcactgtatgcttatgacactgtctggctgcttgctcaggcgattgatgatttcttcaaaaaaggtggaaacgtttccttttcgaagaatccgattatatctgagcttgggggtggaaacttgcaccttgatgctctgaaagtctttgatggaggaaagatatttcttgagagcatcttacaggttgatagaattggcttaaccggtaggatgaagtttactagtgacagaaaccttgtaaatccagcatttgatgtgcttaatgtcattggcactggttacacgactattggttactggtttaatcattcaggcttgtctgtgatgccggctgacgagatggagaacacatctttttcgggacagaagcttcatagtgttgtctggccaggacattcaataaaaataccacgtggctgggtgttctcgaacaatggaaggcatttgaggattggagttccaaatcgttacaggttcgaagaggtagtctcagttaaaagcaatgggatgatcactggcttctgtgtggatgtcttcattgccgctattaacttattaccttacgcagtcccatttgagcttgtagcttttgggaatggtcatgacaacccaagtaactctgagcttgtgcgcttgataacgactggggtgagtacataagcactcttttagaacctgttctgttgatggctctgttggtgggtgtgtatttgacatattttgtggctcaaaaatctttttcacaggtctatgatgcaggtgttggtgatatcaccatcataacagagagaaccaaaatggcagattttactcagccgtatgtggagtcagggctagtggtggtggctcctgttcggaagttgggctccagtgctatggcgttcttgaggccgttcacaccccagatgtggcttattgcagctgcgtctttcctcatagtcggtgctgtcatttggtgtcttgagcacaaacacaatgacgagtttcgaggccctcctcgtagacaagtgatcactactttctggtgaaaacataataagctccaactggatgaacgtaattccaaacactacaattttttctctgaaatatgtcgttgtttacttgtcttgcaggtttagcttttcaactcttttcttctctcatagtaagtgtactgcccacaccccctattctatcttaagttgttttccatttttaaattggtttccaattttctctgctgaatttatacaggagagactaccaccagcaacctaggaagaatagtgctgataatatggctattcgtagttctcataattaactctagttataccgcaagcctcacgtcaatcctcacagttcatcagctgtcttcaccaattaaaggcatagaaactttgcaaacaaaccatgatcctattgggtatccacaaggctcctttgtcagagactatctgatccacgaactcaatatccatgtgtcaagacttgtccctctccggtctccagaggaatatgataaggccttgagagatggtcctgggaaaggtggtgttgcggctgttgttgatgaacgtgcttacatagagcttttcctctcaaacagatgtgagttcggcatagttggtcaagagttcacgaaaaacggatggggatttgtgagtattgttctgaatataaacaactccctacttgtttgatgatagataattaaggaagaaacatcaggaagttcttccatgcataactttttagaatttgataatgcgatagtgatttatgatatgtattttttctctcccactgttcaggcatttccgcgtaactcgccattggctgtggacgtctccgctgcaattttgcagctatcagaaaatggagatatgcagagaattcgggacaaatggttgcttagaaaagcttgctctctgcaaggcgcagagatagaagtggataggctggagcttaagagcttttggggattatttgtggtgtgtggagtggcatgtgttcttgctcttgcagtgtatacagtgttgatgatacgtcagtttggacagcaatgccctgaagaagcagaagggtcgatcaggagaagaagctcaccatccgcgcgtatccactcctttctctcctttgtaaaagagaaagaagaagacgccaaggctaggtcctctagggaaaggcagcttgaagatatctctgcaaatggttcaagtcgctgcaactaaagtatttccagcaaattagttgcaccaaagagacctcataatggctctagtatgtacatatccctctttgttgttacactgtttgtatttaatctcctggtgatttgacttgtacaacaaaaaaataaaaatttggttaatgtctagatctcatctcatggttacaaatgtgaagaactcccaatttgcagctacaacaccaagaatccaggaaagctttatacagcctgaagaagcatgctagaagaccaaacaaatggtatggatttgttattattaatgttctcaacttcaaatacagcaggaatgttgaaaaagacagcagagaatagaaagtcatccatcagagagaaatgaagctgcagcgtcttgctgttttgcaccgacggagaagaactcagagataacttcaaggggcattccctttgtctctggtaccttgaggtacacaaaaacccacgcgacagcacagacgattgcataaatgccaaagactcctgcgatgccaatggatttgagcatgactgggagagtgtaagtgacgattatgtcacagatccagaaagtgagggcacatatggtgatgcagagaccgcgcacagaagtagggaatatctctgagcagaggatgtttggaattgccccaaaacccatcacgaaacagcttaggtacaccgtaacacttgctgtcgatatcaacgcgtttattgaacctccaagattcactaagcttcctatcaccagtgttaccagcgacagtattagaatggggatagtcgaaagcatcagagacctgcaatcacgcttctggtattgttactctttcaaattataccattcagctataaaaaaagagaagggaaagcagagaaaactcgccttctgccagttacatccattaacctcatggagacaagaatgcagggaagcatcaagagtgtggttaaggcgcttatgagaagcgatgcagactctgcacttattccaaggtttgtcaaaagacttgacacacctgtttcttccaatatttgaggtgtataatacatcactccatttattcctgcaaactgcaaacatgcttcttttccgttatttacttccttatttgttttgtctctttactacagacaaagatctgggaaaaaaacattacctgttgcagtatctgaagcccaactccaaccatcaaagctctcttaacccctggttctttcagctccctccagcctggaccatccttaacctcctttggcaacattgcggtctcgcctttacctcctggcatcatcgaagcttggctcacaagtgcagcagcctgaacgtatccattcacctgatcatgaccatcaccctctgggtggaaggagagaagtgatccacgtcgcgaaaaaggaatgttgttggtgttgttgttggcggtttcctcgtgaatatacattctctgtaaccctccattgactctcttaccatctgcaccaaccttgtcattatacttccacgccaattgccatccaccgcctatgcttgtagccgtcgctgtctcacccacgtttgccataaacaagctgctctgtcgcctatgcatggtaccaacggtccgctggtggtagtcatccggctcagtggtttgcggagaaagcagaggactgtttaagttttcatcttggtcagaactatcttcattgtttctctctggatcccactgggactcctgccttcccatcattcccagtatacttcccatattggggaagagcatgctgcgggatgatgcgttcatgttctcggaagggagattctcatgaatgctaccaaagagagtgacaagtgggtccatgagggatccgccacgcggtaacatgctgccttgtcgggaagccaatgcgagagaactctgtcctttcactggcttagccatccatgactgtccatcctctggaccatatagttttatctgatctttcctcggcagttcatttccaccctcgttttcctcgttgtctggtccaatcacatattcttctatcgacgtgtcttttcccaccccaagcccttcaaccagcagagcaagctcgcctaaatcataccccgagttagtataagttcaaagatcgataatctagaggtcttagtgttcatcaagacaaacctgaaacatcttctctgccacggagtctctgcagaacctgtctagcttcatccatacggcctttgctgacaagccaccttggagattcaggcaagaagaaagccgcaagtacaaagtaggcaatggacggaattgacaaaacaccaagcatcagcctccagcttggtgattcttgaagcgacatcccaaacacaagacaatacgacaaaaacatcccaccggatccacaaaactgcgggaaagtgttgagtaatcctctgatctcagaaggtgcggtctcagagatgtagattgggacgagagtgacagctaaaccgatcccaaaaccatcaagaagccttgcgaaaaggagaacgtagacattgggagaccaaaacataacaatgctactcagaaaatagagaacagaggagagtataagcattgatcgccttcctactttgtcagagacaggaccagagaaagttgtgatcaaagtggctccaatgagagacattgccacgatcagtccttctatctttggttctttctccaaatgaaattctttcttaatgtaaattacagctcctgccaccaagaatcaacatcaaatcatagtgagatttcgttagtatgcaaaggaaaaagaaagagaaatatagaaagagagatacctgcaatggtggcattgtcccagccctgcaacatattccctatcgcagcggctaaagcaacaagcactacactcctcatctttttctcttttacagtgattttactttccacgaatcaataattctgttgatagaacatcatatgtttctttcccttctgcaatgtcccagattcatttcacaaaccaaaaaaacgagttgttaaagatattttagtgattaatcaaagcatgtagcagtttgagaagtggtaataacggtaggagagtgaaaaagagttggtcaagcagagagatataaggagaaagtgacattgttattttgaccgattcttaagtcttttatataatggaattacctgataaacaaaacaaaaaggaaatattacaacaactacttaaccatatgaggatcacatttcttcttaatcacacaaatgtctaaatacagttgagtttggaaacctctagtcggtccagagtgtcttacgcttttggacctttggtcagccaattattgcaatctttaaaatcagaccggacattaaaaccggtataatgtctaagcccctttaacggggttttacggtttgaagtcaatgtcggttctacactaaaaatcataaaagccaaaccgaactcaatcttcttcccgcaacttcataatctgctttcccaattctctctcgtcggcgaaggtcctgtgaaaccctagacaaatcgcaggtaagttcgactgtagaaatacacactgatatctcaatttatgttctattctctgcttttgaattgagaccatcgaattccattgtttctctgatgcttttttaatctcacaaaattgttaattttgatgatctttgagcagagatgcaagattcaaagattccacctttctctgaagcaaaaagaatgaagattcctactccaaaacaacccttgactcaactaccaccacgtatcgggaaaaaagtttcaaatcggagcaaatcgaaccaggttcatgcgatttcacatcaacttgagatgtctccaaattcagattcatctccaggaaacgagtacagagcactgagacgcaagtatttgctgctagaggaagatagtttcgcgttggagagagagttaaaggaagcagaggatgaggttaaagcacttgaagatgagaaacttgagctcttggacaaactcgttgttatggaaggtttagttgatccttgattctatagcttagcacttgttttatttgccacattcatatgtaaaaaatcgccttatctagtaacattgtttctgcttatataacttataagcttttgttgtgtgttgagagaattggagatggtaaagaaaactgttgtgttcacttgttgtgtctttcgagttaatacaatggtttgggagtaaagacttaaacttgctacagtttttactagattctagtgctaaatttaaccaaaactgtgaccaaatgtcgtttatttgcaccacgtgtccttcatccacaacagaatgatgatggattagatatttctattcaaaaactataacgtgtggctgcaaatcgattcaccgcttcagactctgttttagaccaaagtcgagtgagtgctttcatcttcttcttaagcatctatggccgcgtctctaacatctcttccgaccggtttttgtcttagccatggtgatgaatgttgcaaccgttcacctaccaaatcaccatttccaggccatcatcctctggctgggaggaggaagggtcacttgctccattacgaacgtagtacagtgaggagattggttgtgacggcggcgacggagggatctaaaaaatctaaagaaagtgaaccgtcttgggcgaatcctgactcagatgagccacctccttgggctagaaacgaaggtcgttcttctacgtcccaagagagctttgaggttcctttctttgtttatctgctagcttccgcgattactgccattgctgctgtatgcttcttcttctctctctttcactccttttgttgtttgcattgctgattctcatatcaaagatgttatcttaattatgcatcgtttggtcactgtagattggttctgttttcgagtacacaagcaagaatccagttttcgggatcttggaatctgacagcatcttttatactcctgtgcttggattctttgctcttactggaatccccacttctgtgagttccttgtctctctcttttcgtttttatccatttgatctgtatcagctgaaaaaatggtttttttgcgttcaggtgttcctatggttcaaatccgttgaagctgctaataaggaagctcaagaacaagataaaagagatggctttctttaaaatccttttgtgtgattctgcaactcatacagtgatgattgttgtctccacatatactttgaatataattctgcatttacaaaggagcttgcttctgttcactgtttatcacccgctagattttgtttgtaatttcaacaatatgccatgttccaacgagtaagtgcctgaaattcgatgatcagctgtcctctcttttatttgcccctgtgaaagatatgaatccacaaagaattcgatatgccatcctgcggtttgaatgtctgaagctgatggtaatgtcaccatttgttcaatgagttgatattcagatcaacaatttgttctggaaagacattgcctgctttcatttgttggtaggagattggagtcaaaatatcagttgaaagttaattccttggcgcttgaagattgtgcttgagcagaggctgtttccggggaatgatcacatacaaaatcatgtgtttaattggtttgtctatgaatgtattttcagttgaatataagtcgagctctaggctcaatttagcagccagaagtgatacctttggaaggaagatatctaattggtaagcaaaaactgttaaaagcacttacatacagataaatcaatgtcctttggcccaatattagctttaacaaaggcttaaccttttgaaaactccagttaggcaataattattacgggtcaaatgacaaagaatgaaccttgtcgggctctttaaagatgggttgttgtataaaaagttgggtagttaaaagattggttatttgggctctgcactcaagtgagagagaagatagatagatctgagtagaatcttcgattcattattcgttgtcgtcgttcatctgtgagaagcggacaaaccaaagaatccaccggagctagtgatatgggtggttccagagagttccgagctgaggaacattcaaatcaattccactctatcatcgccatggccatctggcttggcgccattcacttcaacgtcgctcttgttctctgttctctcattttccttcctccttctctatctctcatgtatatacatctctctctctatctctctctgtttgctgttacaagtctcaaatttaaactctttgaaatcctctgtttttctcagggtcttgggcttgctctctctgtttatctttatcccaatcgatcatcgtagcaaatatggtcgtaagctcgctaggtacatatgcaagcacgcgtgtaattatttccccgtctctctgtacgtcgaggattacgaagctttccagcctaatcgtgcctatggttagtcacaatctccttcttactccaaagtatcaaactttaagatgggtttgtgatatcgttgacttttttaacttgtgattacagtctttggttatgaaccacattcggtgctaccgattggagttgttgctctttgtgatctcacagggtttatgcctattcctaacattaaagttcttgcaagtagtgctgtgagttcattgctgcttaatctctttgtgtagtatcttaaccttcttgtccgcaaactcattgttttgcaaatttgattttagatattctacactccctttctaaggcatatatggacatggttagggctcaccgctgcttctaggaagaatttcacttcccttttggattctggctacagttgtgttcttgtacctggtggtgtgcaggagacttttcatatgcaacatgatgctgaggtagctttattgtagctcaattagtagcattcacttttgctttcatgaaatcattttcttatgagggatttggattacttagaaagcttcaagatttccgtttggtatctcatgtatgtgtagcttgtaaactgaagagaaaagggtttgtttctcctgcaacagtctgatgatttccttattgaactgtatctcacattgcagaatgtcttcctttcaaggagaagaggatttgtgcgcatagccatggaacaggggagccctctggttccagtattctgctttggtcaggtaggggaaaagagttgctcacaaagtgttatgctctatgtagttgtctttatgtacctgaaactctcaaactaatcagttggtcagaaacgtgattcgaattttgtaccgtttctgcattccagttttacgtttcatatgtgcgtttcttttgcaggcacgcgtgtacaaatggtggaagccggattgtgatctctatcttaaactatctagagcaatcagattcaccccgatctgcttctggggagtttttgggtaagcgtatacctttttttgggtcacttccatttgtgtacacttttgcctgcaagatcttgaaagaggtaaactactcccatttcttttctagatcaccattaccgtgtcgacagcctatgcatgtggtcgttggtaaaccaatagaagtcacaaaaactctgaagccaactgacgaagaggttagtcttcttcttgttttcatagcttctgcttagaatgggattgtgctactagacgttactatgcacaatgcttacttgtgagttcagcattcattaacttatgatgttttgggcatctcagattgctaagtttcatggccagtatgtggaagcgcttagggatctgtttgagaggcacaagtcccgagtcggctatgatcttgagctgaaaattctttgaacaaaatctccaatggaaataattacttgtgtgtatccttcattaattgttaccttggagctggatttggacttaatataaatgactacatcatgtagtctacatgtattgcatgtctttagcatcgactgttgaagtaatggaatacgtttataaagcctgtaaattacatgtcgtcttgcacaagagtatgtggtaataataacatttgacccaaaaataatactagttaaatttttccttgacttctctgacaaaccaaactaatttgttcatgaatctctctaagcaaatgaaagtaacaccacgtagtaaaagctctgcttgatgagaaggattcttacacatataagatcattcgaattcaaaaacaaggtggcatgaattggaagtcatgaccacaccatccaattcctcgcgcatcttacgtcttttggccaatttacagagcctcttcgcttcaatgggatccgtagagaaagttgccttcttcagctgtcttgcgttccttagaatgtacgtcgccacttctttctcttcttctcttccccaattgcaatttctccacataaacgtttcgagacattcagggacatactttggttgattccatttcccttggtccttgtattttttgtcgaattctagattttcatgacgagtctcacgctaccaaaagggaaatgaaatgtatattagaattagtccttcaaaactaaccccaacgagagaccatcaacaatagctagctaactaataatgaaatgtcttacatcaatgagcttgaggacttgtagtttaggagagctatcaagcatgtgcgtaagtagattccaccactccactttatgtgtatgcatctccagatataccagctgatggtacataacttcagtaggatatgtaatctattcatgagacaactattagtatatacagaaacaacaaacaagtcaagtgcgataaaagcgaagttaccttcaaaggtgataagtccaaggaaagacgtttggctgacttgagagatcccaaaatattctcattgactatcttagaaacgtttctaatatttgcctcaactagctcggttacattctcaatcagaaaatactcaaaaccttctacactttcaattcccaagtacttcaaagaaggagcttttatcacatatcccctactactctctcgcgcactaaagggatcggaaagcaaaagtgtcttcaaagatggcgcatcaatgatgaaattcactacagcatcaaagaagaaacctcgacgcaggaccaaatgttcaagattagggcagctagcaaaaagattatgaccagattcatcgcctttgtagaccacagatagaaggtgaagagttctaagggacttcatagaaaccggacaaggaacataaatataaacgtaatcaagtttcaaggtctcaagtgtatcaaagcaaaacaagctagttggaaatctgactcgagggccatggtaagaactaagatcgagtacgaactcacgaacatggcgtgtaaatgcaattgtagcccatactccaacataaacaccatcaaattgatctccaactttcagatgcaaactctctagaactggagctttatgtgaaagcaaagacctggtaacgttttcagcaaagtcatatatgtttcgagaagattcaaactcgagtctttgtaccattttccaaagagatagccatcgtttggacaaaacacttgtggatatgacaagttttgtaggaagtgaagacagtatctgcagaagcaaaacttcaggcaactcactgattctgtcctcactcataaaacctggctttctcgaacttttgccactaaaataaaattaagaattagggtttcggaggttagattattaaagaacagttcaaagaggatgcagagaaaagaaacaaacccttgttccatcaatggctttgctgcagaaaatctttcagaatttttcattccccaagttggttcccagtgatatcgtaatgcaaacactccaaacgcaataacgatcaaaactgaacctgttgtgagagagacatacgacgacggcgatatgactagagaagaacgattaaaaaaatttggagacggatgacgacaactgttgagaaaattagggatccatttttaattgtaaaccggttttgttaaggtggaatttttaaaccgaaccgaatctaacacgatcagccaaccatggttactttccggttggtttttaaatccagctctagaataaatgataccgacccggtttaataagtagtgatttgaaatatagaccccttaaacagattttcgtttggttacaaattttttttaacacgaaagcttcaacagagaatcagaagctattttcttcggaattgaatataattgtaaccttttggcatctttgtgaaataaatccgcggtatagttgtatttttgaaaaattggtaaacagaaattggccgaatcaaagcaaaccgaataaattagattatcaaataaatgtaacacacacatgtagataactactttatttccgtgcagcatatattgtgacacgtctatttacacgtcataatataatcagctaatcttaagtttctatgttcacattatcttcctctcatgctttataaaaaatggaagaaaatgacatgaaaaccaaaaccacacgggaatggaaaatgcctttgttttattttatttaaccaaattttgaaacattctctatctctatctctcttttgtctttatatgacttctgttttatttccctgttctttgatcgtgtgtttttaaaccgtcgatgagtgatcggagtctgaaaaagtctctccccggtaaaagcaatcgccaggcggatgagaatttggatctcttctcagtcaaccgtggaacttctttggatggtatcatcatctattatttggtccatttgacttatcttttgcttttctacaccaacacacattgttattgttcttccagttgtgtttagattgctatcacgttttgcattctaagatcgctttcatgctattctcatttcaatttgctagttttttttgccaatctttgtatacaataattcgtcttccaataagtcatccatattaatgtgatctagcatgttgatctatatggtatgcagttttgattaaaccaggaagacattctttccaacaagctaaagttgctaagcatggacctgatgatgacaataatcacaatatacatgcaaatgaaccgtaagaatttatgtaatccctcatttgaatttatacgcaataataaacctgaaatagacaatgcaaacaagttattataatttataatctttgttccttaggctttataccattgcagaagttccattaggagatctttctagattggttctagaagctagaaacacaacttccaagcttcagtccataaccactacaagggttcctttaagggtatgatgcaacaagctcgctataatttcatgtatcatatatgctcatgtaatatttttatattttttcatgtagagcgagagtgatccatcttcaagaccaacgagaagcggttcaacaattcgtccctccaacattcccactatcagatcctcttcggtccccaagaagacaacaacaacacaaattcaagcttcagcttcggtttcttctccaaaaagaactgtctctcgatctttgactccctcatcacgcaaaacaccatcaccaacctcaactccttcaagaatcagtacaactacttcaaccactccttccttcaaaacagctggagatgctcaaagatcaagatcgttgactccaagagcaaagcctcagattgcagcaaatgcaagtagtaggaccaatgtgcgttcttcgtctgtaacatcacgtcctgatagaagcacaacagtttcagcaacacctcggacaccgccaagactaaaagaaacagtcactctagcgtttggtagaccagtgggtcatgttaactcgccaaaacgaaacacctcaccggatgttacaagaacgaggcctaaaggacgctctgcttctccttctctgattccgactttttcaggcacctcacatacaacaacaactcccaagtctataaagccatctgccactgttgccgattcaactaggccaggaaggaagttgtcaagagcttctgttcaaatggctatcaatcacttggtaataacgttctcttgtcattatttgattatagctaaatatttttgtcatttataacgtttatcgtggtcaatagtatagtaacgttttttatgaggttttgcttgacgataatagtgtcacttcaaatgcaggacttggcacgaaatggtaaagttagtacacatacgttttcaagcccaatgttgtatccacacagcatcagatcttcttcttcgggtctaagaaaaccgtgtggtagtagtgaaggcagctgcagcagcagcaaccatgaagaggaagatggaagaagcttaacgaaagaagggaacaacacagagaacaagaacgatagtgctcgttacgacgcactcttgaatgttaaagatgtcaaggatacaaactggctacttaacattgatgatgaatctcctcaatctctcatcttcgacaatgcttttgactctcctcctgatctattctctcctctctgagactctgactccttttgagttttctttcctgtttgttgtagttaaaaacaagagagctgcttggaaaaataatcctgtttcactctttttaaattcttatgcaatcaagagaaaaacattacacatagttcttctactcgttgtttttttctttcaaagtgtttgtttgtattgatcagcagaaatatacaactttgacccttcttgtttaaatcaaaatatttgcaagaaaagacactattggtaggattccgttaaaatgcgtctatatagtaaaacagagaagtgattgatgtacttccgtttatgttcataagagtacgactttgtaataaatgggtactagtttgttcataagagtacgacgtgtaatagagtaaagatgcaacaattaccaaaaacgttatagataacaaaccaaatagtacattgacgcgattcatgtttaatgtttttgtagaaagaagaaaaaaaaatacattattttttacactctccatcgtggcatcaaatacacaaatccaaaattctaaataaataacagcaaagagaataataataaatagttaagaggaaaaaaaatataaaaaagagaaacgaaccggtctcctttggatggagccggtttagaaaggtagtagtgttgtaccgtgttataagacttctctaacgtccctttggattcatgatctgagaaaacacagcacttggagtgagtccatctgaatcttcgctggccaaactcctaccaccgatgctcatatctattccactgctcctcgagtccgtcacattcccttcatacacatcagaactcttgtcgttctttcctttacagtttccatcatcgtacttaatctcatccatgtccatgtcaccgcatactccttttccgttctcttctgcgctttcctggagctgcaacgcaaattctaagttccacagaacatctcccattgatggtctctcaatgccctggtctagaacacacttcatcgcggtttcagcaaactttttgaagcattctggtgtgatcttgcccttgaggtagggatcaacgatttgatctagcatgcctttcttgtagcagtatggtgcccactcagctaagctcacttgttcctttgcaagtgttgggttcaaggctggacgagcgcatagagcttcgaatagaacaacgccaaaggagtagacatcggatttctcagtcagttgctgccgtctgaaatactctgggtcaagataaccgaaacttcctttcacaactgtgcttacgtgtgtgtggtctagtgtaggaccagtcttcgatagaccaaaatcagagaccttggccacccatttctcatccaatagaatgtttgttgtcttcacatctctatggatgattgtgtgttttgcaccagtgtgtagatagtgtaaacctcgggctgctccaatgcatatctcaagacgttgcttccatggaagagaaggattctgggttttgtagagatgctccctcattgtaccatgagccatgtaatcatagactaagatcatttcgcagttctcttcacagtatccaatcaaggacacaagatgacgatgtctaagctttgaaagcatttcaatctcagtctggaactcatgtacaccttgctcggacattgggttgcctctcttgatggctacctttgtagttccgccatcaatctctcctctgtaaaccttgccgaaaccaccaacaccaagcacccgggactcatcaaagtttttagtggcagctttgatctcagcaaacgagaagtgacggcaaagatttgacggaagggacgaggcataacttcctgttgtgtttgtcttcgccgagccagcagaatgtgagtttccatacagagatagtggaagccaccctgatgttgcatcactagcaggctggtaatcaccacgcttacgtctgcggtaagcaccaaacacacaaaacccaatgataagggccagaacaactgcaccactggctgcgcctgcaataatagccgtattgcttttcgatttcctagtagtcgggcgtaggactttagatggatcagcagtcacctgtggaccaggtataggattggtaccagccagattaccatcagaagtattcatcttgaatatctccactccattaagaagagaatcataatactccggcttgttaactgggttaggatgaagagcaagccacaaatcttgctgtccatttccctctggaggattcaccacgtaatccttgtgaaacggaaccccgtttgaactagtccaagcaatcacatcagcttcaggctcagcagtttgattgttgaggtagattgtaaacacccgttggttgatcttagtgatattcgaagaaacctcacagaaatgaagtctaacaaggtaagtgaaaccagagtcaatgctgaaaatccaagtaagattgtagttgagattgatctgagctgttggacccatagacctcgcggttgaataaacatccacaggagcaacataagtaggagtccccgtaggatacttaatcgtcatgttgggatcagcagtctctggaataccaagtcctgcaccaaatatataaggctgatcatcataccacgacctatacaaacccgtatccgcggaaggcgagatatcattccctccaacattgagcctatacacattctcaagagcagtactgttatcaatagtaacagagccagatgatccaaccatagtcaaagtcccatcagtactactatacatatcaggcattgaagtaacctcaatcccattaacaaacgcatacgcattagacggagctgattccggtgtaaacgtcatgttcaacgttccaccttcaacgttgacaacaaactctttgatgatgaaagcgtaagtcaacgcctccgccgtctgagaagcactgaaattcttgagaagagtgtaaggaccaaaggagacggagaataacgagttggtagcgttgagaccgtcgtacgagtttgggtagaagtagagacgcacgaatttacgacctgatgctacagggaaagtgtaagtgaaaggagatcggaaaactctcgccgtcatgtaaggaacttcgggaacggaaggatcttgtgttaacgctggtgatgttttagagtcttcagaggaagatgataagaattttgatttgacatcggagatccatatacggttatctgtgtcggttagattagaagcaccaccaccgcaattcaataggattttctctgttggagagtaatcagcagctgagattaaagttgctgcagatatgagaagaagaagaagaagaagagagagacggaatcgtccctctgtgatcttcatcgatcaagagcacttctccgggaagatcttcttctcagatctatcaaacgaaagaaaatcgaaactataaacttcacagatctaaaaatggaaagtgctagaggtacatgttcgtttggttacgaaaattgagcttaagaaacagatgaaattgaagtttgaatacagtagtaagggagagtgaagtgaggaagatgatgatgatgattacatacctgaagaatcggggaagaaaccctaagcgatgaaatcggagagagtttttggagaagacagagatattttgggggagagagagagaaaatcaattaatgagtggagaggtaagtatagtcaagacgacgacaaaacggacaagcattgttgcttccctctacgcgttaacgttattttaatttcaataagattaaattaagatatagttatcgggtttaattaattgaagccggcttgaaggtgggtgaagtgacgataatgacctttgagtatcaacagctggaattatatatgtcttgaccattcgaaggataatgttgattggtatggtttggatgacagttcataaaatgtgagagagtaaatccattaaactaaagaaaagacaagagaattttatgaaacgcgtatttttgtgtgcggtggtgactgctcgtggctgagctggtactctatattatactataaagggaaagaatggggcctgctttgataataactcgttagttagttaggatagtttacgtaatcatgggctttttactctgatttcagtttatctcctatggcccagttataagtgggccttatctaacgtgcacatgatatatgtttatgacaatcggcgtagcctccttttgatcgatcatgtctaaggtaaggagtaaccttgatctccgatgtcaaatccaagtaaccttgaatacaaataaaccgtggttaaggccgaacgtgtgcaatttttttggtctacaccttcttgattcaaaacagagtttgtgatccttgttttctcagtctttcaaaataaaataaaactttaaaccattacatcaaacatgcactaaatatttacattaacatatcattaattctctttcagacaacacatttttttttgtttatgccaattttaaataataaaaattacatttcaaacatacatgtttctgctacttcgcatttgggcacgcatgagacgagtcacatacatacactcttcccagttcccactcttaacttttcttcactctaggcaaacacaaccaccaaacctaccaactcgcttaaatcgaagcttaccaatcacacttgaaagcttcggagaatgattcttacttaaactcatatccttacttgcatttgttacactcagactcgctgcaccagttgcagctgttataacacaaacatcacattctgtcaccatgcaattaccgcctaagaccttgtttcttccatttactgcttggaattcaaattcaacgtgatcagccattatatttggtttgtttccctcaccaccacctcgatgcatttcggcatcctcataaaacacaaacatgtgatccctttgaacctcaggagcttctctcggagcccaacacctaaacactttctctgctttaccagtgaccacccttttctttgtcttccatctgcttacgcacctaacgccaagcccagcgttgttgtgactatcatccgaaaacgatactacaacgaagatagcaaaccccaagagtgtctttcgcagggaaggagttatctctatcgttgcaaatgaacctgcccgcaaattataagaggttgcctgatctgctcctgcaggcccgcaaatgctgaatgcaagtgctttgatgagttcctggtcccaacaagaaaaaggaaaattacatatacgctaaagtatgtatgagtgagaaagaagggacatgagaacgagagagttacctgctgatgttcgttgccaatgcttgctactttagccaggccttttacaactcgttttctagccacttttggagacttattgaagcaatcgctgaaggtgtaatgactaggaaactgctcaaatccccaagaaactgactctagagacacacaaccatgcacgttcaacagtttcaggctttggggaagcgccggaagcaatatgaggtttctacaatgtcttaatctaaggctatgtagtttagataactgctttatgctttcagggattttgctgaaaccattccgaccaagatccaacagcactactgaaggcaaggaacaaatctcttccggtatatgcatcaaggatgcattgaagagggataaagatactagggcataaaatcttgggaccaagccatgtaaacttgaagatggcagccttggtcgaggcaaatattctctacgctgctctgcattctcattgaaagtcaagagaagataattcaaattactgatgccaatttctgatataccattctggataattgatgttgatacttctcttatggacatcccagatggatccgttagcttaagtgtgacaagagattttaagttactaatctccattggaagatgttgaagccttttgcaattctgtaaatctaaaactacaagttctgagagatgcttgattaacgatgtcacttcctgtatagcggtgccagcaagatataactcttccaagtttcttgggataccttgaatatcctcaagttctgagcatccagagagatttaacaccgcaagagaactcaagttacctattcccattggtaacttgtgaaggcgtttgcagttctccaaatctaatacaaccagttcagaaagatgcatgagcgaaggcagttcttttatggctgtaccaccaagatataactttcttaggttttttggtataccctgaatatcctcaagctctaagcattgagaaagatcaagaactttgaggttgtctagataaaccatgattgacagactttgcgaatcagacgagacctcccgattcaagaatttgtgatctttatgatcataaataaatgagttatcttgtggagagaaggtcacagttggtattgatcttatgccagtttgtttgagatacagctcctcaatattaggtggaacctctgggaaacttttgatctttatgcaaccagagagatttatcacccgaagatgctggaaatgacctgttgctagaaatctttgtagtcttgcacaaccttggagatcaattacctccatatttagagcaatttggagttcttgaataccaactagctgttgtgaatgacaaagcatgatcctcttcagcatcccaagttcctggaaaaacaaattgttaaaaaaataacaacagagacgcaaaatagtaattggttttcaaatgcatatagactttcttaccttggttccttcccaaagtctctgaagtttactgtaacacatgttgagtataacaagatttctagtgttaaaatcttgtggtaaggataacaatggaaaatgttcccagtgcagtaaccttaactcctccggtagggatttgacgcccttgggaaggtgtagagcataatggtttccaggattggaactgcaaatcttcagatatctaagattatacatattctcaaacgccataggattgacatcaaagcttaaggcagatgggtccagaaatatggcttcaatatcttcactaccctgaaacaacaagggaaatagatggatcaagaacttggctcaaattccaatattgagctttgtgggaaaataacagaattcaacataccaaaacttgtctatcttctagaaaatacttaattatcaaaggtttccacagtctggaacgcctctttcctccattgataattttgcgacctatggattggatcaaattatgcatcacaaccctgccttctgccatactcaccaaacacttctcaacaagaacattgatttcaacacgtggaaagaaaccacatccctcaagcagatgtattacacagtcgacattttctcctctgaaaagacacgcaatatcaagaaatatgttcttctcgttggaactaagcgaatcatatgtactcttgactgcatcatgaatctcatgtgccagatatttcttgactttggggaatgcaatctctataggtttaggattcttccttgacatacatccaaaaaaaatcagagctaaaggatttccattagcataatcaatcactttctttgatagtttctgcaaactctcatgtataatctcctttccgaatgcacaccgcgagaatagctgcagagcctcttcctcatttaaacctggaacctcatatatctgatcgacccgacatatagaaaatacttgtttatctcttgaagttatgatgatcaagcttcccggacaaaaccaatcaaaccctccaagaaaggactctgcatctagaggcttacacacatcatcaagaacgacaagaactcttttatggcgtaaaacatttctaaggaggatcggtcttgtaatcgaactttttatgccaagctcttccctaagaattttcccaaagtgtgcctctaacaaaccataaagtcccttctcatgaaacgccttgttaaagtctttgatgaaacaagaagcctcatagtcaccagagagttggtcaaaagcagctttagcaagagttgtcttgcctatgccgggcattccccatattcctatgctgcggacaccccacggttgcttgtaaatcaatgtttctatcttccccaactttgagtagattccaatattgtctgacatgttgagcttttcacgcacatcagccacaatctcctccacaaagtcagagtcactgcatatttttgtagagaatgagtaaatattccaaagtggtctaggtctagtgaagttaatgatttaaaaatgcttcaaagttcaaacctttgcgtatcgtataactcgtggcctggtaagtctacagtttccaatagagcacttggccaatcgcttctaacatcgcccaaattccagatttgtttcttcataaacgatttcgtgactgggtaaaataccggaaccaccgcgagacagtttttccgccggcgttcggaaaccttgaccagctcctccatgcatgacttggatgacgagtatttctcagagaaaaccactacagaagccctagacgtctccaacttggagaatccattgctttccgaatcggagccgttttctctgatgaacgaagatattcctctgcggcggaaagcggcgcagaggtggctgacaaaagagtaccgcaccgtatcctcacttctgtcgaagctgatgtaaacatcgctgcaatccaccatgattgtttaggcgcgtttttcttgcacctagatttaggggattttcagttttttttttttttttcatttagactggatcaagtcggaattagtgaattcgtaaagagacgtgcctcacgatgaagaagtcgttccgagtagagtgttgacctagtttttcttacaaatttcttggaattgtgttttttgatcgaggccggccaagttcttctcggaagtttcgcttattctctttgtcacaacacctcaacttgaacttaaataaaaccagaatgatagttaagttttatagtttgtttaattcgtagcaattctttttgttttgtagatgagtagaacaggtcaagattttgaaaaatggtatctctaaggttgtttgtgcaagcatgtcgtcttgtatctcaaaaggaaactcaagaacgatttgtttccaaacaaactccgatggaggaggcctcttcctcttccgaggtaaaagcacttcctttgccgccgcagcatcaagtgtttgtaaatttcagaggagaagagttgcggaacagctttgttagccatctcagaagtgcattggttaggcatggggtcaacatcttcatagacacgaatgaggaaaaaggtaaacctttacatgtgtttttccagaggattgaagagtcgaggatcgctttggccattttttccgttaggtacaccgaatcgaaatggtgcttgaacgagctagtgaagatgaaggaatgcatggacaagggaaagctcctcatcattcccattttctacaaggttaaagcatacgaagttcggtatcagaagggacggtttggttgtgttttcaagaatttgcgcaatgttgatgttcacaagaaaaaccagtggtctgaagctttgagctctgttgcagaccggatcggcttctcctttgatggaaagaggtatcttttttttagtttcctaatagagtttatctagagcacaagtttgagactttgttagagtttgaccttctcaataaggatctgcctggctttttttcttactgatttttgtagcgacgagcacaacttcatcaatggtattgttgaagaggttaaagaagcgctgagcaagattttgttggacaaaaccaaagatgctttcgtctatcattcgaaaaacaattcaatgtccgtaggaagagaaaagcacgagatttatggactcaaacaacggttagaagaattaaaggagaagctagatcttgattgtgaggagactcggattttgggagttgttgggatgcccggtattggtaaaaccactcttgcaagggagatttatgaaactttgcggtgcaagttcttaaggcatggattaatccaagatattcgtagaacatcgaaggagcacgggttggattgcttgcctgcattactcttggaagagttactcggtgtgacaattccagacatagaatctactcgatgtgcatatgaatcttacaagatggaactacatacacataaagttcttgttgttctcgacgatgtgagtgacaaggaacagatagatgttcttctggggagatgcaactggattaggcagggaagcaggattgtcattgcaacaagcgacaaatcactaatacaagatgtggctgactatacttatgttgtcccacagttgaaccacaaagacggcttaggtcactttgggcgttatgcctttgatcgtcattccaacatacacaacaatgaagtcatcatgaagctatcgaaagagtttgtgcattatggtagaggtcatccactcgttctaaagttgttgggggcagatcttaatgggaaagacgaggaccattggaaaacaaaattggctacactagcagaaaattccagccatagtattcgagatgtgttacaagtaagttatgatgaactgagtcaagtgcataaagatatatttctcgacatagcttgttttagatcggaagatgagagttacattgctagtctactggattcatctgaagctgcaagtgaaataaaagctctcatgaataaattcatgattaatgtttccgaggaccgagtagagatgcatgatttgctatatactttcgctagggaactttgccgaagagcatatgctcaagatggaagggagccacataggttgtggcaccaccaagacataactgatgtgctaaagaacatagaggtgagcctaaaccaagaaaacttttcatatattttacaaagttcttcaagacttactgtatataatgaataatagatttgacgaccgtgacttgtctcccaggaaggcgcagaagtcagagggattttcctaaacatgaatgaaatgaagagggagatgagcttagacagttgcactttcaaatcgatgtgtggtctccgatacctcaagatctatagctcacattgtcctcagcaatgtaagcctaacaataagataaacctccctgatgggctaaacttcccactgaaagaggttcgctatctccactggctagagttcccattgaaggaaattccaccagatttcaacccgcaaaatcttgtcgaccttaagcttccccacagcaagattgaacgaatctggagtgatgataagcataaggtgtgcctcctcctatcatttgactgtatgagtaaaactataatgaatagttttttctactggtggctaaaacttgtgttgtcacaggatacaccaaaattaaagtgggtcaatctcagtcattcaagtaacttgtgggacatttcggggttatcaaaggctcaacgtcttgttttcctaaatctaaaagggtgtacaagtctcaagtctcttccggagataaatttagtctctttagaaattctcatcctcagcaactgctcaaaccttaaggaattccgggtgatctcacaaaatctagaaactctatacttggatggcacttcaattaaagaacttcctttgaacttcaatatactccagagacttgttatattgaatatgaaaggatgcgcgaagctgaaggagtttccggattgtctcgatgacttgaaagctcttaaagaactgatactctcagattgttggaagctccaaaattttccggcaatctgtgaaagaatcaaggttttagagatattaagattggatactacaaccataacagagattccgatgatatcgtcgttacaatgtttatgcttaagcaagaatgatcacatcagctcccttccagataacatcagccaactttctcaactaaaatggttggacttgaagtattgtaagagtcttacatctattccaaagcttccaccaaatcttcaacacttagatgcacacggctgttgctcacttaagacagtctcgaatccactggcatgtcttactacggctcaacagatttattctacattcatcctcacgaactgcaacaaactcgaaaggagtgctaaagaagaaatatcttcctttgctcaaaggaaatgtcagctacttttagatgcacaaaagcgctgcaatgtcagttccttgatctccttcagtatatgttgctatatatcaaaaatattcgtgtctatatgcattttcttgtctatatctatgcagaattctgattcggagcctttgttcagtatatgctttcctggaagtgaactaccttcatggttctgtcatgaagctgttggacctgtattagagctcagaatgcctccacattggcatgaaaataggcttgccggtgtagctctatgtgctgttgtcacatttccaaaatctcaagaacaaatcaactgtttttcagtgaaatgcacattcaaactagaagtaaaagaagggtcgtggatcgaattttcattcccagttggaagatggagtaatcagggcaatatagttgcgaatattgcatcagagcatgtctttattgggtatatcagctgttcaaagatctttaaacgtcttgaaaaccagtattttagcagctctaatcctacaagatccacgcaatctagtaaatgtagtcctactaaggcctctcttaattttatggtcatagatggtacgagtgagctaccgagaatcgaagtgctcaagtgtggcttaaggttagttctttaattgaacctatttaaaccgtcttttcttctgattttttaagagttccttcactcttcagagccttcttaggaaatttagaatccattttttatgttgcaggtttttcaaaggtgttgggagcagtggaaattatttaaagaagttggaagtgaaagaagctgaacaaaatctaagtgctgaaaaagtgtcagaagattggacgtatggatcaagtagcagatgcaaccatgctgtcaaaacatgtccagaacagaggcaagtgacagtcaccgcagaggttgaagcttctcctgaaaaagctgacaatgcagaatttcaaatcaagatcaccccacgtgaagctcaaccacaaccacaaccacgcccatgttcaaaaactttgaaatgggcatgttttacttgttgtgacttccaaaaacatctatgattaatggaggaatatgatagctcaacactacagaagagtagccaagaactacccagtgcacataaaagatcccaaagagtcagattttggggtggttagaggaagaaatcaaagaatgaagacttgggagaaaaaaaaaaactcttttgttggatgtatctctatcactcctctttatgctggtttgttttgtgcccacctaaatggcaaacttcttatatgtcttcagggttacactttttatttgtttggcaccaaaagattgagtttatctatagattttgttggtgtatatttaagttaatggcttttaaatgaataaaaatatatttgagtaaaaaatgaagctcaatctaacgaaaaaccagtcatcaaatcaatcgatcgactttggtaacaacggggaaaaaataagtgttggcagttttgtacaaacagtacacgagaatctgaaaaggagagtacaaaactaaatgtgttcgtataaatgatacaaaatttggaaacaaacacaggttttggttgggagactgtagtaaaaaactttgacatttcaacttcgcaaaaaaaaaagaatttgaacatatttatatataggcgaattgcgtatacattaacctgttttcctgtcttgccttctttgcagtaaactgtatccaagtggttttgaatcttctgtaatggtatccaatgattataacacaaacactctagtcgtcccagtcatgatcccagccatctcggtttggagccctcgctgttaagccattggcagatatgctaacactctttgctgcactacccggcgatttcacagcattattctcatcccaatcatcatcccaaccctcgtcccagtctgctgtctccacatcatggacccctgactcgttttccaagcctggtcctccactcaattctagctcacggtaaggcactccactgcctgcacggcgattcttccggcaaagacagaatgcccaaattcccccaaaaataatgacggatactattaagaaataagcgccgttaatgggcgtcactagtttttcatatgagggaaagtggaatggtaaggtgctttcttctgatgggtacatgtgaagcgcacactgtccttttccagtatctagtatgatcttgtttgtatctccactaatggatatgtttacctgtccaagtgaagatcgattcagtttagtaccttggaataactagagtaaagtttgcgttgtatcattaaaaatcacaaaaagaaaatcagacttttatatatatatatatatatatatatatatatatatatatgtcatgtcaaagataacacttttatctatagaatcaactcggaagaaccgaaagacatactttttgactctggtgttttggcagtgtcagctcttgtaaagcgttaaccggaagaacaatttttgcttttagagatgtttcaccttcattttgaactagaatcaaccagttagcagcacctgcaatcataaaacagagctttgaaatgaaaattcaatcaactcaaacaaaacctagtggagaaaacagaacatacaaagcaaagaccttgcaaattgttggggaataactataatgtctaggaaagtttcatatccttgagatcacaatcatttacaaattaacacaacgtaataactgaataaagtaaaacatatcctaaaccatcatcccagcgaattacaacttatccaactatgctacaaacagcacctgcaatatgacttttattcaagaagctaacacgactaatactattgcattgtcgataaacaggaacgcacatgctagagataccatttcaagtaaactttgaaaccaagaataccaaagaaaacatcactacaagaaggcgcaaatatacctttatcaatgctcaaagtgcacgccaccaatgaattctcagttctacatatgttagactttcctacacaggtatctacactggcagactctgagctccccttatcatcctttcccttagcaggatctttagccaaaggaggactctccttacctggctctgtctcatttttcccactctccaaactctttggaggcggtgccatgttagccggtagctttccactatcctgactatccgttaggttcgctggaggcggaggcgggctcatcggctcggttgtatttaacactttagtatcattcttctcatttacaggtatcagtggaggaggtggactcattgaatcaggctctttaggattagtgttcgtcgaattactagttggcagagttggttctgatgaggtcacattagattttccatctccgatgggttgaggattaatcaacggagactcctgaagcataaacacagagtaaattcaaatcacattgttcaaaacccttaaaaacacataaaggaatcgaattttacttgtttagtggttgaatttgaattatccttttgtgtttcttcatcaactagctcacgaaatctatcgaaggaggaagcattggagatgaacaaaatcaatagaagaagtgttaagaccgaacttctatccatcgcaataagagtcaaaccctaaattatgattcgttcgcttgatttattcgccggtggtgctcttgatttgatccaaagatacttactggatttgaaaatttgcagcagcagctcatatttcagggtatcagtggtccaaaacgcatcgcagatacgcagatcacagttcaggcgattgcgaaaatcaccaagcttagatttcacgcaaaggattggcaacacagtgggagagagatggatgatcgatgtaaacagagttgttgaaaccgaagatcgatgagagaagacgaagagtggctctggctcgtgtcgtgttggtcgcgtctgaaagaaattggatcaaatcgcagagccaaagtagtgtttcacgatccctccacctccacggagccgtcggagaattatttgggccgtaattttaaaagcctattagttgtttcacataagtccaccaggcccatttaccaattatttgattaatctagggaatttaatgaaaaaaaactctcattggtcagatccatttttaaaccctgaactatgtttttagtaaaacaaatcccgaactaaaacctgttaataaacttaacctcacagtaattaaatattaatgggatattaatttccaaaaatcgaccaaagaacaatgacagaatccgtgatccaactgaagatcgtccacctcaaaaagttccttatacacgtgaaaaagttcaaatggtaaaatagagaacaatgaattatgtttcacaagatcttccttttcaaattatttaatttaatatttgcatatttagacttgcagcaactgtcaacaagtcggacgcaacaaacgttcatgcaagcgtaaagcagtgccaaaaccacccaagaaacctcaaggacgaccaaggaaaaaacagaaaacaatggatgaagagaaccctatcactcagccaatacaatcttttcttcaaagttaatgcttgacaagtctttactttagaatatcttgtccctctgaaacgattgtttttttttgtgacaaatattgttgtgttgcaactgcttcgatagttatgttggttggatttatttaagtatgactctttggattattttaagttgttgtgtctttctttcagcttctaaaatccaaactaattaagcaattcaaaatcatttagaacgtttttttgtaataaattcaaaacagttttaaagaacatcatgtggtttttgcgctaaatacaaatgtctcgttgtttttttttttgaaattaatatcccattaatatttaattactgtggggttaactttattaacaggttttagttcagggtttgttttactaaaaacatagtttagggtttaaaaatggatctaccaaagttgagggtttttttcattaaattcccattaatctattactaccttagcggcttagcttaactaatcgaaccttataattatgttgtatcacataagtccaccaggcccattgactaattatttgaataatcttttagttttcttttgaaaacgttattatgattttttttttcttttttttgataaactctttcggctgattcggttagtcccggtaaaaagcaccgaaatactttagagtggatttctctccaaagaaccaccacattgtctgtcccgaatttggaatgttttccgactaatgccaagaaaccaccttcatttctaactaccagataaaccaattggaacaaaatccaactgacagacttcccaaacaaatgtgatttttgtttccaaggaagatcgaactcaggtctggaagttgcacctttctctaaaacttccccaaccactagacaacaaatgcttggatgcgatcataccaacactattattctctttcccaacatgtcaacatttaagaaacttttacatgtttgaacagtgaacttgttatggtaaatcatgtacgtgttaagaatataacatttggtacactctattcaagtaacatgttcatgttttcctatcattctaatgttccaacatttcattgttcattctaatgttatacaattatctaataatctcctcgctagctctaccgtaacgatttatcgcagttccctcatcttataggatctaattaacaacatcgtactttcttagatctttattgtcttacctcattaagtctctaaatccaacatgtctttgtcgaaacttcaagttttatcgacatccaacgtctctcactgcctagatgattcatttggtggatcagactctactgccacgcgctaagttaattcttatcaaggttatctctccgacagcgcacaacaaaatattggggacacttgaggttaattctttgtttgccattacatgtttttataagctaaataaattcttatatgtgcatggttgtgtgaaatttaggatcatcttgcgatatcttgatcacatattcacatgtactgaaaagcagtcaatgttattctttatagtacatatacgtatgtattacacccaaatttctttcatacgtatagatccttgctaatggcaactgtaagcaactatatatacatatatgttcaactgttcaagcacatagatggagttgccgagttggttttgctttcttcattatcaagaaacatgagagaatgagagagagaaagatccgttgtcattattagcatatgaaatcgtgtggttacatagataagaagataaaatcataaaatgggaaatataagcagaatacttttatttaattaggttaaaagctggcaagtttgattagtcgtacatctgatcactagcctctttcacacggcagtcgatatactgcaacattcgaacaaccaaaacaaatatctatcatgagtcatgacattggaaataactaaactccaaatggttttattcatacaagcattaaaaatgtacgttagtccattcttcttattacccacaacatttgaataagttacaaaacgtttgttaaatactcgatcatgtcacatattatatatttttatgtttaaaaagagttgtattagtgtttgaatttttaattaataacttctaaagtgtgtttgtataaatgttttaaaaataaacgtaacaagatagtgaccaaaatttttaatataaaataaaattgatatctcctaatttgattaaataattagttgaattcattggatcctagctatatagtttttggattcaagagtatattaaaactagttatattccaaacaaaacaaatcaacctaacataaaacaaaaataaagttatggagacgtacctgtcgcaattggtgctaaaactgatggggtagggaattgaaacaccacaagtggtaggaagtgcggccacaaggtcggtgttgaggcccttgatttctttacccgctagtttaaggcactcacatacttgtttacggtccggtgtggtctgagccaattggtacaatgacttgactcccacgcagcattgtgatggcaatggaccactgttggtcaagtaggtcaggcactgtgccagtgtgctcgtcactgtcccacactggatggttgactctgttggggatgccatgtagatcgtaaggacaatgaggcatgtgatgatcttcggagtaaacgccatttttgttttttattgcttttactttgttgaggtcggtagggattttataattggaaacactcatgaaggtcatgcgtacccgttaattatgcttagttccatatgcatgcaaatttaatgaaaattttattttttttgttgaattaagattaaaatacacatattccaaagtaaatacgttgcattccctatcgcttaattgagtttcaagaagttgttacatcagaaaactagattcaactctggacggaattataaattacaaatttcggcgattgaaaagaaactaattaacttttttttataatccgaatagatattatgggtttaagtcttaaacttatgactgatggaaaaaattgtaatggttttgtgttaagtaattttcttcttgattaatagtaaattggactgtccttgttatttcgaatcatataacaatattttctgaaataactagataagaaaatcatgaaattattatagtgaatttgttttatgatcaacagaaaataaagtggaaacatatgattaatccttctttttacacaccaagtagaaacatatgcaaatacaacggaattgcattgcatcgattttgaatagaaaagaaatgagtgtacttatgttattcttgggtacatgtcaaacaaggtggtcataaggctaagcacatatttatgaggccacacgatttcaaaagagtaatactattgccaatagtctattggacatgtggaccaaaaatggtgatcaagtggcagttcaaggaagtaatggaatagagaagaaaaaaatggtaatggtccaaagcatcatcaaatggtaaagagttggagacatcaaaggaaaatgacaagagaggaaagcatggaaaacaaatagacggcctaagagatttatatatttatcgaacaaggactcttggaggttatacggtcacacgtacttggagaaatccaaaaggatctccacaagtcctaggcaagttatttacaaaaaaaaaaaatcagaaaaagaaaaaaaaaatgtcgtaggcaactcatattagaaaatagatataatctgtataatcgtaaatcgatctagtgcatgataaaaccatttttttgtttttcgttttatacatgcatggtaatgtaatcgttgtaattaatttatgcttggaaaacacactacaaacttcaataaaagaattcagtaaaagttctagggtcgatcgacattttaattgttttggtatgtttctggtttttcacttttaaaaaggtaacgcttacaagagaaagaaaaaaggtaaggtgtctttagcaactgcatgtagggtcgatcgacatattacacactcaccgacgaaaatattacgaatgatagagtgagaagtgtaaatgagcaagttgtgagagtttgaagaagtagataaggattggttaacaaagagtgatgagtacactcttgaggatattttagagtgaattttgaggatatttgaggatgaattaatgaaatcaaaccttatttcagtgatattctatagtttgttggttccacatgtattagggaatcgaaacatagttttactttctttctttttacaaatgagtccattattggactatcttaattaatatttgattataacttattctatttacatctacacaagtcaactgataataatcgtgttaagagaattgtgtacggactgtggagaagaagaaggaataggatgcatccaaaagcagaacgtgaccaaagttaatggcaagagtttgaagataatacataatcgtaaattcaatatatcattagaggagtacataacacagacgaccaattaaatggaccgtcatatacaaagaaagacatgaaaacacaaaatctagaaacacaacaataataacagtaaaaggatacactagtgtgtatatagtgtgacatcttaattatttttaatactctctcatcgattatatgaaaacccttcaacgtctatcttcttttgatcacctgacgctgcaaccaaccaaatacatcaatcatatggttactaccactccattaaatattaggacctcaagtaaaaatgtaataaatatagagtgagatagaagataacgtacgtgttacagttggttctggcactgatggggtaagagatcctaacacggcaagcaccagggagacgagcagcacgaccagcgttaagtcgagaacccaaggctctcgctgctccctggatacaacgacaagcttgttggcggtcacgggtggtacgagccaagctgttgagcctctgaacgccagagcaacaccctctaggaatgaaaccgcctcgggtcaagtagttatagcattgacctaagctgccggtgactgcgccgcacgagattgctgcctcggacgccattggagcggtcactaacatgcacacaatcaccaaagttgacaacttcaagagtccctccatatcttaattttttttttttctctttttacttagtaagtaatggattggattggataatgaagaatggtaatgaaggttgggtttatatagagagagcttatgagtgcaaatgcatgaaagtagaaggtgtgaggttagttggtggttggtttcatttattgcattgctttctcttctcttatctttcgcttttgtagttttaattactacgtactctccgttttgtcagatctatactatatactatataaaaatgtaattcactcttgtatacacatcctttttttttttttttttctgaaactgtgtctggcctcgctggtacaaaataagaaacgatttgtcttggatccctcaaactatagacaatttaagactagactaggtaattgatattgaaccaaaaccatggttgatggttcagtaacttttaagaaacgtaaatctattaaaccataatgttacaaggacaaagtttttgctttcgactattcatgtttgatgaaaaatcttttctgagagttgaacggccaattccatattccaagtatctaaaattgtagaaacatacatatacttgactatgtgactcaatcccccttgccaaattctccaacattcatgctgctgctctccaccaccgtctctcttacaaacctacaacaacattttcaagaataaggttcaagaaagaaagatacaagtatgaattggaggggacatgaataccatttaccttgccagcttctctcgtgacgattgtaagacgtaaatggagagtacaaaagaaaatgtgagagctgatcacaagtaaacaaaaaaatgagaatacataagtgtatgagcttattgtcccttatttaattaattgtttagcaagacgaaaaatggtttacctgagccaaacaggacatagaatcctgaggatacatcaatctctgactgctccttcctgcatcacaataaagtatctcagccacgtatcagtaacgtggtatccttaagctttgtgattcgaccatatgcacaaacttattagctaggagagataggaaaagaggtgagaaaagttattgtaccatgtgtatctaacaagaacatgttttggccagtgttgaggatcccaaaactgtttgcggatctccgggtgtgtattcagatctgttcatgggtaagatctcaactcaattaaactataactgagtgctactctaaggcaagcagaaatgaaaattcaataatcagagcagagaaagtatgagattcattagttacaagaaattttcaaagccactattaacataaccatgaaactgtaaatttatttagtaatgccaccagacagacagattgaatcagtctatgtaatcgacacaaaaaataacaacagaaaaatggactataatgcaaactgccaatatattagcacccagtgtctctaagaaggtgaagatgatattaacttacaccagatactgtaagactctggatataataagaatagtgtcaaattgaagccagcttaactagggccataggctttgcaaccaaacatcacaacaccgagaagctatcacctaatatatcatataatctagagttttcaaatatgaacgtaggacttggcatatttggtttggccagaccagacaattctcttattcgctcagaaaacagttgttaataaacaggagcacctaatcaggacacaatatagctagataggtagtattacgtacagctatgaggcatgtcgataacttgagctgtgactccaagcagatctcctccagaatatctctgcgcaaatgaaaaaatcaacccacaccgaaaaatccaaaaactggtattacataaatctgccttttttcctggtagcaaataatctaatcaatcaaagcttagataaaaactcaaaatcaatgctaaacataccaaatttacatcgatcatcggaacttctgagctcttacgattaattaccaaaagccagtgaatcagaaatttctcacttccaacttggaattttctgcatgtaaaaatcatccataaacacacatcaggcacaaaattactcttaatttgcatatgaataatgtacaaacacgataaagatgtagccatgtcagtactccatgttcagcacagataagacatcagaaaaacacaaactgcagtaagacagagctaaaaaaaacatacgaaatggcttaagctaatcaaaagagatgagagaaatggcgaaaacatcacagtatcttcatcatttcctttcagagtagcaacaatcgaaattgctaaatacaatctaaaagctggttaaaccagtaatgaactaagcaagtaaactcaattcaaaagcaccaaatagagctatacaaaattttcatttgaaatgcaatcaaaataaataccagaaaattctcacatcttataaggatcagttcctgtgtagccaattggtttcgctattgggatcaacacctaaaaattggcaaagaaaggcaagcttcaatctaaatttccaaattatccatcaaatgtcttaagcctatttgcacacagtacctcgcgattgacggcgaagatcgggcaatgctttccgatcacatcatgccaagtcgttctcgactgccagagaatcaatagatccttagtctccgatcaaattagaaaataatctcagctaatatgttaaagagaagtacgaacagagtgatactgccccatcttgctcatccggacgatatctccaggtcggtaagcgctggagagaaagggaaatgatagagatatcagaactagagcttgaataaaagcgttccacggtcgtaatcctgccaccgcagccatgcccgccataactccgcttcgttggcgaggtttctccgtgaaatttgccggtaattttcttcgccgggagatttagaattgaagcggaggatgtcaaatgtgagaactgagaactctcatccgtgttattattgggccaaaatatcaggcccaactttattgtttccaactcagttttgaccaggtatagggcctagtaactgatatttgttttggtcggagggcctggtaactgattattgacgaaaccaaaaaatcaacttatatcagaacaaaaaaaaagagacatggtttaacatattttagtgatgtatataatttcgttttaaatcattaccaaaaaaaaaaaaaaaaaacacgaccatctgatctgtagctaaacggattgtgttatgagattttagataagaaaattttacacaaagtattagaatacattagtacattgcttcctaattttgatttaaaagaccgtgttatatatttcgaaatagaaaagtattcacaaaaaattatgaaaatatagtttcggggtgaaatgtcgttgttataacgactaaatgttaaaacaaatatgttttgttatatatatttaagatataacgatgttcatttttggactgttatattcacatcagtaaaatctgttgctttaaatattatacataagtttttaatattccatgtaaaattcttaaattttgattttgttttgcagattttctatattgttttgttctgtgtataacaagattttgatttttgttttcaaaacgggactaaaattagagatttttatatatttttttttccaaaacaaaacgtttactagatttttgtaattggagttttcaatttaaaattcttttatagaacaaaattaattattaatttatctaattattggagttatttattttgttttactaaccatatcattatatgtggataccacgtcaaaacaaaatcatattcgagaataacaggtgatcaaatttctggaacacgtgaaacacagttggatccccttataacttaactcgaataaaggattttgaagacaatgattctcaaatgttacctttttcgtttttaaaagcataatcagttatgataatcgagcttattcaatagaaaaaagcgcgactgcgttagttaaatcataaaaaaaaatttatatttgttaaggtacatgagaatttagtatgtcatagaaaaaaaaagttaaaagtttctaactttttgaatgataaaaaagataaagctaaaccatgaaaacatgtattaaaatctttgacatttctcttaaaacattcataagaatcacaactctataaaaacttaatggaagaatatctgaactttacaatttaaccaactatagtgaaatcaaaattctgaacaaataacttcccaagtcactctaatcaaacttcaaatgatgtcttaagaatttaatgctggtcgttgtttctaaatactgcatcgttaaggtaaataaaaaggtacacaaaaagagcgacatctaaaagggtttcaagttgcatacacaaagttaagacaaatttgttttttttttttttccgatgcagtgaaaacaaaaaagagagagaagaaagaacaatcaaataacacaaaatcggtcctcaacagtaatcacttgggatctttcaaaacctagaagaaaaaactcatctttcttcttcttcttcccctgagacatctctcgattctttgtactcgcttgttttgttcgaactcaatcggattttcaatttcctgggcgtagtttacaacgaactgattccttggtttgatcaatcggtgtgttcttgtatcaatcgatttttttggttagtttttaggtttttgttgtttttcatggctgcggatctcgatgatttggaagaagagagttcttcctcattatcaccaccgcttcttccgccgcctcggtctccgttgaatcagccggagttgtggatgagagttgaggaagcaacccgtgaaattatagagcaggttcatccaactcttgtctccgaggatcgacgaagagatgtgattctatatgttcaaaaacttatcagaatgacacttggatgcgaggtaaatttgaataaaacattctctgtttgcattaacatttggataaaaactttaaatgttggaactttacttgagtcggcgatgttgttctgcattttattgagttctcttgatgcaagttgatggctttttaatgttgtcttgtgtctttttattcttaagttgatggcttttcttgttagattatctcaagtcatctacttgttgttttatatttcgaaagtggtgtgcaaaaagcagaccttttttctattactgaccagagattctgcaatgttgcggcttataactttgattgactatgagtgtggtttgcaaagttgtgattttttctactggtatgtgtctttcaggtacattcttttggatcggttccattgaaaacgtatcttcctgatggagacattgatctcactgcttttggtgggctgtatcatgaggaagaactggctgccaaagtttttgctgtacttgagagggaagagcataacttgtcctcccaatttgtggttaaggatgtgcagttaatacgggctgaggtttgtttacataatctctgtgttattcaaattccagaaactagagtctgcagtgaccaatgagtattccaagtttgtatatggtgtttatgcatgcttatcattttgattgttatctcctcaagtacctaaatttcttttcttttgcaggtcaagcttgttaaatgtctggtgcaaaacatcgtggttgatatctctttcaatcagattggtgggatttgcaccctctgctttctcgagaaggtaatctgtcctcttcagtatgaccaattgaccatgctgtgtcaaacaaatttgactaatttttttaaaaggtaaatacagtttaggcttagtttatctgtttaatagtatatgaaagcagaagttgaatgtcactaacctgccataatgacattggttccacctaactgcctgatgggtttctggtaactcaatagattttcttgaatattgcaaatcgtttgcaatatcacatacacgcaataatatgtttgaggcgcatttatctagaagaatattcatattagcaattttcgaagtacgcgtttgtataagataaagatttacttctggaaaattgacgttgactatatgattacgcagattgatcacctcattggaaaggaccatctctttaagcgaagtatcatactaattaaagcttggtgctactatgagagccgtattctcggggctttccatggattaatatcaacatatgctttggagacattggtcttatatatcttccatctgttccactcatcattgaatggaccactagcagtaagggtcttcagcaattatgagggatgcttcatgttttagtctcatcttgattcacttaactttttttatcccataggttctatacaaatttttggactacttcagcaagtttgactgggatagctattgcattagcctgaatggtcctgtctgcctttcctctctaccagatattgttggtaaggatttcctctagtatacagaaaatttagttctttttgcgatttcagtatctgcaatttctttctttaatttctgtagttgagactccggaaaatggaggggaagatcttctgctgaccagtgagttcctcaaggaatgtctggagatgtactctgtaccatcacgaggatttgagacaaacccacgcgggtttcaatcaaagcatcttaatatagtcgatccgcttaaagaaactaacaatcttggacgcagcgtaagcaaaggttgactgccttcttcaaccatcacagtttttattgtcctactgctatctctctctttatggatttagatgtttgagtctttaagaggcctaagacagtagcttttgacctgtccctgtccagagtattagcgttatagaatatttatggtgggtttacctgaaattcttgggctagggtatgtaggttttaagcgcaggctaaaataaagattgtgatattctggtatgtattttcaccctggaaatgaagaaatgtatcaacatgagataaaaaaacctctaaattttagtttgctctggtaatcccgtgaattttatggtctagatgactctctttattggtaaatttttaaagactatggattttactttcttcttacacaggtaacttttatcgtatacgaagtgcattcacatatggtgctcggaagcttgggcaactttttttgcagtcagatgaagccataagttctgagcttcgtaagttcttctctaacatgctactcaggcatgggagtggccagaggcccgatgtccatgatgctattccatttttaaggtacaacaggtacaatgccatattgccagcttccaaccatttccaagaaggccaagtggttaatgaatcagaatcctccagttcgtctggtgctactggaaatggtagacatgaccaagaagactcgttggatgcaggagtaagtataccgagtacaactgggcctgatttaagtggatcacctggtgaaacagtgccttcggtttcagaggaacgattttcgggagacgcaaaagacttggctactttgaggatccaaaagttagagatttccgatgatgcaatgaaatctccgtgccttagtgataaggaaagtgactctcctttgaatggtaagcatcattcttttaatcagatgagaaatggagaagttttaaatggaaacggggtggggaaacagcaagagaattcctggcatactggttccagaagagttaaagatatacatattaatgagaatgagaatgagcatgttggttatgaagacctgccattcgcaagtgcagtaccttggccacaggaggacatgcatctccactactcaggtcattgtgtttctggcactccgaatatgctgtctgacctctcaggcgattacgagagtcagcttaacagtttgcgatttggtcgctggtggtttgattatgtccaaaatggtcctatgtctccactatcacctcctgggctgcctcagctgccgaacaacaattcatgggaagtaatgcggcatgctctgccattcagacgaaatgcgcccactccagtaaatgcaaatggagttgttccgagacaggttttctttcatgtgaaccctcagatgattccaggtcctggttttggtatcgaggaattacctaagccacgaggaactggaacatacttccccaatgcggtaattacttatttgcctctctaacatctcttacagacactccgtaaatggccaagcttctaacgtctcctttatgcagaaccattacagggatagaccgttctccccaagaggaaggaactcacaccaagctaggtcgccgcgtaacaatggccgaagcatgtcacaagcgcactcagaaatgaattttcctgacagaaacacccgtgagagacagcttcattatcccaaccaaacaaatggttcatgcgatatgagtcacactgattcacttgatagctttcctgataccaatggctctacaaatcatccatatgaaaaggctccagactttaggcctacagagcctctaccagtggaagtactctcccctcctgaggacagcaagccaagagatagcattgaaggtcatcataatcggccacatcgtccaaaacctagaccctcctcaacacaggaagaacggtacagcatatatctcttacccttaaaaacatattgtcttcactgaattattaccatggatcaccaaagccactatctaattcactgtagtgatgtacatgtagggtaacacctacacagtcataccatttgacggatgatgatgagttccctcctttgtagctctggcctgaattacaaatgcatgctctctagaccgttataggaacaggtatagttttctaacttggtttgtctcctaagttatttgtttttacctcctgcaagcgcaaaaaaaaaaaaaagaagaagaatggagctgatatgttttgggctgtggttctttcttgtatgttatctctggtgctatagaataatttatatgtatctttatcaaactctctggacaaaacctttgcagagctttgtattttctacttagacaggtttgctgagtgtattataggatgtttttttttttctctcagtctctattctatcttggtaattctccttcttgtttcttgattcttcttcctaatggatgataaaaaaaaaagtaacaaggttttggtcattataagttgattccatatcatgtcttcttttagtaaaatatgtcattagttgaaaagtgcatgaaatagtaaagagttttaaaaaaaaataaataacagcttttaatatggctaatgcgttcagtttttgtgattggtaactatcaaaatggtaaggtccaattgttgacatcaaatcgtaagatttttttagggtgagcagaagtataatatcgctattttttccgcttttgtgattggtaacaatcaaaatgataaatcattcattgtgaaaatcatcactgaattc

SEQ ID NO: 1077 - DNA, 79867 bp, Arabidopsis thaliana
aagctttgaaagcatttcaatctcagtctggaactcatgtacaccttgctcggacattgggttgcctctcttgatggctacctttgtagttccgccatcaatctctcctctgtaaaccttgccgaaaccaccaacaccaagcacccgggactcatcaaagtttttagtggcagctttgatctcagcaaacgagaagtgacggcaaagatttgacggaagggacgaggcataacttcctgttgtgtttgtcttcgccgagccagcagaatgtgagtttccatacagagatagtggaagccaccctgatgttgcatcactagcaggctggtaatcaccacgcttacgtctgcggtaagcaccaaacacacaaaacccaatgataagggccagaacaactgcaccactggctgcgcctgcaataatagccgtattgcttttcgatttcctagtagtcgggcgtaggactttagatggatcagcagtcacctgtggaccaggtataggattggtaccagccagattaccatcagaagtattcatcttgaatatctccactccattaagaagagaatcataatactccggcttgttaactgggttaggatgaagagcaagccacaaatcttgctgtccatttccctctggaggattcaccacgtaatccttgtgaaacggaaccccgtttgaactagtccaagcaatcacatcagcttcaggctcagcagtttgattgttgaggtagattgtaaacacccgttggttgatcttagtgatattcgaagaaacctcacagaaatgaagtctaacaaggtaagtgaaaccagagtcaatgctgaaaatccaagtaagattgtagttgagattgatctgagctgttggacccatagacctcgcggttgaataaacatccacaggagcaacataagtaggagtccccgtaggatacttaatcgtcatgttgggatcagcagtctctggaataccaagtcctgcaccaaatatataaggctgatcatcataccacgacctatacaaacccgtatccgcggaaggcgagatatcattccctccaacattgagcctatacacattctcaagagcagtactgttatcaatagtaacagagccagatgatccaaccatagtcaaagtcccatcagtactactatacatatcaggcattgaagtaacctcaatcccattaacaaacgcatacgcattagacggagctgattccggtgtaaacgtcatgttcaacgttccaccttcaacgttgacaacaaactctttgatgatgaaagcgtaagtcaacgcctccgccgtctgagaagcactgaaattcttgagaagagtgtaaggaccaaaggagacggagaataacgagttggtagcgttgagaccgtcgtacgagtttgggtagaagtagagacgcacgaatttacgacctgatgctacagggaaagtgtaagtgaaaggagatcggaaaactctcgccgtcatgtaaggaacttcgggaacggaaggatcttgtgttaacgctggtgatgttttagagtcttcagaggaagatgataagaattttgatttgacatcggagatccatatacggttatctgtgtcggttagattagaagcaccaccaccgcaattcaataggattttctctgttggagagtaatcagcagctgagattaaagttgctgcagatatgagaagaagaagaagaagaagagagagacggaatcgtccctctgtgatcttcatcgatcaagagcacttctccgggaagatcttcttctcagatctatcaaacgaaagaaaatcgaaactataaacttcacagatctaaaaatggaaagtgctagaggtacatgttcgtttggttacgaaaattgagcttaagaaacagatgaaattgaagtttgaatacagtagtaagggagagtgaagtgaggaagatgatgatgatgattacatacctgaagaatcggggaagaaaccctaagcgatgaaatcggagagagtttttggagaagacagagatattttgggggagagagagagaaaatcaattaatgagtggagaggtaagtatagtcaagacgacgacaaaacggacaagcattgttgcttccctctacgcgttaacgttattttaatttcaataagattaaattaagatatagttatcgggtttaattaattgaagccggcttgaaggtgggtgaagtgacgataatgacctttgagtatcaacagctggaattatatatgtcttgaccattcgaaggataatgttgattggtatggtttggatgacagttcataaaatgtgagagagtaaatccattaaactaaagaaaagacaagagaattttatgaaacgcgtatttttgtgtgcggtggtgactgctcgtggctgagctggtactctatattatactataaagggaaagaatggggcctgctttgataataactcgttagttagttaggatagtttacgtaatcatgggctttttactctgatttcagtttatctcctatggcccagttataagtgggccttatctaacgtgcacatgatatatgtttatgacaatcggcgtagcctccttttgatcgatcatgtctaaggtaaggagtaaccttgatctccgatgtcaaatccaagtaaccttgaatacaaataaaccgtggttaaggccgaacgtgtgcaatttttttggtctacaccttcttgattcaaaacagagtttgtgatccttgttttctcagtctttcaaaataaaataaaactttaaaccattacatcaaacatgcactaaatatttacattaacatatcattaattctctttcagacaacacatttttttttgtttatgccaattttaaataataaaaattacatttcaaacatacatgtttctgctacttcgcatttgggcacgcatgagacgagtcacatacatacactcttcccagttcccactcttaacttttcttcactctaggcaaacacaaccaccaaacctaccaactcgcttaaatcgaagcttaccaatcacacttgaaagcttcggagaatgattcttacttaaactcatatccttacttgcatttgttacactcagactcgctgcaccagttgcagctgttataacacaaacatcacattctgtcaccatgcaattaccgcctaagaccttgtttcttccatttactgcttggaattcaaattcaacgtgatcagccattatatttggtttgtttccctcaccaccacctcgatgcatttcggcatcctcataaaacacaaacatgtgatccctttgaacctcaggagcttctctcggagcccaacacctaaacactttctctgctttaccagtgaccacccttttctttgtcttccatctgcttacgcacctaacgccaagcccagcgttgttgtgactatcatccgaaaacgatactacaacgaagatagcaaaccccaagagtgtctttcgcagggaaggagttatctctatcgttgcaaatgaacctgcccgcaaattataagaggttgcctgatctgctcctgcaggcccgcaaatgctgaatgcaagtgctttgatgagttcctggtcccaacaagaaaaaggaaaattacatatacgctaaagtatgtatgagtgagaaagaagggacatgagaacgagagagttacctgctgatgttcgttgccaatgcttgctactttagccaggccttttacaactcgttttctagccacttttggagacttattgaagcaatcgctgaaggtgtaatgactaggaaactgctcaaatccccaagaaactgactctagagacacacaaccatgcacgttcaacagtttcaggctttggggaagcgccggaagcaatatgaggtttctacaatgtcttaatctaaggctatgtagtttagataactgctttatgctttcagggattttgctgaaaccattccgaccaagatccaacagcactactgaaggcaaggaacaaatctcttccggtatatgcatcaaggatgcattgaagagggataaagatactagggcataaaatcttgggaccaagccatgtaaacttgaagatggcagccttggtcgaggcaaatattctctacgctgctctgcattctcattgaaagtcaagagaagataattcaaattactgatgccaatttctgatataccattctggataattgatgttgatacttctcttatggacatcccagatggatccgttagcttaagtgtgacaagagattttaagttactaatctccattggaagatgttgaagccttttgcaattctgtaaatctaaaactacaagttctgagagatgcttgattaacgatgtcacttcctgtatagcggtgccagcaagatataactcttccaagtttcttgggataccttgaatatcctcaagttctgagcatccagagagatttaacaccgcaagagaactcaagttacctattcccattggtaacttgtgaaggcgtttgcagttctccaaatctaatacaaccagttcagaaagatgcatgagcgaaggcagttcttttatggctgtaccaccaagatataactttcttaggttttttggtataccctgaatatcctcaagctctaagcattgagaaagatcaagaactttgaggttgtctagataaaccatgattgacagactttgcgaatcagacgagacctcccgattcaagaatttgtgatctttatgatcataaataaatgagttatcttgtggagagaaggtcacagttggtattgatcttatgccagtttgtttgagatacagctcctcaatattaggtggaacctctgggaaacttttgatctttatgcaaccagagagatttatcacccgaagatgctggaaatgacctgttgctagaaatctttgtagtcttgcacaaccttggagatcaattacctccatatttagagcaatttggagttcttgaataccaactagctgttgtgaatgacaaagcatgatcctcttcagcatcccaagttcctggaaaaacaaattgttaaaaaaataacaacagagacgcaaaatagtaattggttttcaaatgcatatagactttcttaccttggttccttcccaaagtctctgaagtttactgtaacacatgttgagtataacaagatttctagtgttaaaatcttgtggtaaggataacaatggaaaatgttcccagtgcagtaaccttaactcctccggtagggatttgacgcccttgggaaggtgtagagcataatggtttccaggattggaactgcaaatcttcagatatctaagattatacatattctcaaacgccataggattgacatcaaagcttaaggcagatgggtccagaaatatggcttcaatatcttcactaccctgaaacaacaagggaaatagatggatcaagaacttggctcaaattccaatattgagctttgtgggaaaataacagaattcaacataccaaaacttgtctatcttctagaaaatacttaattatcaaaggtttccacagtctggaacgcctctttcctccattgataattttgcgacctatggattggatcaaattatgcatcacaaccctgccttctgccatactcaccaaacacttctcaacaagaacattgatttcaacacgtggaaagaaaccacatccctcaagcagatgtattacacagtcgacattttctcctctgaaaagacacgcaatatcaagaaatatgttcttctcgttggaactaagcgaatcatatgtactcttgactgcatcatgaatctcatgtgccagatatttcttgactttggggaatgcaatctctataggtttaggattcttccttgacatacatccaaaaaaaatcagagctaaaggatttccattagcataatcaatcactttctttgatagtttctgcaaactctcatgtataatctcctttccgaatgcacaccgcgagaatagctgcagagcctcttcctcatttaaacctggaacctcatatatctgatcgacccgacatatagaaaatacttgtttatctcttgaagttatgatgatcaagcttcccggacaaaaccaatcaaaccctccaagaaaggactctgcatctagaggcttacacacatcatcaagaacgacaagaactcttttatggcgtaaaacatttctaaggaggatcggtcttgtaatcgaactttttatgccaagctcttccctaagaattttcccaaagtgtgcctctaacaaaccataaagtcccttctcatgaaacgccttgttaaagtctttgatgaaacaagaagcctcatagtcaccagagagttggtcaaaagcagctttagcaagagttgtcttgcctatgccgggcattccccatattcctatgctgcggacaccccacggttgcttgtaaatcaatgtttctatcttccccaactttgagtagattccaatattgtctgacatgttgagcttttcacgcacatcagccacaatctcctccacaaagtcagagtcactgcatatttttgtagagaatgagtaaatattccaaagtggtctaggtctagtgaagttaatgatttaaaaatgcttcaaagttcaaacctttgcgtatcgtataactcgtggcctggtaagtctacagtttccaatagagcacttggccaatcgcttctaacatcgcccaaattccagatttgtttcttcataaacgatttcgtgactgggtaaaataccggaaccaccgcgagacagtttttccgccggcgttcggaaaccttgaccagctcctccatgcatgacttggatgacgagtatttctcagagaaaaccactacagaagccctagacgtctccaacttggagaatccattgctttccgaatcggagccgttttctctgatgaacgaagatattcctctgcggcggaaagcggcgcagaggtggctgacaaaagagtaccgcaccgtatcctcacttctgtcgaagctgatgtaaacatcgctgcaatccaccatgattgtttaggcgcgtttttcttgcacctagatttaggggattttcagttttttttttttttttcatttagactggatcaagtcggaattagtgaattcgtaaagagacgtgcctcacgatgaagaagtcgttccgagtagagtgttgacctagtttttcttacaaatttcttggaattgtgttttttgatcgaggccggccaagttcttctcggaagtttcgcttattctctttgtcacaacacctcaacttgaacttaaataaaaccagaatgatagttaagttttatagtttgtttaattcgtagcaattctttttgttttgtagatgagtagaacaggtcaagattttgaaaaatggtatctctaaggttgtttgtgcaagcatgtcgtcttgtatctcaaaaggaaactcaagaacgatttgtttccaaacaaactccgatggaggaggcctcttcctcttccgaggtaaaagcacttcctttgccgccgcagcatcaagtgtttgtaaatttcagaggagaagagttgcggaacagctttgttagccatctcagaagtgcattggttaggcatggggtcaacatcttcatagacacgaatgaggaaaaaggtaaacctttacatgtgtttttccagaggattgaagagtcgaggatcgctttggccattttttccgttaggtacaccgaatcgaaatggtgcttgaacgagctagtgaagatgaaggaatgcatggacaagggaaagctcctcatcattcccattttctacaaggttaaagcatacgaagttcggtatcagaagggacggtttggttgtgttttcaagaatttgcgcaatgttgatgttcacaagaaaaaccagtggtctgaagctttgagctctgttgcagaccggatcggcttctcctttgatggaaagaggtatcttttttttagtttcctaatagagtttatctagagcacaagtttgagactttgttagagtttgaccttctcaataaggatctgcctggctttttttcttactgatttttgtagcgacgagcacaacttcatcaatggtattgttgaagaggttaaagaagcgctgagcaagattttgttggacaaaaccaaagatgctttcgtctatcattcgaaaaacaattcaatgtccgtaggaagagaaaagcacgagatttatggactcaaacaacggttagaagaattaaaggagaagctagatcttgattgtgaggagactcggattttgggagttgttgggatgcccggtattggtaaaaccactcttgcaagggagatttatgaaactttgcggtgcaagttcttaaggcatggattaatccaagatattcgtagaacatcgaaggagcacgggttggattgcttgcctgcattactcttggaagagttactcggtgtgacaattccagacatagaatctactcgatgtgcatatgaatcttacaagatggaactacatacacataaagttcttgttgttctcgacgatgtgagtgacaaggaacagatagatgttcttctggggagatgcaactggattaggcagggaagcaggattgtcattgcaacaagcgacaaatcactaatacaagatgtggctgactatacttatgttgtcccacagttgaaccacaaagacggcttaggtcactttgggcgttatgcctttgatcgtcattccaacatacacaacaatgaagtcatcatgaagctatcgaaagagtttgtgcattatggtagaggtcatccactcgttctaaagttgttgggggcagatcttaatgggaaagacgaggaccattggaaaacaaaattggctacactagcagaaaattccagccatagtattcgagatgtgttacaagtaagttatgatgaactgagtcaagtgcataaagatatatttctcgacatagcttgttttagatcggaagatgagagttacattgctagtctactggattcatctgaagctgcaagtgaaataaaagctctcatgaataaattcatgattaatgtttccgaggaccgagtagagatgcatgatttgctatatactttcgctagggaactttgccgaagagcatatgctcaagatggaagggagccacataggttgtggcaccaccaagacataactgatgtgctaaagaacatagaggtgagcctaaaccaagaaaacttttcatatattttacaaagttcttcaagacttactgtatataatgaataatagatttgacgaccgtgacttgtctcccaggaaggcgcagaagtcagagggattttcctaaacatgaatgaaatgaagagggagatgagcttagacagttgcactttcaaatcgatgtgtggtctccgatacctcaagatctatagctcacattgtcctcagcaatgtaagcctaacaataagataaacctccctgatgggctaaacttcccactgaaagaggttcgctatctccactggctagagttcccattgaaggaaattccaccagatttcaacccgcaaaatcttgtcgaccttaagcttccccacagcaagattgaacgaatctggagtgatgataagcataaggtgtgcctcctcctatcatttgactgtatgagtaaaactataatgaatagttttttctactggtggctaaaacttgtgttgtcacaggatacaccaaaattaaagtgggtcaatctcagtcattcaagtaacttgtgggacatttcggggttatcaaaggctcaacgtcttgttttcctaaatctaaaagggtgtacaagtctcaagtctcttccggagataaatttagtctctttagaaattctcatcctcagcaactgctcaaaccttaaggaattccgggtgatctcacaaaatctagaaactctatacttggatggcacttcaattaaagaacttcctttgaacttcaatatactccagagacttgttatattgaatatgaaaggatgcgcgaagctgaaggagtttccggattgtctcgatgacttgaaagctcttaaagaactgatactctcagattgttggaagctccaaaattttccggcaatctgtgaaagaatcaaggttttagagatattaagattggatactacaaccataacagagattccgatgatatcgtcgttacaatgtttatgcttaagcaagaatgatcacatcagctcccttccagataacatcagccaactttctcaactaaaatggttggacttgaagtattgtaagagtcttacatctattccaaagcttccaccaaatcttcaacacttagatgcacacggctgttgctcacttaagacagtctcgaatccactggcatgtcttactacggctcaacagatttattctacattcatcctcacgaactgcaacaaactcgaaaggagtgctaaagaagaaatatcttcctttgctcaaaggaaatgtcagctacttttagatgcacaaaagcgctgcaatgtcagttccttgatctccttcagtatatgttgctatatatcaaaaatattcgtgtctatatgcattttcttgtctatatctatgcagaattctgattcggagcctttgttcagtatatgctttcctggaagtgaactaccttcatggttctgtcatgaagctgttggacctgtattagagctcagaatgcctccacattggcatgaaaataggcttgccggtgtagctctatgtgctgttgtcacatttccaaaatctcaagaacaaatcaactgtttttcagtgaaatgcacattcaaactagaagtaaaagaagggtcgtggatcgaattttcattcccagttggaagatggagtaatcagggcaatatagttgcgaatattgcatcagagcatgtctttattgggtatatcagctgttcaaagatctttaaacgtcttgaaaaccagtattttagcagctctaatcctacaagatccacgcaatctagtaaatgtagtcctactaaggcctctcttaattttatggtcatagatggtacgagtgagctaccgagaatcgaagtgctcaagtgtggcttaaggttagttctttaattgaacctatttaaaccgtcttttcttctgattttttaagagttccttcactcttcagagccttcttaggaaatttagaatccattttttatgttgcaggtttttcaaaggtgttgggagcagtggaaattatttaaagaagttggaagtgaaagaagctgaacaaaatctaagtgctgaaaaagtgtcagaagattggacgtatggatcaagtagcagatgcaaccatgctgtcaaaacatgtccagaacagaggcaagtgacagtcaccgcagaggttgaagcttctcctgaaaaagctgacaatgcagaatttcaaatcaagatcaccccacgtgaagctcaaccacaaccacaaccacgcccatgttcaaaaactttgaaatgggcatgttttacttgttgtgacttccaaaaacatctatgattaatggaggaatatgatagctcaacactacagaagagtagccaagaactacccagtgcacataaaagatcccaaagagtcagattttggggtggttagaggaagaaatcaaagaatgaagacttgggagaaaaaaaaaaactcttttgttggatgtatctctatcactcctctttatgctggtttgttttgtgcccacctaaatggcaaacttcttatatgtcttcagggttacactttttatttgtttggcaccaaaagattgagtttatctatagattttgttggtgtatatttaagttaatggcttttaaatgaataaaaatatatttgagtaaaaaatgaagctcaatctaacgaaaaaccagtcatcaaatcaatcgatcgactttggtaacaacggggaaaaaataagtgttggcagttttgtacaaacagtacacgagaatctgaaaaggagagtacaaaactaaatgtgttcgtataaatgatacaaaatttggaaacaaacacaggttttggttgggagactgtagtaaaaaactttgacatttcaacttcgcaaaaaaaaaagaatttgaacatatttatatataggcgaattgcgtatacattaacctgttttcctgtcttgccttctttgcagtaaactgtatccaagtggttttgaatcttctgtaatggtatccaatgattataacacaaacactctagtcgtcccagtcatgatcccagccatctcggtttggagccctcgctgttaagccattggcagatatgctaacactctttgctgcactacccggcgatttcacagcattattctcatcccaatcatcatcccaaccctcgtcccagtctgctgtctccacatcatggacccctgactcgttttccaagcctggtcctccactcaattctagctcacggtaaggcactccactgcctgcacggcgattcttccggcaaagacagaatgcccaaattcccccaaaaataatgacggatactattaagaaataagcgccgttaatgggcgtcactagtttttcatatgagggaaagtggaatggtaaggtgctttcttctgatgggtacatgtgaagcgcacactgtccttttccagtatctagtatgatcttgtttgtatctccactaatggatatgtttacctgtccaagtgaagatcgattcagtttagtaccttggaataactagagtaaagtttgcgttgtatcattaaaaatcacaaaaagaaaatcagacttttatatatatatatatatatatatatatatatatatatatgtcatgtcaaagataacacttttatctatagaatcaactcggaagaaccgaaagacatactttttgactctggtgttttggcagtgtcagctcttgtaaagcgttaaccggaagaacaatttttgcttttagagatgtttcaccttcattttgaactagaatcaaccagttagcagcacctgcaatcataaaacagagctttgaaatgaaaattcaatcaactcaaacaaaacctagtggagaaaacagaacatacaaagcaaagaccttgcaaattgttggggaataactataatgtctaggaaagtttcatatccttgagatcacaatcatttacaaattaacacaacgtaataactgaataaagtaaaacatatcctaaaccatcatcccagcgaattacaacttatccaactatgctacaaacagcacctgcaatatgacttttattcaagaagctaacacgactaatactattgcattgtcgataaacaggaacgcacatgctagagataccatttcaagtaaactttgaaaccaagaataccaaagaaaacatcactacaagaaggcgcaaatatacctttatcaatgctcaaagtgcacgccaccaatgaattctcagttctacatatgttagactttcctacacaggtatctacactggcagactctgagctccccttatcatcctttcccttagcaggatctttagccaaaggaggactctccttacctggctctgtctcatttttcccactctccaaactctttggaggcggtgccatgttagccggtagctttccactatcctgactatccgttaggttcgctggaggcggaggcgggctcatcggctcggttgtatttaacactttagtatcattcttctcatttacaggtatcagtggaggaggtggactcattgaatcaggctctttaggattagtgttcgtcgaattactagttggcagagttggttctgatgaggtcacattagattttccatctccgatgggttgaggattaatcaacggagactcctgaagcataaacacagagtaaattcaaatcacattgttcaaaacccttaaaaacacataaaggaatcgaattttacttgtttagtggttgaatttgaattatccttttgtgtttcttcatcaactagctcacgaaatctatcgaaggaggaagcattggagatgaacaaaatcaatagaagaagtgttaagaccgaacttctatccatcgcaataagagtcaaaccctaaattatgattcgttcgcttgatttattcgccggtggtgctcttgatttgatccaaagatacttactggatttgaaaatttgcagcagcagctcatatttcagggtatcagtggtccaaaacgcatcgcagatacgcagatcacagttcaggcgattgcgaaaatcaccaagcttagatttcacgcaaaggattggcaacacagtgggagagagatggatgatcgatgtaaacagagttgttgaaaccgaagatcgatgagagaagacgaagagtggctctggctcgtgtcgtgttggtcgcgtctgaaagaaattggatcaaatcgcagagccaaagtagtgtttcacgatccctccacctccacggagccgtcggagaattatttgggccgtaattttaaaagcctattagttgtttcacataagtccaccaggcccatttaccaattatttgattaatctagggaatttaatgaaaaaaaactctcattggtcagatccatttttaaaccctgaactatgtttttagtaaaacaaatcccgaactaaaacctgttaataaacttaacctcacagtaattaaatattaatgggatattaatttccaaaaatcgaccaaagaacaatgacagaatccgtgatccaactgaagatcgtccacctcaaaaagttccttatacacgtgaaaaagttcaaatggtaaaatagagaacaatgaattatgtttcacaagatcttccttttcaaattatttaatttaatatttgcatatttagacttgcagcaactgtcaacaagtcggacgcaacaaacgttcatgcaagcgtaaagcagtgccaaaaccacccaagaaacctcaaggacgaccaaggaaaaaacagaaaacaatggatgaagagaaccctatcactcagccaatacaatcttttcttcaaagttaatgcttgacaagtctttactttagaatatcttgtccctctgaaacgattgtttttttttgtgacaaatattgttgtgttgcaactgcttcgatagttatgttggttggatttatttaagtatgactctttggattattttaagttgttgtgtctttctttcagcttctaaaatccaaactaattaagcaattcaaaatcatttagaacgtttttttgtaataaattcaaaacagttttaaagaacatcatgtggtttttgcgctaaatacaaatgtctcgttgtttttttttttgaaattaatatcccattaatatttaattactgtggggttaactttattaacaggttttagttcagggtttgttttactaaaaacatagtttagggtttaaaaatggatctaccaaagttgagggtttttttcattaaattcccattaatctattactaccttagcggcttagcttaactaatcgaaccttataattatgttgtatcacataagtccaccaggcccattgactaattatttgaataatcttttagttttcttttgaaaacgttattatgattttttttttcttttttttgataaactctttcggctgattcggttagtcccggtaaaaagcaccgaaatactttagagtggatttctctccaaagaaccaccacattgtctgtcccgaatttggaatgttttccgactaatgccaagaaaccaccttcatttctaactaccagataaaccaattggaacaaaatccaactgacagacttcccaaacaaatgtgatttttgtttccaaggaagatcgaactcaggtctggaagttgcacctttctctaaaacttccccaaccactagacaacaaatgcttggatgcgatcataccaacactattattctctttcccaacatgtcaacatttaagaaacttttacatgtttgaacagtgaacttgttatggtaaatcatgtacgtgttaagaatataacatttggtacactctattcaagtaacatgttcatgttttcctatcattctaatgttccaacatttcattgttcattctaatgttatacaattatctaataatctcctcgctagctctaccgtaacgatttatcgcagttccctcatcttataggatctaattaacaacatcgtactttcttagatctttattgtcttacctcattaagtctctaaatccaacatgtctttgtcgaaacttcaagttttatcgacatccaacgtctctcactgcctagatgattcatttggtggatcagactctactgccacgcgctaagttaattcttatcaaggttatctctccgacagcgcacaacaaaatattggggacacttgaggttaattctttgtttgccattacatgtttttataagctaaataaattcttatatgtgcatggttgtgtgaaatttaggatcatcttgcgatatcttgatcacatattcacatgtactgaaaagcagtcaatgttattctttatagtacatatacgtatgtattacacccaaatttctttcatacgtatagatccttgctaatggcaactgtaagcaactatatatacatatatgttcaactgttcaagcacatagatggagttgccgagttggttttgctttcttcattatcaagaaacatgagagaatgagagagagaaagatccgttgtcattattagcatatgaaatcgtgtggttacatagataagaagataaaatcataaaatgggaaatataagcagaatacttttatttaattaggttaaaagctggcaagtttgattagtcgtacatctgatcactagcctctttcacacggcagtcgatatactgcaacattcgaacaaccaaaacaaatatctatcatgagtcatgacattggaaataactaaactccaaatggttttattcatacaagcattaaaaatgtacgttagtccattcttcttattacccacaacatttgaataagttacaaaacgtttgttaaatactcgatcatgtcacatattatatatttttatgtttaaaaagagttgtattagtgtttgaatttttaattaataacttctaaagtgtgtttgtataaatgttttaaaaataaacgtaacaagatagtgaccaaaatttttaatataaaataaaattgatatctcctaatttgattaaataattagttgaattcattggatcctagctatatagtttttggattcaagagtatattaaaactagttatattccaaacaaaacaaatcaacctaacataaaacaaaaataaagttatggagacgtacctgtcgcaattggtgctaaaactgatggggtagggaattgaaacaccacaagtggtaggaagtgcggccacaaggtcggtgttgaggcccttgatttctttacccgctagtttaaggcactcacatacttgtttacggtccggtgtggtctgagccaattggtacaatgacttgactcccacgcagcattgtgatggcaatggaccactgttggtcaagtaggtcaggcactgtgccagtgtgctcgtcactgtcccacactggatggttgactctgttggggatgccatgtagatcgtaaggacaatgaggcatgtgatgatcttcggagtaaacgccatttttgttttttattgcttttactttgttgaggtcggtagggattttataattggaaacactcatgaaggtcatgcgtacccgttaattatgcttagttccatatgcatgcaaatttaatgaaaattttattttttttgttgaattaagattaaaatacacatattccaaagtaaatacgttgcattccctatcgcttaattgagtttcaagaagttgttacatcagaaaactagattcaactctggacggaattataaattacaaatttcggcgattgaaaagaaactaattaacttttttttataatccgaatagatattatgggtttaagtcttaaacttatgactgatggaaaaaattgtaatggttttgtgttaagtaattttcttcttgattaatagtaaattggactgtccttgttatttcgaatcatataacaatattttctgaaataactagataagaaaatcatgaaattattatagtgaatttgttttatgatcaacagaaaataaagtggaaacatatgattaatccttctttttacacaccaagtagaaacatatgcaaatacaacggaattgcattgcatcgattttgaatagaaaagaaatgagtgtacttatgttattcttgggtacatgtcaaacaaggtggtcataaggctaagcacatatttatgaggccacacgatttcaaaagagtaatactattgccaatagtctattggacatgtggaccaaaaatggtgatcaagtggcagttcaaggaagtaatggaatagagaagaaaaaaatggtaatggtccaaagcatcatcaaatggtaaagagttggagacatcaaaggaaaatgacaagagaggaaagcatggaaaacaaatagacggcctaagagatttatatatttatcgaacaaggactcttggaggttatacggtcacacgtacttggagaaatccaaaaggatctccacaagtcctaggcaagttatttacaaaaaaaaaaaatcagaaaaagaaaaaaaaaatgtcgtaggcaactcatattagaaaatagatataatctgtataatcgtaaatcgatctagtgcatgataaaaccatttttttgtttttcgttttatacatgcatggtaatgtaatcgttgtaattaatttatgcttggaaaacacactacaaacttcaataaaagaattcagtaaaagttctagggtcgatcgacattttaattgttttggtatgtttctggtttttcacttttaaaaaggtaacgcttacaagagaaagaaaaaaggtaaggtgtctttagcaactgcatgtagggtcgatcgacatattacacactcaccgacgaaaatattacgaatgatagagtgagaagtgtaaatgagcaagttgtgagagtttgaagaagtagataaggattggttaacaaagagtgatgagtacactcttgaggatattttagagtgaattttgaggatatttgaggatgaattaatgaaatcaaaccttatttcagtgatattctatagtttgttggttccacatgtattagggaatcgaaacatagttttactttctttctttttacaaatgagtccattattggactatcttaattaatatttgattataacttattctatttacatctacacaagtcaactgataataatcgtgttaagagaattgtgtacggactgtggagaagaagaaggaataggatgcatccaaaagcagaacgtgaccaaagttaatggcaagagtttgaagataatacataatcgtaaattcaatatatcattagaggagtacataacacagacgaccaattaaatggaccgtcatatacaaagaaagacatgaaaacacaaaatctagaaacacaacaataataacagtaaaaggatacactagtgtgtatatagtgtgacatcttaattatttttaatactctctcatcgattatatgaaaacccttcaacgtctatcttcttttgatcacctgacgctgcaaccaaccaaatacatcaatcatatggttactaccactccattaaatattaggacctcaagtaaaaatgtaataaatatagagtgagatagaagataacgtacgtgttacagttggttctggcactgatggggtaagagatcctaacacggcaagcaccagggagacgagcagcacgaccagcgttaagtcgagaacccaaggctctcgctgctccctggatacaacgacaagcttgttggcggtcacgggtggtacgagccaagctgttgagcctctgaacgccagagcaacaccctctaggaatgaaaccgcctcgggtcaagtagttatagcattgacctaagctgccggtgactgcgccgcacgagattgctgcctcggacgccattggagcggtcactaacatgcacacaatcaccaaagttgacaacttcaagagtccctccatatcttaattttttttttttctctttttacttagtaagtaatggattggattggataatgaagaatggtaatgaaggttgggtttatatagagagagcttatgagtgcaaatgcatgaaagtagaaggtgtgaggttagttggtggttggtttcatttattgcattgctttctcttctcttatctttcgcttttgtagttttaattactacgtactctccgttttgtcagatctatactatatactatataaaaatgtaattcactcttgtatacacatcctttttttttttttttttctgaaactgtgtctggcctcgctggtacaaaataagaaacgatttgtcttggatccctcaaactatagacaatttaagactagactaggtaattgatattgaaccaaaaccatggttgatggttcagtaacttttaagaaacgtaaatctattaaaccataatgttacaaggacaaagtttttgctttcgactattcatgtttgatgaaaaatcttttctgagagttgaacggccaattccatattccaagtatctaaaattgtagaaacatacatatacttgactatgtgactcaatcccccttgccaaattctccaacattcatgctgctgctctccaccaccgtctctcttacaaacctacaacaacattttcaagaataaggttcaagaaagaaagatacaagtatgaattggaggggacatgaataccatttaccttgccagcttctctcgtgacgattgtaagacgtaaatggagagtacaaaagaaaatgtgagagctgatcacaagtaaacaaaaaaatgagaatacataagtgtatgagcttattgtcccttatttaattaattgtttagcaagacgaaaaatggtttacctgagccaaacaggacatagaatcctgaggatacatcaatctctgactgctccttcctgcatcacaataaagtatctcagccacgtatcagtaacgtggtatccttaagctttgtgattcgaccatatgcacaaacttattagctaggagagataggaaaagaggtgagaaaagttattgtaccatgtgtatctaacaagaacatgttttggccagtgttgaggatcccaaaactgtttgcggatctccgggtgtgtattcagatctgttcatgggtaagatctcaactcaattaaactataactgagtgctactctaaggcaagcagaaatgaaaattcaataatcagagcagagaaagtatgagattcattagttacaagaaattttcaaagccactattaacataaccatgaaactgtaaatttatttagtaatgccaccagacagacagattgaatcagtctatgtaatcgacacaaaaaataacaacagaaaaatggactataatgcaaactgccaatatattagcacccagtgtctctaagaaggtgaagatgatattaacttacaccagatactgtaagactctggatataataagaatagtgtcaaattgaagccagcttaactagggccataggctttgcaaccaaacatcacaacaccgagaagctatcacctaatatatcatataatctagagttttcaaatatgaacgtaggacttggcatatttggtttggccagaccagacaattctcttattcgctcagaaaacagttgttaataaacaggagcacctaatcaggacacaatatagctagataggtagtattacgtacagctatgaggcatgtcgataacttgagctgtgactccaagcagatctcctccagaatatctctgcgcaaatgaaaaaatcaacccacaccgaaaaatccaaaaactggtattacataaatctgccttttttcctggtagcaaataatctaatcaatcaaagcttagataaaaactcaaaatcaatgctaaacataccaaatttacatcgatcatcggaacttctgagctcttacgattaattaccaaaagccagtgaatcagaaatttctcacttccaacttggaattttctgcatgtaaaaatcatccataaacacacatcaggcacaaaattactcttaatttgcatatgaataatgtacaaacacgataaagatgtagccatgtcagtactccatgttcagcacagataagacatcagaaaaacacaaactgcagtaagacagagctaaaaaaaacatacgaaatggcttaagctaatcaaaagagatgagagaaatggcgaaaacatcacagtatcttcatcatttcctttcagagtagcaacaatcgaaattgctaaatacaatctaaaagctggttaaaccagtaatgaactaagcaagtaaactcaattcaaaagcaccaaatagagctatacaaaattttcatttgaaatgcaatcaaaataaataccagaaaattctcacatcttataaggatcagttcctgtgtagccaattggtttcgctattgggatcaacacctaaaaattggcaaagaaaggcaagcttcaatctaaatttccaaattatccatcaaatgtcttaagcctatttgcacacagtacctcgcgattgacggcgaagatcgggcaatgctttccgatcacatcatgccaagtcgttctcgactgccagagaatcaatagatccttagtctccgatcaaattagaaaataatctcagctaatatgttaaagagaagtacgaacagagtgatactgccccatcttgctcatccggacgatatctccaggtcggtaagcgctggagagaaagggaaatgatagagatatcagaactagagcttgaataaaagcgttccacggtcgtaatcctgccaccgcagccatgcccgccataactccgcttcgttggcgaggtttctccgtgaaatttgccggtaattttcttcgccgggagatttagaattgaagcggaggatgtcaaatgtgagaactgagaactctcatccgtgttattattgggccaaaatatcaggcccaactttattgtttccaactcagttttgaccaggtatagggcctagtaactgatatttgttttggtcggagggcctggtaactgattattgacgaaaccaaaaaatcaacttatatcagaacaaaaaaaaagagacatggtttaacatattttagtgatgtatataatttcgttttaaatcattaccaaaaaaaaaaaaaaaaaacacgaccatctgatctgtagctaaacggattgtgttatgagattttagataagaaaattttacacaaagtattagaatacattagtacattgcttcctaattttgatttaaaagaccgtgttatatatttcgaaatagaaaagtattcacaaaaaattatgaaaatatagtttcggggtgaaatgtcgttgttataacgactaaatgttaaaacaaatatgttttgttatatatatttaagatataacgatgttcatttttggactgttatattcacatcagtaaaatctgttgctttaaatattatacataagtttttaatattccatgtaaaattcttaaattttgattttgttttgcagattttctatattgttttgttctgtgtataacaagattttgatttttgttttcaaaacgggactaaaattagagatttttatatatttttttttccaaaacaaaacgtttactagatttttgtaattggagttttcaatttaaaattcttttatagaacaaaattaattattaatttatctaattattggagttatttattttgttttactaaccatatcattatatgtggataccacgtcaaaacaaaatcatattcgagaataacaggtgatcaaatttctggaacacgtgaaacacagttggatccccttataacttaactcgaataaaggattttgaagacaatgattctcaaatgttacctttttcgtttttaaaagcataatcagttatgataatcgagcttattcaatagaaaaaagcgcgactgcgttagttaaatcataaaaaaaaatttatatttgttaaggtacatgagaatttagtatgtcatagaaaaaaaaagttaaaagtttctaactttttgaatgataaaaaagataaagctaaaccatgaaaacatgtattaaaatctttgacatttctcttaaaacattcataagaatcacaactctataaaaacttaatggaagaatatctgaactttacaatttaaccaactatagtgaaatcaaaattctgaacaaataacttcccaagtcactctaatcaaacttcaaatgatgtcttaagaatttaatgctggtcgttgtttctaaatactgcatcgttaaggtaaataaaaaggtacacaaaaagagcgacatctaaaagggtttcaagttgcatacacaaagttaagacaaatttgttttttttttttttccgatgcagtgaaaacaaaaaagagagagaagaaagaacaatcaaataacacaaaatcggtcctcaacagtaatcacttgggatctttcaaaacctagaagaaaaaactcatctttcttcttcttcttcccctgagacatctctcgattctttgtactcgcttgttttgttcgaactcaatcggattttcaatttcctgggcgtagtttacaacgaactgattccttggtttgatcaatcggtgtgttcttgtatcaatcgatttttttggttagtttttaggtttttgttgtttttcatggctgcggatctcgatgatttggaagaagagagttcttcctcattatcaccaccgcttcttccgccgcctcggtctccgttgaatcagccggagttgtggatgagagttgaggaagcaacccgtgaaattatagagcaggttcatccaactcttgtctccgaggatcgacgaagagatgtgattctatatgttcaaaaacttatcagaatgacacttggatgcgaggtaaatttgaataaaacattctctgtttgcattaacatttggataaaaactttaaatgttggaactttacttgagtcggcgatgttgttctgcattttattgagttctcttgatgcaagttgatggctttttaatgttgtcttgtgtctttttattcttaagttgatggcttttcttgttagattatctcaagtcatctacttgttgttttatatttcgaaagtggtgtgcaaaaagcagaccttttttctattactgaccagagattctgcaatgttgcggcttataactttgattgactatgagtgtggtttgcaaagttgtgattttttctactggtatgtgtctttcaggtacattcttttggatcggttccattgaaaacgtatcttcctgatggagacattgatctcactgcttttggtgggctgtatcatgaggaagaactggctgccaaagtttttgctgtacttgagagggaagagcataacttgtcctcccaatttgtggttaaggatgtgcagttaatacgggctgaggtttgtttacataatctctgtgttattcaaattccagaaactagagtctgcagtgaccaatgagtattccaagtttgtatatggtgtttatgcatgcttatcattttgattgttatctcctcaagtacctaaatttcttttcttttgcaggtcaagcttgttaaatgtctggtgcaaaacatcgtggttgatatctctttcaatcagattggtgggatttgcaccctctgctttctcgagaaggtaatctgtcctcttcagtatgaccaattgaccatgctgtgtcaaacaaatttgactaatttttttaaaaggtaaatacagtttaggcttagtttatctgtttaatagtatatgaaagcagaagttgaatgtcactaacctgccataatgacattggttccacctaactgcctgatgggtttctggtaactcaatagattttcttgaatattgcaaatcgtttgcaatatcacatacacgcaataatatgtttgaggcgcatttatctagaagaatattcatattagcaattttcgaagtacgcgtttgtataagataaagatttacttctggaaaattgacgttgactatatgattacgcagattgatcacctcattggaaaggaccatctctttaagcgaagtatcatactaattaaagcttggtgctactatgagagccgtattctcggggctttccatggattaatatcaacatatgctttggagacattggtcttatatatcttccatctgttccactcatcattgaatggaccactagcagtaagggtcttcagcaattatgagggatgcttcatgttttagtctcatcttgattcacttaactttttttatcccataggttctatacaaatttttggactacttcagcaagtttgactgggatagctattgcattagcctgaatggtcctgtctgcctttcctctctaccagatattgttggtaaggatttcctctagtatacagaaaatttagttctttttgcgatttcagtatctgcaatttctttctttaatttctgtagttgagactccggaaaatggaggggaagatcttctgctgaccagtgagttcctcaaggaatgtctggagatgtactctgtaccatcacgaggatttgagacaaacccacgcgggtttcaatcaaagcatcttaatatagtcgatccgcttaaagaaactaacaatcttggacgcagcgtaagcaaaggttgactgccttcttcaaccatcacagtttttattgtcctactgctatctctctctttatggatttagatgtttgagtctttaagaggcctaagacagtagcttttgacctgtccctgtccagagtattagcgttatagaatatttatggtgggtttacctgaaattcttgggctagggtatgtaggttttaagcgcaggctaaaataaagattgtgatattctggtatgtattttcaccctggaaatgaagaaatgtatcaacatgagataaaaaaacctctaaattttagtttgctctggtaatcccgtgaattttatggtctagatgactctctttattggtaaatttttaaagactatggattttactttcttcttacacaggtaacttttatcgtatacgaagtgcattcacatatggtgctcggaagcttgggcaactttttttgcagtcagatgaagccataagttctgagcttcgtaagttcttctctaacatgctactcaggcatgggagtggccagaggcccgatgtccatgatgctattccatttttaaggtacaacaggtacaatgccatattgccagcttccaaccatttccaagaaggccaagtggttaatgaatcagaatcctccagttcgtctggtgctactggaaatggtagacatgaccaagaagactcgttggatgcaggagtaagtataccgagtacaactgggcctgatttaagtggatcacctggtgaaacagtgccttcggtttcagaggaacgattttcgggagacgcaaaagacttggctactttgaggatccaaaagttagagatttccgatgatgcaatgaaatctccgtgccttagtgataaggaaagtgactctcctttgaatggtaagcatcattcttttaatcagatgagaaatggagaagttttaaatggaaacggggtggggaaacagcaagagaattcctggcatactggttccagaagagttaaagatatacatattaatgagaatgagaatgagcatgttggttatgaagacctgccattcgcaagtgcagtaccttggccacaggaggacatgcatctccactactcaggtcattgtgtttctggcactccgaatatgctgtctgacctctcaggcgattacgagagtcagcttaacagtttgcgatttggtcgctggtggtttgattatgtccaaaatggtcctatgtctccactatcacctcctgggctgcctcagctgccgaacaacaattcatgggaagtaatgcggcatgctctgccattcagacgaaatgcgcccactccagtaaatgcaaatggagttgttccgagacaggttttctttcatgtgaaccctcagatgattccaggtcctggttttggtatcgaggaattacctaagccacgaggaactggaacatacttccccaatgcggtaattacttatttgcctctctaacatctcttacagacactccgtaaatggccaagcttctaacgtctcctttatgcagaaccattacagggatagaccgttctccccaagaggaaggaactcacaccaagctaggtcgccgcgtaacaatggccgaagcatgtcacaagcgcactcagaaatgaattttcctgacagaaacacccgtgagagacagcttcattatcccaaccaaacaaatggttcatgcgatatgagtcacactgattcacttgatagctttcctgataccaatggctctacaaatcatccatatgaaaaggctccagactttaggcctacagagcctctaccagtggaagtactctcccctcctgaggacagcaagccaagagatagcattgaaggtcatcataatcggccacatcgtccaaaacctagaccctcctcaacacaggaagaacggtacagcatatatctcttacccttaaaaacatattgtcttcactgaattattaccatggatcaccaaagccactatctaattcactgtagtgatgtacatgtagggtaacacctacacagtcataccatttgacggatgatgatgagttccctcctttgtagctctggcctgaattacaaatgcatgctctctagaccgttataggaacaggtatagttttctaacttggtttgtctcctaagttatttgtttttacctcctgcaagcgcaaaaaaaaaaaaaagaagaagaatggagctgatatgttttgggctgtggttctttcttgtatgttatctctggtgctatagaataatttatatgtatctttatcaaactctctggacaaaacctttgcagagctttgtattttctacttagacaggtttgctgagtgtattataggatgtttttttttttctctcagtctctattctatcttggtaattctccttcttgtttcttgattcttcttcctaatggatgataaaaaaaaaagtaacaaggttttggtcattataagttgattccatatcatgtcttcttttagtaaaatatgtcattagttgaaaagtgcatgaaatagtaaagagttttaaaaaaaaataaataacagcttttaatatggctaatgcgttcagtttttgtgattggtaactatcaaaatggtaaggtccaattgttgacatcaaatcgtaagatttttttagggtgagcagaagtataatatcgctattttttccgcttttgtgattggtaacaatcaaaatgataaatcattcattgtgaaaatcatcactgaattccttatgttttgttttggtctatgtatagatttagttgaacccaatgtgacaagtttattattctctcaatcagtgctggattctgcaaatcactttcaaaaacattgaattcgaatattgtaataagaaaaacaaaaattgtggggaggggaaatagtcaaataaaagggtaatggtgtcaaagtcacgcaatcatcggttacatacattactcttacatatcgacatacttaacgttaatcaaatctcgtttgacaaaccatcatcaataaagagcacaagaacaaagaagaaggaaaaagtagagcttttttgggaatcagaatcatcatcgatggtgaatccaaagcgtggcaataggtttttcaaatacagaattgtgtaaattgctctctatcttcttctctttcaaattctcttccttttgttgtattcaataactttttccccactttgatgggctgcaaccacatattcttcttctatctttaacttttcccaccaaacttctccttttttttctttttttttgggttctgggtctgcttttttgttgttgttgttgttgaatgaaggtccgtaagggaagaagacagatgattgcgaaagagcaagacgaatacaaattacgccaacaaggtcttgtttttcaaatggcttctcttttcctctctttcgattactccttactcttcttttggttgctcttccgcgttttcttatacgagaatcacgaacgaaaactccagattttctagcacacctcttctctctgcatcgccatcttgttttttcccccaaattttcgattttttttttgtataacttttgagattctgatagatccggtacggagtcatgtatatggagatttcttctgcttccgatgattcgatcgcttacgttgagacagatccttctggtcgctacggacgtgtaagcttactctctttctcttagctgattgctattttgatcaatccccaaatttgattactttttggctctctctctttcgattatcttttgcataactttggcactatctcttccattggtgttgttctttggcttggtaatatacttgcttctagttgctggacatttgctttgatcgtagcttctcctctctttgcattttctagagttgatttgtttttgattactgggtttgctctcgaactttgggttgatttcagttcagagaagtacttggcaaaggggcgatgaagacggtttataaagcatttgaccaggttttaggaatggaagttgcttggaatcaagttaagctcaatgaggttttccgatcacctgagcctttacaacgcctctactctgaggttcatctcctcaagaatctcaatcacgaatccattattcgttactgcacgtcttggatcgatgtcaaccgcagaacattcaacttcattactgagctgtttacatcaggcacccttagagagtaatgagaatcccctacagtgtgtgttaaacaacaatataatcttatgcttgtgcagaattccttaaagagagaagcttgttgtgtgtgtcttacatctgcaggtatagaaggaagtatcaaaaggttgatatccgggcaatcaagagctgggcacgtcagatcttgaatggtcttgcttatctccatggacatgatcctcctgtcattcacagagacctcaaatgcgataatatcttcgttaatggacaccttgggcaagttaagattggtgacctgggcttagctgcaattcttcgtggatcacagaatgcgcacagcgtcataggtattctatgtctttctctatgtttttgaatagagttttgtgagttccataattaatctttgccttttgcttgcatataccattaggaacgcctgaatttatggcaccagagctatatgaagaagattacaacgagcttgtagacatttattcgtttggtatgtgtgtcctagagatgcttaccggtgagtatccttatagtgaatgcaccaaccctgcccaaatatacaagaaagttacatcggtaagctaatggcctgaggctcatatcaatcatcattttcttctcagaaaatattttgatatattaacttctttgatgcggatttgattcaggggaagttgcctgactcattccatctaatccaacacacggaggcccaacgttttgttggtaaatgcttggaaactgtgtcaagaagattgcctgcaaaggagctcttagcggacccattccttgccgcaactgatgagagagatttggcgcctctttttagattgccgcaacaattggcaatccagaatttggctgcaaatggaacggtggtagagcatctgccgtcaacgactgatccaactagaacaacagatatgtcaataacaggaaagatgaactcagaagaccacaccatcttccttcaagtacagattctagatggcgatggtaagttaaagttctacttactacaaatgtcttgcctggtttgattggaacatgaaatttgttgcgttgctagaaacttgctcagctgaaccgggctacaggatttgtagcacctttagtattagctattcatcataagatagaaatggacgattgtaaccttagcttctgatttttgtaaaactttgttagaagaatcaccaatggaaaatgtttttatgaatctgtttggctgtggcacaggtcacatgaggaacattcagttcccgttcaacattttaagtgacacacctctagaagtagctttggagatggtgaaggagcttgagatcactgattgggatcctttggagatcgctgcaatgatagaaaatgagatatctttgctcgtccccaactggagggccaatgactcttctatccggcacgaaagctttggtcatgaagatgatgaggacaatggcgacacagagggaagaacgcgccttttctcctctgcttcttcctctcacgactctcctgtagcagttagagagaacaatgacgattctagtaacgatgtgatcccagatatggatgatggcaatagaagctctaacaggttgctgaattcttcaacataccactactcacctgccattgatgatgatcaaaatcagcaacaacggagacgagtaaggctacaacagaaaatgagatcgctggtggacacgagaacacaggtgctacaccgatcgctcatggagttgatcaacaagcgtcgtgggcgtggctttgacccgaacacaaacgagctacaacctcaaccgtcgtccactgatttcattcgacgatgttgaaaatagtatgatgagagagcctatttgtgactctttcatgataaagacagatcttcatattggtactagcattttgatttgatgatactatatgaaataattgtttagagtgctttgtatatatgatattcttagggaagtgttacctttttagctctatctcgatttgaaagcgatgcaaaaccgctcgaattcgatttcaagtacgaaggtagcttcttccctgtgttaaagagacaatttagattacattttatgcattttccattacagtggtaacttaatattcaaataatcataggaattaaggatttttctaatcttgatacgaaagttgtttatcttctcgtatcaaacgtagaggcagttgaacaaatttacaaacgaaaatgttcttagattggtataaccattcgtcgaaaactataaagatttacttttatttaaccataagatgatatcatctatcaaaaagtgttaattatagttgatcatatataataagaacaaattataaaggctatatacaaaggaaatttgcgttaattaggttatctaaccgcatgcatccaaaacaaatcatgtatttaaaaacttgatcacaacttgagcaaaatatatggagagcaaagggccatcgccaatagttccacttgtgcttgtggtactcttcggatggttcctatgcggctcgtaccttgtctcactattagaagatgttgtattaccaatcttacaaaccggaacgttcattgtaggaatctttctcttgcttctccttttgcttctccatgtcttatcttcttcttggatctatccatggatcccttctcttcttcttttaccatctccggcttccacgacttctactgactcagacagctttggtcttggatcgtttcttttgttcacactttttctcatctctttctggttttttgggtcactctaatgtttattctacttgtgaattgtatattcctgattgatcatgcaaaatattgctatacactttatacatgcaaaatattgctatacatgttgtacatcatgcaagattccaacacaaaatgtttagcaagaatttgtttaaaattaatttattattaattactgcatcgctcttattccattttcaatgtaatacaacatatatcatccgtgaaaacaacataagagagacaacctagctactaggctactagctaggagcctaggagttgcataataatgagtcgaaagaagatgttatataataagtctccgtgcaaccacctttgacgaccaaccagcacgaagtacatgccacagacgaaagatcacatgcattgttttgggtttttacattataaatagggtcagattttgagtaatatgtgtgtttaaatgaggtaaaaatatataagaaaataaaattgcaagaaacttcttacttcattttattattttttccaaaacttttgtgaagatgtacaaaacatatccaagaaaataatttcaccaatttggtaaatattgcatgattggatatatgtgcaatgtgctatacaaatctttatcaatgcttaaacttcaaatagcttttaccaaactatgttataaaataactttaaaaaaaaaaaaaattaaaatgttttatatgtcatttgaacatttctttgatataaatgtccattattagtccattatatacttatgcaattttcacccaacaaaccgttggatatatgggtggggcgtttaagaggcgctcacttgacccgagtacccacccggttcgttcctttagttccggtttagccttgtaacattttctttcgtttgttttcttcttcatcttcttctcaaatctttcgcgtttacggtttcttcgttggcaggattcgaacgaaaagccacgagactacgtgattcaacccgaatacgatccgaatcaggaagctcctttgaacatatttcatccccaatttcaaagctcttctctttttggctgatgctttgttcaatggcctctctatcggtaagtctcctcttacaatctctcgattgattcacattgcacaacaaatcaatccgaactctgcgtacaagggttcatcgatttctatttgtagaacgttgtggttcgtctaatttgattccattgctgttgctacataggtatgttgctataacaatctttaactacagttgcttcgagctagagacttgtttacttcgatggtgtataaccttaaaataagattagggtttgggttttctgttgtgactacaatcatcccctcggttgaaatttctctaagtcattagggttcttccatctattgggtctaataagaagaagaaaaggtgttggcttttggaggataatgtgtatattgtgcggtatacaaaagtggtctcgtcaggttgcaacgatgctaccttggtttgtcatacctttgattggactatgggctctctctcagcttcttccaccagcttttcgttttgagattacttctcccaggcttgcttgtgtatttgtgctcttggttactttgttctggtacgaggttttgatgcctcagctctctacttggcgggtacgtagaaatgcccaacttagggagagagaaagattagaagctattgaattgcaaaagttgaagaaaaatgccacaaggcgttgtcggaactgctcaaatccttacagggaccaaaatcctggtggtggcaaatttatgtgttcgtattgtggacatgtatctaaacggcctgttttagacatggccttgtcttccggattagagatttctggttcagggattttgaaggatcttgttggaagaggtggaaagatgttgaatgggaagggatggagtgagaatggatatttgcacaggcaagagtggtctgacaacagcacatggactagcgggtcaagctattggcggaataatagtggcgatacgtttgaaggagatgaaaattgtttggtggagaaatcatattctggtggtgttgtttttgcttgcaggttgctgacttcttttttcatgagcattttgtggctttggagaaagatatttagatttagctcatcagttggtgattcatcacttgaccctgagcagaggcggatgttggctaggcagggtgagaacgggacaagctgtcatgaaagtagggtagaaaaggcacgtagaaaagcagaggagaaaagacaagctaggctagagaaggagcattcagaggaggaagagagaaaacaaagagaggaagtagcaagactagtagaggaacggagaaggctgagagatgagatacttgaggccgagaaatgcagcaaattatcagtggctgctaaggagaaggacactaaggaggcagaaaagaagcgtcaggagagaagaaaagagagagatagggcctcaagtaagagcaattctgatggtgaagaggttgacaagagaacaagaaaggaaaccgagcagaagcgtgggctttataagagtgatcatctggaacaggagaggcacgcacctgataatttaagggtccccaacatggaaaggagacatggacatggtttagaaaataatgtcaccagtaacggtacaaaatctggtggtaggtactttgatcgaatgaagggtacatttttgtcttcttcaaaggcttttactgatagtcgtttatttgggagaggtgttaatacttctgctacaattgcaagagaaaacaagcccattggttctgcagataattctcatacctatgctcattctagtcatactaatcctcctgaattcgtggctatgaaatatgtccctaatgaagaggaaaggaacactaataatccagtaagtaccctttccaaaatgtctcatctatttggggtctatagtttcgagtgactagtgtgcttaaagaataaatttcacctgtactcatatgttttctgttataaatgatttcgtcttgataaattttcaagtaaaatctaattcaatttacttgaaacttatttttgtcaatgaaaactgaatatttgatactgtttcctcaggttgtttctgagccaaaaccgagtagagaacctaaaaaatcatggcaccaactgtttgctcgttcaactcctgctcctgtttcctcaaatgttaatactataagtagacctagcacgaatccccagccaaatgttcagagctcacaggttcccagtcaagtttcctcaatacgaacctttgacaatcccatcagttttgggctcccatcgccattcaccataccggtgtactctagtggatccactaccagtagtttaggtttctcacctccaacagaacttgtttttcctcaacccggtgaagatgagcgttttgaagatccatgttatgttccggatccgatatctctactgggacctgtttcagaatcacttgatttaagagctgctgggtatgaaactggcataggacaggtaaaataccaggcgatgaagaatacaccttcttgtgaagccaacaagccatctccaattgagtctcccttgtctagatcacgggctgcggatgaaaaacaagctaatgatggaagctggcaaatgtggaagagtcctctaggccaaaacggtcttggtttagttggtgggtcagcaaactgggttataccttccgaaataagtagatctatcgaggaaagtgatatgcatcacgcgcctcagcatagaacagaatcattattttcaaaagaggattgccagcttcatcaaggtgcttattcacaaaggaaggactatcttgaacatgatcagagaagtggcgttttcagccccattactggtccaaccactactgatccttggtctcagaaaatgttcttccctgcattatctggtattgagagtcctttttctactaccacacaaacaaaaagcgtcttgaacaatgcggcagggtacagaagtccaacgggatctggttcagacaatccatttgaacatccttctcctaatcactggctcaagtaagtcctgaaaacttgttgtttctgtagttttctgagatggcaagacaaagtgtaaatcttgaaaagaagcagtaatgatttggtagaatttgtgaatgtacaggaaggtgaagagctcagggaatgggagtgggaagcaagttttagcggccggtgaagttgagaaccaccaaaaagatgtagaatcattctggtagtcacaaaattaaacaaaatgaggtcaaattttttgcagatacacacacgttgactgtgtctgtctgtctctgtcttttgtcctctcgggtcttcaatggagatatagagataatttagattacattttatgcatttaccattacagtgataacttaatattcaaataaataataagaattaaagtatatttctaatcttgatacgacgaaagttgtttatcatctcgtatcaaacgtagaggcagttgaacaatttaacaaacgaaaatgttcttagattggtataaccattcgtcgaaaactataaagatttacttttatttaaccataagatgatatcatctatcaaaaagtgttaattatagttgatcatatataataagaacaaattataaaggctatatacaaaggaaatttgcgttaattaggttatctaaccgcatgcatccaaaacaaatcatgtatttaaaaacttgatcacaacttgagcaaaatatatggagagcaaagggccatcgccaatagttccacttgtgcttgtggtactcttcggatggttcctatgcggctcgtaccttgtctcactattagaagatgttgtattaccaatcttacaaaccggaacgttcattgtaggaatctttctcttgcttctccttttgcttctccatgtcttatcttcttcttggatctatccatggatcccttctctttttcttttaccatctccggcttccaccacttctactgactccgacagctttggccttggatcctttcttttgctcacactttttttcatctccttctggttgtttcagtcagtgtaattaatgtatattcttcttgtacacaaatagtttctctcattggaatttgtattttcctgattgttcatgcaagatattattatacacttttttacatcttataggaaagaccacttgataaatcatgcaagattccaacatataatgtttttctttttgtaatgtttaaataattaattactgcatcactcatatttcattttgcttgtaaagaaactgaatacaacatatatatatcatctgtgaaaacaagatataagaaaaagaagtaggggtgaaacaaatcaaacacaataaaaaaacctagctagctagctaggatcggagttgcataataatgagtcgatagaagatgttatataagtctccgtgcaaccacctttcacgaccaaccagcacgaaggacatgaaatgaaagcaacaacatgacacagagggaagatcacatgcattgccttgggttttagattcaaattttagggtcagattttgagtactgtaatatgtgtgtttaaataaggtaaaaactataagaaatttttttaagaaacttcttacttgatttatcattttttccaatatttttgtgaagatgtaccaaacatatccaagaaaataatttcaccaatctggtagataatgaatgattcgatatagtatgtatgtgctataaaaacttttatcaatgcttaaacttaaaatagctttgaccatatctaaactatgttataaaataacttttaaaatattctttttttaaaaaaattcttaaaatgttttatatgttatttgaacatttctttgaaatgcccattattagtccattagcccaacaaaccgttggatatatgggtggggcggcgtttaagaggcactgacttgacccgactacccacccggttcgttccttggttccggttttgccttgtaaacattttctttcgtttttcttcatcatcttcttctcaaatctttcgcgtttacggtttcttcgttagcaggattcgaacgaaagccacgagactacgtgattcaacccgaatacgatccgaatcaggattctccttccatcatcttccatccccaatttcaaagctcttctctttttggctgatgctttgcttcaatggcctctctatcggtaagtctcctcttaccttctctcgattaattcacattgcacaacaagtcaatctgaactctgcgtacaagggttcatcgatttctatttgtagaacgttgtggttcgtctaatttgattccattgttgttgctacataggtatgttgctataacaatctttaactacagttgcttagagctggagacttgttaacttcgatggtgtataaccttaaaataagattagggtttgggttttctgctgcgactacatcctctgggttgaaatttctctgagtttagggttttctgatacatttggtttgataagaagaagaaaaggtgttgccttttggaggataatgtgtatattgtgcgttatacaaaagtggtctcgtcaggttgcaacgatgctaccttggtttgtcatacctttgattggactatgggctctctctcagcttcttccaccagcttttcgttttgagattacttctcccaggcttgcttgtgtatttgtgctcttggttactttgttctggtacgaggttttgatgcctcagctctctacttggcgggtacgtagaaatgcccaacttagggagagagaaagattagaagctattgaattgcaaaagttgaagaaaaatgccacaaggcgttgtcgtaactgctcaaatccttacagggaccaaaatccaggtggtgggaaatttatgtgttcgtattgtggacatgtatcaaaacggcctgttttagacatggccttgtcttccggattagagatttctggttcagggattttgaaggatcttgttggaagaggtggaaagatgttgaatgggaagggatggagtgagaatggatatttgcacaggcaagagtggtctgacaacagcacatggactagcgggtcaagctattggcggaataatagtggcgatacgtttgaaggagatgaaaattgtttggtggagaaatcatattctggtggtgttgtttttgcttgcaggttgttgacttcttttttcatgagcattttgtggctttggagaaagatatttagatttagctcatcagttggtgattcatcacttgaccctgagcagaggcggatgttggctaggcagggtgagaacgggacaagcagtcatgaaagtagggtagaaaaggcacgtagaaaagcagaggagaaaagacaagctaggctagagaaggagcattcagaggaggaagagagaaaacaaagagaggaagtagcaagattagtagaggaacggagaaggctgagagatgagatacttgaggccgagaaatgcagcaaattttcagtggctgctaaggagaaagacactaaggaggcagaaaagaaacgtcaggagagaagaaaagagagagatagggcctcaagtaagagcaattctgatggtgaagaggttgacaagagaacaagaaaggaaaccgagcagaagcgcgggcttaataagagcgatcatctggaacatgagaggcacgcacctgataatttaaggggccccaacatggaaaggagacatggacatggtttagagaataatgtcactagtaacggtacaaaatctggtggtaggtactttgatcgaatgaagagtacaactttttcttcttcaaaggcttttactgatagtcgtatatttgggagaggtgttaatacttctgctacatttgcaagagaaaacaagccaactggttctgcagataattctcatacctatgctcattctagtcatattaatcctcctgacttcgtggctatgaaatctgtccctaatgaagaggagaggaacactaataatccagtaagtaccctttccaaaatttctcatctgtttgttctatggttttgagtaaactagtgtgcttaaagatataaatctcaccttcactcatatgttttctgttataaatggtttcaaaagttcattttcgtcttgaaacttttttttgtcaattaaaactgaatatttgatactgtttcctcaggttgtttctgagccaaaaccgagtagagaacctagaaaatcatggcaccaactgtttgctcgttcaactcctgctcctgtttcctcaaatgttaatactataagtagacctagcacgaatccccagccaaatgttcagatctcacaggttcccagtcaagtttcctcaatacgaaccttcgacaattccatcagttttgggctcccatcgccatttaccataccggtgtactctagtggatccactaccagtagtttaggtttctcacctccaacagaatttgtttttcctcaacccggtgaagatgagcgttttgaagatccatgttatgttccggatccgatatctctactgggacctgtttcagaatcacttgatttaagagctgctgggtatgaaactggcataggacaggtaaaataccatgcgatgaagaatacaccttcttgtgaagccaacaagccatctccaattgagtctcccttgtctagatcacgggctgcggatgaaaaacaagctaatgatggaagctggcaaatgtggaagagtcctctaggccaaaacggtcttggtttagttggtgggtcagcaaactgggttttaccttctgaaataagtagatctatcgaggaaagtgatatgcatcacgcgcctcagcatagaacagagtcattattttcaaaagaggattgccagcttcatcaaggtgcttattcacaaaggaaggactatcttgaacatgatcagagaagtggcgttttcagccccattactggtccaaccactactgatccttggtcacagaaaatgttcttccctgcattatctggtattgagagtcctttttctatcaccacacaaacaaaaagcgtcttgaacaatgcggcagggtacagaagtccaacgggatctggtccagacaatccatttgaacatccttctcctaatcactggctcaagtaagtcctgaaaacttgttgtttctgtagttttctgagatggcaagacaaagtgtaaatcttgaacagaagcagtaatgatatggtgaaatttgtgaatgtgcaggaaggtgaagagctcaggggatgggactgggaagcaagttttggcggccggtgaagttgagaaccaccaaaaagatgtagaatcattctggtagtcacaaaactaaactaaatgaggtcaaattttttgcagatacacacacgttgactgtgtctgtctctgtcttttgtcctctcgggtcttcaatggagatatagagtttttacttaaaacatctcctatgaatgaacactcgacgcataattataatcaggtactcttcactttataacatcccactctcactaaacttgctttgggtttgtctctaaacacgtttctactaaaaacgtaaacaaactaaatctttatagtctttgataaactgaaaactgccaaagtaatagaatgtgttcccatctatgtcgatgcacgaagccgtaatattcctctatgtgataataaagcttatcaagcttagcagaccacaaattttagccgacaaaatcaaaagcgacggcccaacacaaaaaaaaaaacaagtcgtggccacttttctagtgttcagaaaatggcacaaatcaaaaaatgatcattcactataatatcactaaccatatttaaccaatgggattagtttttcacctaatcaaggaagaaaataatcaacaaaacaaatgtcacagtgatgtttgtaggtttttctgcatgtagtgagtttggttactctctacatctagatatacagtactattatttttatggcaactgatgccaaaagttaaagatattttggctgccaaacaaaatacgtagctttcaattgtttttaaaagataaatcatatgtcaatttacccacacaaaataaaaatataagtcatttggcatattatttgattagactttgaatatttttttatactgtcactgctgagtgctgacctctatttttttcaccgcaggtaaaagggagtgacatgtacccttttctggaaatttcttatacaagacgtatgaagattttctatcctttttttggaatttagattacttgttttcagacttgtgattgattttgagacttcattttctttttttttggattttaatcaataaaaataatttagctattgacctattgttcttctaatagcttgtacgtcttcacactgacctgtcaccactcgcacctttcatttgtttcctactccaaattatatcccacacccgatgaatttagtgtgaatttagtgtttcttgataggcaaaagattgttgattacgtacttagccacgctagtcagataaacgaggagacttcattccatttcgtgagttttgattgtaacattagactcgtcggccattgttaattgtagtgactgacttcataaaaccggttaaacgttgtctcaaaatgtttagcatttcttttacatgcttagttggattttgaaacctcatcttaaagttctctgcccttatttgatatctctaccattctattgtggtccaaaatcaagaacgtgtgtgtactataccaattgttggccccaatcatatgaaacaagaattaatctgtacgactaaagattttgtttttagaatattattttgtcaagtttcattcattcatgttagctcctatttgaaaataaacgatggaatcatagatttctactaaccggaaactcaatgatttcaaagtttgtttctaatcttcaaggagactacttcttctctaattcaaaattgttaagtagattaaaaattatgaaactatgaccaagtccaaagacttagtctttttttttttgacaatgacaaaaaaaaaaagagttttatattaagtttacaagtccaaagacttagtctatgtctctcagattaggacatctctcggtatgttttgtttcaagttttatattaagattatagggtcaagatctacatgaatgatgatataatagtaaaagatttgtaaacataaaaatagagaagactcataaagaaaagaataacatgtgagtctgtatataatttgtgtttgatgaacaatacaaagatcataacactaaagtttagaaggaagaggcaaagaattaatatcaaaaactttaaagataaaacgagtgggatgaatagaaaaatgagtgtgaagaatagaaccaacggtcgctatgagttctctcttaacttgtttggtgatgcctcccattgacacaatctctgcatatgcagctgcttctttgttccctccaaatactatctctactgatcccttcaacaccaccatcactaactgcaatggacataactcgtttattgagtaaacatatacaaattggaagatatatttgttatctcctacatcttcccaacacatagaatgatatttagaggaaaaaaatcttggccacatgctattaatatcgatgtttcctcttttgtacataaaaatatatcttggtttgaggggtcaagtatacatattaataaatcaataactgtgatgttgacttttttttcttcttacaattctgaagccaatttacgtgaaacctagtaaacaatgcttattatatgacgtctcaattatcttatattttctaatatatataaaaaagatagaaaaggcattacaataactttagaatggatagagtatttgatcactattgaattccattaaataacaaaagtgcatctgatatatgtaagtcaaggatttttttttttttttgtctgattttaaaacttaaaggaaatttctgaaggaaagagagattagtgtttaagagaggttcttacgttttgaggtcgtccgacgatggaagcgacggctttggtgacttcggagtagaacggatcggtgttaacgccgtcaaaattgacgtttgttgtaatgtaaagacaaggcattttctcaccgtgaatactaacgcccgttaagctttgtttgcaagaatctcaagaaaccaaatgagaggggatttaaatggtgtttggaagttgtggaagagaagatctctcacatggccaattatatatagagctaaattatcgcgtccaaaaattaatgaaagaaattattgtattgcattattttaaaatttcgttttgatgtgaacaatttttgaaataatatctttgagtttcaaatctgacaacttggggacgtgactcaatcaattaccgcagctacgtcgccctcgaagaaatttgatttcataccatattggaccacacacacacacaaaaaaccaagtccataattttttgttaataaaggtaaaggataaaaacttgatgttattaatatttgtattttctccgtaatgggttaggaaaatgtttacgagattcgttttagatcattgacctttttttttttttttttttttttttgggcaaatgttttagatcattgaccatttatttaaaattgtgtgtttcgtacacatccatgtggtgcgtatgtagcgccgctacttcgtcttaaaaagatttgtttatttcgcaactgtcactataaaccggttacccacaacgatacgtattatctgcaaattaatcttatcagttatcagttttaaaatgtggaaaacgttagatttatggttccatattttcgtattaacaacgattatgggttatctaacaacgactattacacatgtttatttcaaggtttggtataagttcgttataggacttaccatgagcctatatcgaaagccaacttttcatccatgtagagtcatacccggacaagttcggtatgttgaaccgtaaacatatcacctatgatccactgactaacacggtttgagtcgacttgtcataaaattcacctagtaaaaccgacaacctgccttaataattaaaccgtcgaattccggtttgtgtctcacaagtcacaaccgtccggatcccttgcccatttactttatcacgtgtttttccccataagtttatattttttattaattgatggacagaaagtttttggttttgggatgaagtcacgaggacaagaagaaatggaaaaggcatcatgacttgtaagggttaacaacaagagatagaggttatatgcttacgcggtcctaagcacgaatactagaagcttagggttaggaccactagagatataatgcaatttggaagtcaccacaatgtttaagaattttatcagcaactttggttgaaaataataaagaagaatctagttcgaagttttctctccatgattttttgaaactgatggaccatcaaaacatctttggcgtatggtggggcctcagaacacatgggccgggcttggttacacatgagaaaattgttgtttttagttagattttggtggactagtataaatggataaaagaagtcgttggaagaaaaccaaattgatagaagaaagaagaagaaaaatagcaaattgttgaaacagggacagaggctgtctttaaggaaaatcccgtatgattaaagtgtacgtaatcgattagtgttcctctgtaagcactaagtcaaaagtaaactctaaagccaaaggtttcaattttcaaacattgttaaagcgaagtctgtccacgagaattagcacatactggtccaccatgttatcaagaaacgccaaaccttttttttgacaatttatagtttttgaaatatttagtagaaatcttttatcttaaggaagagattgacaaaaatagataaataaacaaataagaataaaagattgaaatttttgaaattaacatatatttagccatagtggaaagaaaaatttataataaggttggtatatcaaaaatcaaagaacatgtgaaaaggtttaataaaataaaagctatagaaaattgataagttttgtccttatgaaattaatgtcatgatatatatatatatatatatatatattattgtactttttaattaataatccctttttgaaaagaaaagaaaaatatgtataagaattttttgtagtgttcatattcagttttctagaaaagctaggaaagcgaaagtggcctggcatggttttgtaatttccttttttaatatgatcataaaataaaatatgtaaaatgaaaaaaaaaactcattaacaaggtaaggaataatgagttgacaacaaaacaaaggtaagggataaatgatgaactattcggatgaacatattattgcaaaattcagttatatactatatggtccaacgctactagcaaagtagcaatacacatgttggtcataattattgaaattagttacaatttgcgtgaactttcttaattaataaatatttaatttgtaggttatgggaatgaactggaaagtaataaagttgaaccgcatgggtgaaaagatgattgtttttggctaaactaatgtgtttttatattgctaatttgatcggatccccatatattctcataatcactccctcttattacgttgaaacttgaaacaaaatgctaagctgcctaaaactcctttcgctttttagaatctagaggagagaactaacaaaataataacgaacttattttaagatcttaatatgcgaatatgcgattaccaaaactatgcctatatatcaccgtgagtctttctttttttgggattactttgccagtttgcctataaccatgtcattgagtctatgactacaacatggcattgggtttagatgtagtggtcaacatcttatagttattgagatattgagtccattggtaataaaaaaaactcggttaaagaaaagaaaaaccggtttaaaaacggtataaaacatgtggttgaatgattatgattagtgaaaacaaaaatttgactaaaaaaacttactaaaaaaactttaattagtatacacacaccttgcttccacttaactatcatgaagccatcatcactgggtttacatcggctaagtttatgaaagtgaatgtctctataaatgcttactctctttttaccatacatattagcctagagaagtatgtagagttcaagtttccaacatacattaatttgaactcaatacgtacgtgaaagcaagccttcctacatcaataaagaccgacctactagtttcttcataaatcagatagaggccgtgtttgaacgtagatgcgacttggtgtctcaatgagtgtaaaataaaaacctaaaaaaggaaaaaggtaggaccaaacacgccccatcccttaatctcattattatcacctcttccacacgttacctccctgcaaacctcacgctccttccctcataacacgtgactctcacgctcctccacctctcaaaaaaaccaaattttccttgtaatttacttgaaccaaattcatatattcacctaaacataactaattcttgatctaactttcgaaaattttcaaattaaaacatctcattgattccaaaaacatactttattgttttatatggttagtattttaatctttacgtaaataaaagacgttggaattggaaattactactagtagattgctttatcagaattttataatctatacaatgtaaaaagccgcgtcatctgttcaaaaattcagaagatcagagtcacgcctatatttctctctctcccgtcactctcactcttcctcttctgcttcttattattacatcgatcctcgttgtccctcctctgtttcttcaatatctctttctctccaacaaaatcaaaatcaagaaaacaaaaaagaaaaactctcaagaaacaatggatgcttcattgtctccattcgatcaccaaaaaactcaaaacacagagccaaagaaaagcttcattacctcactaatcactctccgttcaaacaacatcaaagaagacacatacttcgtctcagaactcaaacccacggagcaaaaatcacttcaagaactcaaagaaaagctctcagcttcatcctccaaagcttcttcaatgtggggagtctcactcctcggtggagacgacaaagctgacgtaatcctcctcaagttcctcagagcaagagatttcaaagtagcagactctttgagaatgcttgagaagtgtttggagtggagagaagagttcaaagcagagaaattgacagaagaagatctgggttttaaagatttggaaggtaaagttgcttacatgagaggctacgacaaagaaggacacccagtttgttacaatgcttatggtgtgtttaaagagaaagagatgtatgagagagtgtttggtgatgaagagaagcttaacaagtttctgagatggagagttcaggttttggagagaggtgttaaaatgcttcattttaaacctggtggtgttaattccattattcaagttacagatcttaaagatatgcctaagagagagcttagagttgcttctaatcagatcctctctctttttcaagataattaccctgaattggttgctactaaggtaaagaaaatttctctgtcttttgtttttctcttatgtttctattggagacagaaaatttatgtttctgtacttgttgtctgaattgttacggttttttcatgtggttttgctctgttttgcgtgttggggttgcttctctttgcatttaaacagaaacgaatctcattcaagaaaatctgaaatgtgtcaaatgcttaatggggaatctaaaccatgtttcatgaaatcttttctttattaaattgttggtttatttgtgtgcggtttcttgagttcctaagaaatatgaatggttttagatgttttctgtgtggcgttattctatgtattgtccattttgattctctttttgtcttactttcttaaaattacttccatagctttgtcttctactgctacagtaaaattgaagcattctttgtgtggccgtacaatgaagttattataatcatgtctctattctcgattactacacaaaacattttgatgaatccatttttttcactatttcagatattcataaacgtgccttggtacttcagtgtgatctactcaatgttcagcccattcctgactcagagaacaaagagcaagtttgtgatgtccaaagaaggcaatgcagcagaaacactctacaagtataacttaaaactctaaccattctattttctttttggcttattttaacctttttggttaaatatatacatatacaattgttgctatttcaggttcattaggccagaagatattccggtgcaatacggtggtcttagccgtcctactgattcgcaaaacggaccgccaaaaccggcgtctgaattctccatcaagggtggtgagaaagttaacattcagattgaaggcattgaggtaatatcagttataagcattttacagaaagccaagtgagtgaaaaatgatttgatgaattctgaaaaatgtgtttgtgtgtggttgtaacattacagggtggagcaaccataacatgggatatagtagttggaggatgggatttagagtacagtgcagagtttgttccaaacgctgaagagagttacgcgatcgttgtcgagaaaccgaagaagatgaaagctacagatgaagctgtttgcaactctttcactacagtagaagctgggaagctcattctctctgttgacaatactctctctcgcaagaagaaagttgctgcttaccgttacactgtccggaaatctactacaaccgtctaatctataaccggtttttcagaagattggttgctttcttactactactttttgtgggtgtgttgaggggttttctttcttgggtttgagtactaggtttgttttgcttactcaacggttcatgttgaaccggaaatatcgataaatttgcgaggaaatcatatgtataaaaactatgatttgtatgacatttgatgtttggccttaatattttaactagagattgaagttttagtctgcaaagtgtaagcttatgtactctcttgtaccatgtttagctattgaagaccagtggtccattgcttatgtttgttgcattctcagttattgtattcagttgttttgtatcagaagctgaactaagcaatggaatttcatacacaatacgactctttaacagccaaaataggcacccaaacttgaagaatcaatcattgttgcatcatattaccaatcattgaataaacttgaagatccaaatttactaattgaattgtgggaagaaaatgtacatcttcatttcccaaatgagcagtttccattttcagcagcgaacctacgtcaagaccgattcgcacggatgaataatgactacaatgattgtagtagtacaatctgaacttatcagagaacacagtgactacggcccgacccaaaatccctgtgtatttttaattagtcgctgctacacagcccggcccaatataaagtctggctatgagtgagaggaaaatttgttttatggttgacttttgaatgtgaggttaggcagttcagttttttaatttcaatttgagtgtgtattttattttattttcaaataaactcacaatgttaataaattttaaattttgttaactgaaaatccaaacaccaaacacaaacagagaaaaaaatcgtttttgtttatattttgtgaaattgtttttatgaaactatgagaatttttgtatccttcaaatctgaaatctttttgaattctttttattactttaccctgtgttatcaagttaaatgagaaataaaaggaaataagtataaacctaaagagaactcatgagttgatttttttattagaaaaaaagtactagaatccgatcttggttgtactcctaattaattgtagttgattgagcttataatagtgtaaaaaaaaattttaaaaaaatacgagattatgatatgttttgagtcttagacctaaactcatctcctcttccttacatttctaagaaatccgagttaacaaatcaaatcttaaataataaatattcttattcctaacaatagccaataggtaatgttgaagaacttggagtttttgtacaatgttttgttctgacatgatcacaactttttggttaggacttgggaggtttctacgatcgaacctctttaaacattacatactttaacataagcaaatcaattccaatgagttttttttttttttaatttagagaaacaacgtgttatcagtatgaaattggtggtgaagaagtgaagagatgtttcacatctatgcttttgaggcttatgtatttcaggttcgttggggataaagaacttttacaaaagtgaataatagaccaaatagtcaaatctagctatcgaagaaagcgaattcgtcggtttcaagaaatggaggctacacaaaatttaatattatacgttcctctttctttaaatgaagaaaagtgtctatatagctgtgggtttgaccaattgggaaccaatctttacttcttgattttcttataattttccaatctcagctaatgattccacaattacgacataatcgcatctgatttttaaatattttcgttgatctcatatgtgttacaacccaatacacccttgcattcattaaattatatcgctaacatcgaacccttttactttatcaagaaacaaaaaaatatcgaacctttagcttcgactataaaactcaatttgcatttaaaaactaaagtgtaaaatcaagaataatacgtggattatcaaaaaagaataatcggtggatgttaaaaggaataaaagaaagtacaaaacgttgtatattattgctcagtataacaaaacaataaattctgagatattcgtattccatccttcaaattaattattatattcttttccagagaaattgttcctaaaaaaaagattgcataggtcggttttttgttttgatttcgaaatgtaaatttattaacaaactctctgcgtaatcacctttaactaactctgtactttggtctgtaatgagtttattttactatatatggtatcttaattagtactttggcatttgtcaattaaaaagctacattactatttatcaaaactaaacttgcatttacacattattcttcctgactcaacgttaaaaaatcatttttaatcaatttaatatacatgcactgtattttcacaactactaagctactgaagtttgattgtttaagacgataatttgtcttttcgacgttataatattaagccacttacatatctatatatactaattacagatgtaacttaattatataaataactcaactatcagttaaaaattcggaatctgccatatatggtaatgtcatggatgattttttatgaacaaaacttttattttattttgccgttgacatctacaattcaaataactgttttattaattcaccagctattcaaagtttaaacaagaagaaaaaaagatttaccaaatccagttaaatcaattagaaagacaaaaaaaaaacacatttgatgatcacaaaccaacacagtttcttgcagtcgtaacaccaccgtcaacgacaagattatgtccgttcacatacttagactcatcactcgccaaatataacgctgcttcagctatatcattcgctctcaatgtctctcctttcaaattagccaaactcctcacaaactcctccatctcctccacgtcatcatcttccacgtcaccaccactcgtctttcgccacgcgttaaccagcatcgacgtggcaactccaaacggtgatatacaattaaccctaatcccatacttgcctagctcacacgctgcgttcttggtcaaaccaacgatcgcatgtttcgaggctgtgtaagcgtgtggtcccattccacccatcacaccggctacactcgccgtggagattatgcagcctttgaatcctctcttgatcatagcgcgtgccccgtgtttcatgccgagtcctacgccacgtacgttcacacgcatcacgtggtcaaactcgtccgcgtcgaagtctaatatgcttttgtgtttcttctgatctccgagaactcccgcgttgttgaatagaatgtcaagcctaccgtaccgtgcaacggttacgttcacaaggttttccacgtcggcttctacggagacatcgcagctaatgaatgccaccatcggggaggttttgtgggatgagagtgacttagccagggaagagccagctacgttgtccacgtcagcaatcaccactgtggcaccgtgtctagcgaataacatgacggttgctttgcctattccatgtgcgcctccggttatgatggctacttttccttccaacctatatacggtgtaaacactattattataggtcgtatactttttgagaattaaccaacactatagtatataagtgacatggactatagttcattcttgttaattaatttcaagttcgtgggacaaacaatgtacctcttaggatataaagttgtattcgtctcctccataatggtgtcgtggacggagtgaaaggtggtctgctcagcgatcacttgggcaggcatggcagatttttttgtgagagaagtacagatggaaagaagtgatgagagggagcttttgaagcttaaagtggaattgaatagtagatacacacatccctgagtctatttatatacacattggtagagaggtgaagttccgaagaccagtgggaaacatccaattatgctcaagttttggaatcattctagataaataatttagtatgtacaaaaagctaaatggtagaagaaagacaaagaaaatgagtattttaatatgtaaattggatgcttataaataaattggatgagtaaaattgtgtttagagagactaataataaaacttttttgtgtcaggccgatcttcttgtgatatctgtgtgtattaatgcaaaataattttggataaatcattgatgatttgatatcagatttatttttagaaagaatctagaagaaaaatactaaatactactagtagtaattagatatgccatctagctcatatttattatgtttgctggcaatgaaaaaagctatagttatgacttatgagatacatatcttgtattaattacaggattccgtatcacactcactccctcaatttaaaaaggactgaggtagatacttaaagattaccgtacaaaacacaataaaaatattagcattaattttctatcactgatactcatagtttaatacgagaaggttctgattttgcaaatgctaagtgtatcatcaaaaatactctatttaaaactgttaatggttgttgtatgttgggagttaagtgaccttagaaaatggatcgtttctttggcggatcaagacaaatagtttaggtaaacaatatcaaacattagtttttacaacaactctattgtttctccagatgtgaaatggtggtggcgatggtctggcaagattcctaattctagaagaaatgcgacttagtctatatagtgctttgtaaatagtaatatcaatgaaaaaatggttttcaatatgatattagaagtccttaaccacaataaatctaatgttcttgaagcttttaaactaatggtcaacggtgttataggttccagtttgatcgatcaagatatatttttttttatatgtactaacattttcacacggatcctaatctagtacatgtatgtgctgtgtaatttgatcgatcaattgcgtctcatacaatatacgaatgatgcgattaacgtaccaagaaccattggaccacttagctttatatttattaagtgcaggactatatgtacattcattagcaaaatcttctctcactaatttatatatagtagacttatgtacatctcgctatgcaaatcttttaagatcgaatcatatatagcctcaatcattcttgattagaattaagtagtgttgataaactaatttctatcacatataaaaagggaaaacacagctcaaccaaaccttttccttgttgtccaaaacacgattcatctcaatacacaactaacattatataatttcaggttattgttttacttgaaatactttttgggctatttattgcacgttggttgtgatgaagcccatttgagttcaatcaatgctttaaacacttgtacgcctgaacttaggccaattgcaatgatctcctttgtataaattgttaaaaggctttcgatgggatttcacacatttcggtacaaattctaatacacatgtagcagtcgataaaaccaaagtcttaattatgcgatgttttgaagaaaaagaaaaaacaaagacctgtagactaaacgttccaaaacaacttcttcaagacaacattttcggcttctacctgggatttctcagcttcttctgcgataagaaattgggtcaaaccagttccggccttaactttggatatggcaagatacctttgtccaggaaagaacacttgttttggtagatacagaccaactttggaaaatgtttggcctcgactctggtctatagtcatggcaaatgcaagtgtgaaaggatactgcgtaagccagagaaagatttaacaaaaaaaaaaaaaaggtcaaccaaatgtcgacgactaaatgttttgaaacaactccttgaacacaacattcttggcttcttcctgagggttcccatctttgtctgttataagaactttcaaaccagctcttgacttcaccttggatatagcaacaaacatctgtcgtccatgagagaacacttgtcttggtagatatagaccaactttggaaagtgtatgcacttgactttcatctatagtcatcgcgaacgcaagtttcaaaggatattgcgtacgccgcatttgaagaggaaaatttgtttctgtggggtatgaagctatcctagggatccagattttcttaccatgcttattacctgctataatcatagcctcaagcaaaaacccacacagccgagtaatttgaagtcttgtccccgtaaaaaaaccacggctaggatcaaggtccctaagtaacatgacaggagcaccaacctttaacctcagcttaaaatcaggcaatccggggactttgatgctattcaaaacctctagagggacaaacatgtcgtcatttgggcttggagaaatactgtcagtgctgagacattctttctcttcacctgatatgatataatgatgtcgtagttagtatgtgcataaaaaggatatatatataagtataaaagagaaaagcaataaacgtgttacctggtaatagtgaaagcatataatcattaatctgatccacatcgtcatcacgatgacacaaaatagcactgtcgtgacaaaaatcaggattgtaggactttgcaaaatattctccataaacttctttcagtaaagttttgataggatctttggattcagttatcaacaaatctttggaaatatcaatttcagtttctccatcatttggattgttgatattatcaccactaatgttcataatccatctagaaagagcttcatctatagttgtgtgaattcttgtctcctggaattcaattagcaaaacattaaaatatagaaattatagtactacaagtatttctttctacaaagtaaagtgaacagcatgatcattataatatataatgatttccttttttacatgtcaaaacgagtcatgtgcaatcaatcaaaccttacaaaacctaagtcattgcatgaataatcgattattatgtaccaaagtgcagagcatctgattaatttgcaactattacgaaatatataactataacaaaagatacatgttaaaggtacataattcagataaaaacataccgacgaatcgagtaaaaccaagtcgatggagttgtctgattctttcttatttcccttcgacgttctaactatctgcactttgatcttccatggtctgatctcaccgagagaagcagaagggtgattacgaattagagccattactgtagcagtttgtgaattcgttttcttttctttttcttttgtgatgaatttggctgaaaacgaaaggttatgtagcttttataagcgtataaaaaactagaatcacgatctaaacggttacggaatttaatcagtttaattaggatttcctttttatatacttttcccaaattcaaaaggaaattctaattaattgtttcttaagttaacagtaacggaaatcttttttttgtcaccacctggtaactggaggattttttatgtacttaaatttaattttccactttaaattgaaagggaatttaatgaaaaaacccttaactttggtcagatccatttttaaaccctaaactatgtttttagtaaaacaaaccctgaactaaaacctgttaataaacttaaccccacagtaattaaatattaatgggatattaatttccaaaaataaaaacaacgagacatttgtatttagcgcaaaaaccacatgatgttctttaaaactgttttgaatttattacaaaaaaatgtttagtgttctaaatgattttgaattgcttaattagtttggaatttagaagctgaaagaaagacacaacaacttaaaataatccaaagagtcatgcttaaataaatccaaccaacataactgttgtgatttatgacagattagggttttacgatttggagttttttctgaacacgagtttagtgtggtctatggcaagcaaacttcgtgtggttttggcgttaaatacaaacgtctcgttgtttaattactgtggggttaagtttattaacaggttttagttcagggtttgttttactaaaaacatagttcagggtggccaaagttgaggttttttttcattaaattttcaaattgaaaaggattatatatacatatatatatatatagattttaagaaatgattaatatatatgtatttcctttattatatactggatgattttagttgccctagaaggcagaagcttcggttttagtagatggtaggagcatcaaaatcaaaatgaaatgtcaatcaaacctaaaacaagagttgatgtttaaaatcggtgttcgtgatatataaaactgcagagaaacatctattgttttagtcttttaggtatagacttctgttaaaaatctttaactaaagtcttatcctgttttgaaaaaataatagcctagacgaaaaaacaaactataatcaatgtacagagcagaatgtaaaacattgtagtctgaaaacagagtactataccataagaaacaccatgaaaatcaaattacataaaacaaataaaagcaattagtttgctgccagtctaacacatgttgactaatggttctgacaaatgttctgtaaacaactccttgaacacaacattcttggtttcttcttgatcaggtttcccatctttatctgtgataagaactttcaaaccagctcttgacttcactttggatatcgcaacatacctttgtccatgaaataacaattgtcttggtagatatataccaactttggaaagtgtttgcctttgactttcatctatagtcatggcgaatgcaagtttcacaggaaactgcctacgccgcattttgataggaaattttgcttccctaaggtctgagggtatcctagggatcaagactttctcaccatgattattacctgttataatcatagcctcaagcacaaaagtttcaacccgagtaatttgaagtcgtgtccccttacgtaaccaaccataaggagcaagatccctaagtaacatgacaggagcaccaacctttaatctcaacttaaaatcaggaaagcccgggattttgatgctattcaaaaattctagagggtataacattttgtcatttgggcttgcatgcgttggataaatggtgtcagcgccgtaacattttgtctcttcacctgatatgataataaatgaagtcgtagtaattagtatgtgcataaaatattaaaatggctatatataggtggaaagcgaaaaggattaaacgcattaccttgtaattgtgaaagcatataatcattaatctcatccgcaacgtcatttgtatgacacaaaatagccctctcttggtaaaaatcaggattataggactctgtaaaagattctccataaacttcatccactatagttttaataggatctttgcactcagttatcaacaaatcttcatgaatatcgattttagtttctccatcatttggcttgttgatgttttcgccaccaatattcgtaatccatttggtaaaagcttcatctatagttgtgtggatttttgtcccctggaattcaatcagcaaaacattataatgctaaaagtatttctttctacatgtaaaattgtaaaactaggtacaagctatataatgttttctgatttattcatgaatcgagtacaatgtttatatacacagagagtctttctctccaagtttaactttctctccaagttaaacttaccaaaaaaccacatgagaatatttacaagatatacacacgatattcttttggctaacaaaaattcacaacatgagcaatgagtaaacaaaaacatattctaatgattatattcatttacaagatattctattgggtgtttagccataaactcaacttaacttgatattaaaataagtaaaacgacgagattattgcatcttcaagcatctagatgattgactcaactagaaaacgagtcatgtgcaataataaaaaaaaaacttatagaacttgagtcatgcatgaataatcgtctactatgtatcaaagtttaaatcattctgatatatagaaattacaaaagacaaatgttaaagattcgtaaaaacactataattcagataaagctataccgatgaatcgagtaaaaccatgtcgatggagttgcctgattctttgtcatttcccttccaagttctaactatatgcatgttgatcttccatggtttgatctcatcgagagaagcaggagaggagtgtatgtcaattagggccattattgtagcggtttgtgaatcttttttgtttttttgttatgaatttggctaaatacgaaagtatgtgtagcttttgtaagcgtataaaatctaaaattatagatagtgttcttactcttacggaagttttaagtatcagtataattaggatttccttttcttattctttccttaatttcgaaaggaaattctaattaattgtttaaactttaagtaacggagatctttttctctcattcccctatatctgaaagattttttatgtagtaaattctgtttttccatttaattttaaaagattataagatagaggattgatatatactatatatcttcccatatttgatttgtttttttaacatagtatttctttaactgatactgtatactggattaatgattcattgatttgagtcggattttttcttcagaaccaaaccttttatagttgctttagaagttcagttttcaatagatagtaggagcatacactcctcttcgaaaatgggtcgcattagacaattcgtgggccgaaaatatagaaaagccttggaagccggaagtgtcaggttttggagttatttttggagcccagggtgtttatatacgcatcgctgacatcaggcactaaagggcatgaacaacaatgacagggatcgccacttttcgtggtccatcttttagccagccaatatcaattattatagtccaactaaaattattagtactaaagaaatctcacctaattcccaacacaatacctgctttacttccccactctcaagtcctacatataagcttgctagtcaatacatcatcgtttttttcctattcttaaaacataatttaactcatatccttttatatacgatgtttaatttacacatctacttttttttacaaacaaaaaagaaataactcatatcctatattgtgtgtcatccaaattcgaatgcagagcagaaaccccacatggacagcctgagcctgtggaagaccaagcgtgcaccaacgtctgttctcttgctttgttattagaaactttttgaagtaaactatacaaataagtggaaagactgataatactaatatgtgtctcttttggaaaatattttcaagtaaaaataaaataaataccaaatataggtgaaaaaaggttttaggataacaagaacgattatccacaaaggcaacatgaaagcagaaaccttttccctgcaaaagtgtatagtaaaacacactcataccaaactttcccttcttttctttttcttatcatctttgctcttttcccggaaaattccaaagatcaacagccgcagaaacatctcataaatcatgatgatgaagttctatacgttcactttcttaatctgcttgttctcgaagctccaaggtcactgcaaatcagatatcagccttggcaattctctgacgctcacttctcctctagaatacactccagggtttatggggaaagcttatatcatagagacagaatcatcgtcaacaagagaacctggttttaaagccgcgttaacaatggaatcaagcgacaaagatgatggaagatatttatgttcccttcaaattttccttggagatgtaagagtttggagctcagggcattactcaaagatgtacgtttctagcaaatgcatcattgagctcacgaaagatggagacttgagactcaagagtagctataaacacgttggatggagaagtggaacctcaggacaaggcgttgaggtataagatttgattggttgatcatttttaatgacagaaacatgtaacatgctaaactgtgtttggaaacaaaattttgtagaggttggagatacaaagcacagggaatctagtgttggttgatgctaagaatctgatcaaatggcaaagtttcaatttcccaacagatgtgatgttgagtggtcagagactagacgtggctacgcaactaacttcattcccaaatgactcgactctgttctattcctttgaagtcttacgcgacaagattgctctgttcctaaatttgaacaagctcaagtactcttactgggaatacaagcctagagagaagaacacaacggtcaacttcgtgagactagggttaaagggtcttgacctattcgacgataacagtcgcataatcggaagaatagagcaaccgttgatcagattcttggcgcttggaaacagaaccggtaatttaggactctattcgtataaaccggaaaagggaaagttcgaggcaacgtttcaagctgtgagcgacacttgtgatcttcctgtagcgtgtaaaccatatggaatctgtacattctcaaagtcttgttcttgcattaaggttgtaagcaatggatattgcagcagcatcaacggggaagaagctgtttcagtgaagaggctatgtgatcatgagatggttgagctaaatggagtcactacagtgctaagaaacgggacacaagtgagaaacataagcaaagaaagatgtgaagagttgtgtaagaaagattgtgagtgtggagctgcgagttactctgtttctgaagagagttgtgtcatgtatgggatagtgatgggtgttaaacagattgagagagttagtggattgagttatatggtgaagattcctaaaggagtgagattgagtgatgagaaatctaatgtgagaaaatgggtggtgggattagttggaggtattgatggttttgtgattttgttgcttatttctggatttgctttttatttcattcggaagcgacggaaaagcttgttactgccgccaccgccaccgccacctccaccgctatcgcagcagccggctaataccgattcttgatagttctgtttttggatatttcagattaacttgtgtcttacaagaatacatgtaaacattgataccgtttatagcgaaaaccgttgctttacatcgaacattgtaaaagcctaaagaaaatttattgattaatgtttctgaggattttgaaggtaatgcatggtatatcactcttacaattattttttcttataattattccatttataaccaagtttttttatgatatcaatatagttgattcgttggggataagaaaccaatttcttagagttttatgatttttctactaacctttgtttagctaaaatatttttgctattcaatcatatttcactattcatctaacatatatgtcaaaactcaattatttcatgtaaaacagaagaagaaaaaaaaacactgtttttccacatttctactgttaggttaggtatgggatatatagaatttagggctcatggatttatggtatgaataccagtgtagaattgtacgcactagtcgcaattcgcaaagcagaccaaggcacgtccaacggttagttgaaatagtgtcattttaaaaactgagactttcactatgtggcccttctttatgaccgttagtgatccccaccacaaactccatcattgacgcagctaactccggcacaactccctctataatccaacggtccaaatactctttcacttttctccaaataaagttatatttctaatcacatttctatttctagattagaagacaattgagaaaacgactacaagttcacacttttttattgaatccaacggtccaaagattctttcacaaatactttgaatttacttgaatcaattaatctcacttgctataatgataagatattcacctccctcttataagataacaaaattagattttataaaaagtgcttaaactataaataaagacaaaactagtaactgagaaggcaacggacacttgtagctttatgcaactttaattattccctacatgagaaaaagaccgttgcgataatataaagtcttcgttcacacacaatctcgaagaaaacaacaacagttttgatcactctgtctctcttactctatcttcttcccaagttcttgtcttttgatggccgaaaccctagaaccctccctcgtcggggaaatcgacacttctgcgcctttcgagtccgtgagagaagccgccactcgctttggtggatttggtttctggaaaccttcttcccttaacatctccgaagcttctcaggtcttatttctctccttctccctcaaagtctctgtctttctcactgatttttgtccatttctttgcttttggggttttagttgaaatgggtttttagattcatcaatttctagatagatcttgtctttagttgtttcttgtgattatgatgcgaaatttcgaatctttggttgcagaacgaagttggtatggttttgaaagcgagtgagttagagaaggaactgattgagaaagaaggagaaactttgaaggtgttgaagtcacttgagtcgaccaaagccattgttgaagagctcaaatcaaagatacagaacaaggaggataaagaaaattgtgacatgaatgttttcaaggaattgaaccaagcaaagatgaatctgtgcaagacgacaaaagatttggctgctattcgcgtgtctgttgggttactaaacaagagattggaagaggaaagagctgcacttgagaagacacgagagagactaaactctgagaatgcagctgaaatgtccatggagattcagagactaagttatgaagctaaggaatttagtagaacaggagagaatgttcggtatgcggttaataaagctgtggctgagattgaacaaacgagaaacaagattgaagctgctgagatgcgtttgatcgctgctagaaagatgaaggaagctgctagagcggctgaagcagttgcaatcgctgaaatcaaggcggttacaagaagaggaagaaggagaagaagaggaggaaatggtgaggagactatgcaggaggagattcttgagacgattgatgaaacagcaagagaaatcagaagcagtaggaggacacttgaagaaggtttggccaaaatggaagcagaagaaggaaattggtggtggacagaacagaggaggagatcatcatgttcggctaagttcaagaaccctccttatatgatggatgtaaaaggtctgaatatgatgatgaatggtgatgggacatcatcctcagttgctgtcttgaaaccaacaatgtctattgggcagatacttagtaggaaactacttcttgctgatgagtcagcgatgatgatgaatgggagagtttcgttgggtcagattcttggaaagactaactttggagatagagagaaggaaaaaaggttcaatgggaagaggaagcggttcggattcgcaaacttgtctgtgatgttaaataaagagagtaagaagaagaataagaagaagaagatagctttgaacttaagttgttaaaagagtgattgaaatggtctaatctttacattaggacttgttgtttgtgtgttatctatttgttttcgatgtgtttattggtgtatgctaaatattgaaatgagatgtgatttgttatatctttatgcttattccaaagtccaaactaattgcatattcgaagataatagccacatgtatgagatgacgtggttggataatagcttgtagtgttaaaatacctcatttgacctttcgacattcatacgcaatcgactcattccacggatctgcttactcattgattctcgataaattgttcttctcccacagacaccagattctaccaatcatttgctcgaaaaggtaaaatctttctctacaatttcggttgaatcttttgataactcgatatatctcttgtaaagactcttgcttgaatcttctgatctttttttctttatcaggaatcatgggtcttaaagctggaacctttgtgcttctcttgttgggtttgatcttggtctctgacgctagatctttcgttgactccaccatctcaggtaagatattagacaaaatttagaattcatggttgattctagaggcttgctctttaggggtaaagtttgatacttttgatgaaatagtttgttcttatggctggagatgatgaggtagttttatatttcaacacacaagttcccccaaaactaaaagaatggctcagactcagataatcttatttgagtagaagttttaagacttttcagctttacttttgtccgtgtagagaaagtttccaacaaggaagacgtttgcactctgtgtgaggaatatgttactgatgctctcagctaccttgagaaaaatgtcacacaagcggagatcatcgaagatcttcatgatcggtgttcccaattgcgcggatattcgcagcaggttctctcattttgctgatgctgaaccttacactctctatatttttgctttagactgtttgttttgttaatatatcaaatgtgctgaataaatagtatgtttttgaattgatgcagtgcataagtttggtggattactatgttcctcttttcttcttacaactagagtcgtttcaacctcattatttctgcaagaggatgaatctttgtggcaaagttgtagctcttgtcgaagaagctcgtcaggacagttgcggtgtatgccacaggactgtttcagagattctcatcaaactacaagatcctgacacacaggttagtgataactacaagatcatgactttatctctcttctgtcagtgtatttgtcatttatgcattcagtctcatagactcatagcacctaattaagtcataagagtacccacaatcacagtccaaactgatatgccctcgtgtagttgtgtttgcgttgttattatgttcaacgattacgccaactgataaaagtgtttaactatcagggatctttgtaaacaatcctcgtgaagactttctttctatcttatattgatgatgagttttatatactgactttgttttctcttgattatctagctggatatcgttgaactgcttatcaagggatgcaaatcgctcaagaactacgagaagaaggttaaaatgatcaactcaaatccataacattgccttcacgtgtttacaaattaaccatttcattctgctttctctgttggtgttcttctcgaacttttgcaacgcatctgcatgatcacatagcagttagcgtacgcttttctgatattatggtgttgtgtcttgtgttattacagtgcaagacgttggtgtttgaatatggacctctgatactcgtaaatgcagaggaattcctagtgaaaaacgacgtctgcacactcttgcgcgcatgcccccctgagaaatcggttctaaggcagccggagttggctgattcttgaatgttcaaaacgttgctataacaggattttaattccttatgggttatacaagtaggaacacgagctgctccatgagaatggttgcagactttgtgtagtgtctatatgtatggattcaaacacatcctccaaaatgtccctttgcctttgtgtaaataatgatcgctacaacaattgtacctctactatgatatcactgtattctatttgaggtttgttacattttatatgaatgatattagtgtagtttgccacacgtttgaaggatttctcaaaaaaaattacatattattaccacgaatatatctagtgtgccgcacgattggtactaggactgacgtggccaaaagtgtcaagatttgaccaagtcatataaagattagtgaattccattgaaataattattttgatgccccaacgagtctcgagacatttttagtaataatgaatgattaaaaacggtcgaaataactttatagccgttggtcttggtcatgtttctctcgcttaccgtttttttggcgcaggaccaagaagtaaaaactagccgttacccttacaataaacataaactaaactcttgtctttgtcttcttcctcctcactccaaccataattagtcttttgctacaacactcactcactcacttatttccattacctctctcactaaaaatcaaacttttctctgtctcactctctccaaaaacagaggaaggagaacaaaccaagaactcaagctcccctgctcttctcatctttcttcttcgttttctattttctttcttctttattctttgattcttttgaaatgaatcatctttacaaaaacccatttcgcatttatgaaattagtttccatttctgcgcgagtctactcttgtgtttcttactcttctctgctcaagctgttgcaggtggtggaggtggtggtcactcttgggatggaatcgtggtgactcaggcgaactatcaggcactccaagctatcaaacacgaactcattgacttcaccggagttctcaaaagctggaacaactctgcctcctctcaagtttgctccggctgggctggaatcaaatgcctccgaggtcaagtggtcgccattcagctcccttggaagggacttggcggtactatctctgagaagattggacagcttggaagtctcagaaaacttagcctccacaacaatgttatcgccggttcggttcctcgttcccttggctacctcaagagcctccgtggagtctatctcttcaacaatcgtctctcgggttccatcccagtctcactgggtaactgccctcttctccagaatcttgatctcagcagtaaccagctaactggagccatcccgcctagccttactgaatccacgaggctctataggctcaatctcagcttcaattcactttccggtccccttccggttagtgtagccagatcatataccctcacttttcttgatcttcagcataacaacctatctggttcgatacctgactttttcgtcaatggctcccaccctctcaaaacgctgaatcttgaccacaatcgcttctctggagctgttccagtgtctctctgcaagcatagtctgttggaagaggtttctataagccataaccagctctcaggttctattcccagagaatgtggaggtcttccacacctccagagcctggatttctcttacaattcaatcaacggaaccatcccagacagtttctccaacctttcatctctagtttcactaaatctcgaaagcaaccacctcaaaggcccaatcccagatgccattgatagacttcacaacctgacagagcttaacctgaagagaaacaagatcaatgggccaatcccagaaacaatagggaacatatctggaatcaaaaagcttgatctgtcagaaaacaacttcacaggtccaatcccgctctcactagtccacctggcgaagctttcttcattcaacgtctcctacaacaccctctctggtcctgttccacctgtcctctccaagaagttcaactcaagctctttcttgggcaacatccagctttgtggctacagctcctcaaatccatgccctgctcctgatcaccaccatcccctcaccctttcacctacctcatcacaagaaccaagaaaacaccaccacagaaaactctcagtgaaagacgtaatcctaatcgccatcggagctcttctagccatcctccttctactatgctgcatactcctctgctgcctgatcaagaaacgcgccgccttgaaacaaaaagatggaaaggacaagacctcagagaagacagtatcagcaggtgtcgcaggaacagcatcagcaggaggtgaaatgggaggcaagctagtccatttcgatggtccgttcgtgttcaccgccgatgatctgctctgtgccacagctgagatcatggggaaaagtacatatggcacagcatacaaggccacattagaagacggcaatgaagtcgctgtgaagcgtctgagagagaaaacaacaaaaggagtcaaagaattcgaaggagaagtcacagctttaggcaagattcgtcatcagaatcttcttgcactaagagcttactacttaggacctaaaggagagaagcttctcgtctttgattacatgtctaaaggaagcctctctgcatttcttcacggtaagtaaaatcaaagcaaaactctaactttggatttgataaagttgacatttttattgatctctgacattttgaatttaacagctcgaggaccagaaaccctaattccgtgggaaacaagaatgaagatagcaaaaggaatcagtcgtggtttagctcaccttcacagcaacgagaacatgatccatgagaatctcacagcaagcaacattctcctcgacgaacaaaccaacgcacacatcgccgattacggtctctcaagactcatgaccgccgccgcagcaacaaacgtaatcgcaaccgcaggaacattaggatacagagcaccggagttttcgaaaatcaaaaatgcaagcgctaagaccgatgtctacagcttaggaatcatcatattggagcttttgactgggaaatctccaggagagccgacgaatgggatggatttgccacaatgggtagcttcgattgtgaaagaagagtggactaatgaagtttttgatttggagctgatgagagagacacaaagcgttggtgatgagcttttgaatactttgaaattggctttacattgtgttgatccgtcgccggcggcgaggccagaagctaatcaggtggtggagcagttggaggagattaggccggagactgaagtggagacggagacgacgccgtttggatctggtggtgaaggaggtaaagatttagggtcaaatgaggagtaaaggaaagttttggggtttatgtgaaagagaataaagaagaagggaccgatatacaaataccacatttatattttcattgtttattctttgattcaggtaatttgtagataaaaatggtttgaagtttgggctagtaatgtaatgtaatttgattattcattcttttttggttgaagaagtaatacgagaattgatttggaccttacttattttctgtgctgtagtattattcagttgtttttggttaaaaggagagaagaacatgttaccaaacttcaacgacattcatacaccaccatttttctagagagtaagtggtaaataaagaaaatgatggaacaaatataacagtgaacgaaataaattgtgattatggatgctcaaaaaagagattatatttggatctaaacccaaaacttgttggttttaaatcaagatgaaagagaagaaagaaataatagttaagagatcacaaaaatgactttttagatataagtagaatagaaatcaaaagtaccttttacaaaagtcttttctaagccatttcaccattgtttcttcagtaacacaattattataaaaataatccaaaacgccaatagttcgatatacaaatttatgggttgaaacaacatatccattgaaaacggcgacgtttagtcttagtttcaggcaagatcttggcttcagattcgagttgagtcatggttttaactacgatttcgagttcagcctcagtctcagtcatgttggggttgtggtcatcttgtgaagcacaaaaatgaacatcaaacatctcccacaacttaaagaggtgggcaggcctcggctcatccaacactaatttgttgaaaattcccattaagacatcacttttccctgaaatatattaagtaagtaaacacattattattaccatatatattaagtattggaaaaaataaaatctaagtaaattggaagccgagtcattctgtacatgaattcaaaaaaaaatttgttcattgatgtgataactatagaaaaatattaaagtagaaattatctcacatcaaaagtcgagaaaatttccaagtaatataaaagtatattacacttttctacttttgaattaacgagcatgtctaatatttcgattgtggtatcatctatagatgtctagtcctacaaacttcacctttcagattttcaatcatcaacgttaggatgggggaagggtaatgtataaaagtataaattgtcccacatcaaaagttgatatattagagtataaatcaaaaactgtttggcaaattattatgttgtatactacataacaagatttttcaaaaactggatcctattctgatttagtattacgttaacgattatgtacattaaaaactgttttgtttatgttaattagaaggttctaagccaagactcataaatcctctaaatctgaaccaattttaataatggactcgtaccagctgtcactcaatactacagagtactagaggtcagtaaacaacatatatagtatgttatcaactttgtagttgtatcatttggtataagaggcatgttgttttattcgtattaccataagatattagtgtttcgatgattgacctaattgtggcaagatgttataaccgatatgacctaactgtcatatatttggccgaagttatatgacagttagggtatatatatacagttttgatgtattatggtaataccgtaatagttatttggtgaatatatatttcatattatattctacaatagagcattcactatgtgaaatagtcaatactagagatgtacatattggagaaatttggtttagcataaggccagagtcaaatttctactcaagatatgcttttcaaatggagacttttggctgtacacacatgtttgatatgtggtttggaaaaggaaacaaggaaccacctcatcttcaattgtgttttatcttataaagttgtggtcactgcaaggctacacacctctacacagctccattatcttataactatatcttatataagttgtcttaatcttctatttgatcacaaagcggactatccttataggataaaagaacctaagaacctctatttatgtaatatgtaaggaaaaaaacaaagatttagtgatggatatacttttcctccttactttatcttaaaataagtagactgaaactggagaaacaaggtttcagatcaaaaatttatgagtagaaagatgatcgttatcatctacaaagataatttcattcttgggaaatcttctataatacttgtatgttacatatatttttacaccctctaaccaatgcagtctcgtcttgatttctgaaactttcttttttcaacgacattcagtatgcagacttgaattcatgacacatcaacgatagtagcacaaatcgagaagtcacttgtcttggtctaattttgtacttacgaactaaaattcacataaaaacgaaaccctaactatgacatcttaagccctaaaatataaatcattaattcgataaatctattgattaaatttttatctcaataaattatattttaaatatgtttaactcttattaaagattaagggcggcgaaattaccgtaatgttttgaaaaaatacaggttgaaccgtcaatcatcgccaattctgttaagaataaaacaatatatcataagtcatccatgatccatatatattaggcatatgagcagcatcgttttggtcccatgggtaaaaaaaactggaatatataaatctttctataatacataaacttaattactagacccactcgttcttttggtcattttttagatcatttcagttttgaccctgaaagttatgatcttttttcttgtttaatttattgtcagtaaacataaatctttggaccagtgcacttttgctcatcccacttgggtcgagcatgtcgtaagattaatgtatgtaaaaacaaaagtttggctaagtgtttttctatatatatatttttcttgtttcttatatttttatctaaaattcttcttaagtaaccattttatactttcatatcttttaaagtcaaattttataatcttgtaagattttttttttgttcatcacatctacagttacataagaaacaggtaattcaatatcagggaaaaactatcccaatatttcagtttttgatattttataataaattgaatacatagcttttatcaggatatttttgttttatcaaactgcaaataccggggaaaaaaaattacctctattttcggttgtgctttcatgatcttttggctccttaggatgtatctttctcaccaatgatctaaagattctacggatcccccaattgttttcttttgcacttcccatcttatctttctcgttgacaaaagaaaaaagtatcatgtgaattgttctttgaaatcaaatcttagtattgaacttgaaaaaaaaatctgcaactaaacacaactcttatctgtttaaatgtatggagacaaccacctattttaatgtgcatatttttctttaacaaaaattggtaatgtacatatattccattcaatttattttttccattcaattttttcttaaatttaatatttgattatgtatatatttaaggcaccggattatattcctttaaaggattgtttattaaagagatgtaaggacatacgtaagcattgtctaaatgtgaatatggatataaaagtgaggaagatttgttctatttgtagactgtagtgacaggggttgttacactgtcatttccatttataattacttttcatttttctaagagcattctataatattgcatataaaccatatatagatgcttatcctatctaacttcttaaaactactaaagaaattcttaaatcttccattttttctttcataataaatatttctaaatttgtaatcataaaatttattatttagattgttttctttatattagactatcttttcctaaatttattttcatatgtaatatatatatatatatatatatatattaatgctttaatatttcaaaaatagtataatatattaatctagattttagcggacccataatcctcaaaacaaaatcttatacaaatttaaaatacactacttacatatatacttgttagttattgatacttttcgaagtaaactacattacttcaacatccgaatatgcgggaacaaaaatgtccaactcttgacctataacgacttattttcactaggagaaataatcagacttcggatttcggaaccaccacatatttctataaacctgtcaatttcatacaacttggtgagaggaaccatatagatctttgtccaatgtccaaataagccaaaatcatctttaatttttatagactctagaaacaactgcataatttttactatttactttagtatatatctctggttacgtgattgttatgctttacaaaatgatgtacaatatgagatgtgtttgtgagacatagcttcaagaaaacaaaacattttattcattcctctgttaacaattactctcacgttacttgttccatgtttgccttcagtcacaacatgaaagcattgttatagttattctctattaccctttcatcattagttttttttttgttttggttatacataaaagggatgggaaaatattgaacaaaaataaatctgactataaataacatatcatatttaaaacaaagagctgagcaaatagacaaaacaagactttaaattcacaaaaaaaaaaaaaaaaataacacaaaacacataaaaaaagtcccgtggagataacaatcaaagagatggttgtcgtttaagtctccttcagtcaatcgccgagtggatcaaaatggctgcctcgtctgttgttggagctacgtcttctgcgtttagggaacataagtcaatgtagtagtgtataatataattaagccattagatttaatacaagtccaccacatcttaacactatcttcgtaagatttaccactaaatttaaccttcgaagcgtctaactaatccaactaatctcaagagcgaacattctctttgcccaaaaaacactgggacagatcgaaggttaacactaaatggaaaaatccgagattattgcaaatttacgcctttaacactaaaatcgagagcaccgtacctggcagatgagaaataatcttctctaagattccaacacttgggctctcttgttccttctcatcttcatcttcacatagagatttctgaatgttttcactagattttccctctactgttgttgttgtacaatccataaaattggatatcagattgttcaaaatcccacctttagctcctttctcgtcttcttcttcttcttgtttatctttgttcttttctacgacttcttttggacacatgagcttctctgcttctggaacgtcttcttccatatctccttcctttttgtttctttccttaccattggttccaaaaatataatacagtgtaataatgctctaatattgtcttaggcaaacaatgagataatattaatatttaattatgtaaagttatactaatacgtaattagtcggtagaaattagaaaatctagaaaagaacgtgacacgtccactgataccgacaagcggtcatgtggtttttacacgtacctcgtaacttgttgttgtaccatatacttcattacacgtgtctgctaaactgtctaaaaaagcattttcacattcttggtctgattctcacggatccacgcgtccctttattcgaatagatctgaatttgtgcaattttaccaattttcaagtgtacttcttttgtcgcaaccattttccaatatattttttttatgtatatagcaactagtcataatgttttttgccccaaggaaaaaaaaagtcattattttatttatatattgcagctagccactattatttaacaaaaaaaaactagcattagtatgtgttttactttttacttttttagagaggtaggatttcttaggaaaaagaaatgaaaagaagaattaggatttaatctttaaaaaaattgtcatgttgctcagcagatttggtacccaaagctaaagcccatcacaatgggccactctgtattgtcaagtttcatctctttgcaatctcagatttctttcctaatttttgcaaaaatttgcttagttttctctttcaagaaattcagacaaaaggcaaagtcatttgttaaggtttttttttttgtttaattttattttacattacaaatatagaaaaagatcttcagatagttacacttgcacatcttatcaaatcattcaactttaacaaaatacaaagaaaaaaaaaaaaaaaaaaaaatccatcaatcaaattgaaccaatctgcaagcctaatctattataagaaaacatgaaatctggaaaaacaattcttaggtcaaaaaaatttcaaaacataaattgtggatgatatatagtaaaatacatactacataattgttttagagctagctgcatcaattttggctataagccttgtctttgtacatgctttttttttagtgtgttattattaaccaccgcattttacaagaaaccaaaaaaggggtgtcacacaacaatatatcatatatatagtctaaatactgtaataacaagtacctgaattcatctagttatcttttgtaataaacttgggttgcaagtggacgtgtgaagatggagaaaaggcgtttttgacgccacagattctatgcttagtgctccaaggcagcaatacatgtaatccacaagctt

SEQ ID NO: 1078 - DNA, 77350 bp, Arabidopsis thaliana
aagcttgacatatctcaaattatatccgaggaaatcaggactgcccttaggtgactttgacttaactccaccattcaccatctttgttgcctctttttccattttcactaagcatcaaaaccttgtggtctctcaataaataatcaaataaatatgagtcagtgtaacagaaagatggcttctttgctgcatgttaccgttgaagtggcgggttttgctgcatcattcagttggtgtggtgtaactaaaccaatgctcggttcaggtaattaccatttttttgaccaatgagaagtaatctctcattctccaagcaataatcgataaattcatacaactgaaatccatcatctccgttgaaatgttcaagaagataatcagaattctgatgtttcatccctgattggactatatttgactcaaaccattatatgtaacctaaacattcaacacaaaaattgtacagcacatttcaaaccatattaagcttaccaactctcactaatgaaaactacaaaagtttaaccaacggatctctacaatgaattattactctgaccaaaacttcacaaaggctgtcacgaaagatttcagaactgccaagagaggatttgtttcttgtcttcccatattagattcccctttccacgattcactgaaaacaagaagaacgaaagctatgtgaaaaaggagacccaaacacaataccaacaacgctaaagcacaactgagacttcggagtgtgttcactcacggtttaattctgtttaatgttgcattgttttctttttgagagctggaactatctggagcatcaattttccctttttccatggttgccttcttctctacacttgcgacttcattcccggcatagctactcacagtgtccacttttgctctgtcgttcttacgacttcccgactgttacacagttaaaaggttacaaagttatcatccttttctagatttttcatgtgccaagtagtttaactcagtttttaagaacaatcaactaacagctccgcgtatattcagtttcaccttagttctcaaagttggaacatcaaaattgactaccaaaacatcttaaaacattcaagaggttgactattccatcattaacgtccttcagccactatgatgaaaaaccttatcctaaactcagataggaaaactaagagaatatttaggacaacctgtggaacacaaacataattcttgcatcgaacccatgaagattatctagttccagtatccaaatagaatttaaaaggcacacatataccagacgaagcttacctcagtgctagatgttggcattttctgttcagctgtcaaagttccattactaaattcctttgtctcatggacgttgccaatcacaccattcacaacaactgtctctttagcatcagcacattcaacatctactgaagcagaatttacaatttcctctccaactttcttttccatagggacagaaatatgatttggtatttgaccaacaatgacttccgtccctatgtcttcaagtacagcagatgaagtggatgatgaaatctccccaagatcaacatgatttactgtgctgcgatcagcttccacctccgtttcagttcctttcccaccctcacaaactttgttcaactcagtaggttgtgcatccggtgagtccatcgttgaagtcacagattttaatggaaacgtctcaacaactgtttctgctgacatatcaattgtgcctaatccgttcttaatttcggtcattgctgctcctgcatcattcactctatcgtcattgttaacaggctttgtgccgtctgattccatgaaacgaagttcctcaaatccttcgtctttgttatccacatcgagtcttttatcctgtggtttggtgtcaacgctatcgcacactgtctccattctattttgtagccctgcattactcttgatatcattgtcttcactgcaagatgttgcaagctgagtcatagatatgtcagtggagtccattgactggtgtacgagcccaatgtcttctttcaaaagttgacttccactcacttccctgcaattatccaagcaaacctggctaccgttaacgtttccctcaggtgactcagaagaaaaatcaagactttgatatgacccagaatgaaatccgtttggggacaaagataaagggggcacaggatccatcaggattgaacttgacagactttgatcttgcacagagccatttccctcaagtagcaagtcaccaggaccaaggactctattttcttggataatctctctaacaatctcccttatagtgtagaaagatccaccaacctccttgtgtgtgaggctaagtgaaggaaaactcccattgtttagtttctgatgcctgaaaacaaacactaattacaaaagctgggattgaaaagggaaaattcaaaattccggctaaggaagagaattaggtgcatacttctttataaaagattcaaccagtgtctttctctcttctttaggaatccgattacgagtcctcttgcctacagaatcgtgaggcttagctagagcaaatatttgcccaacgcaagtagtcttaagagagtgcatgttgtctctctctctttgtcctattatataatcctgtagcagaagagctaaagtgaaatcagaatcagacaacataacaagtctaccaaagaaacacaattcttaagacagatccgtttagttcattatttcgaaacagtaactgtctaaataacaaacaacaaaacgaagactctcaatcccagacaacacacacgaagagtgattcttatcatctgaggacaattgaattattgaaaagcaaaaacttcttcgataatgagaagagagatgcttatagtttgtagggtttacctgagactctgcaactgcgagaaaacgagagaggtcgatagattagaactcacgagtcatctttgcaaatggactcactaaaccctacgcagtacacagacacaacactgtctcagtgttgggaggcgcaagcgggaatttgggtaattatttcaacttttggggcaaaatcgtcatctttcttttctttatttatttccagttttgacccccaacacttttttttatcgatttagaccctcacaggttgaccactttcaaccaaagattacattttcatcaattttgaccaatcttcacatggtgaaagaatgtaattaagaaaaaacaaagattttaaactatatattatacttgaacatagtactactaacttcatgtttttttcttttgctgctataagcgtaactgtatgtattactaacatgaagcattttattgttactagtaagttgtacattcacatagtctagtcggatgctctcaactctcaaacttctgcctcagaacaagtctccaagaactggattagtttcgagcgttcttcctccaacagctcagggtcttcgctcgatagtctctcccgagttgtaccatccacacttgttggatcgtccactacctaattcattagtacacaacaacattacagcattaactcattcatcaaaacttgttcagctatatgttaagagacagagacatttttactttagcgtaattgttggtatggccgtctttgttaggtcctataaacggttcggcctcattgtgtgtccattcaccatctatgatgtatttatattcaaactgtccttcctgcatttcagaaattgtagtggttgttggaaaatgatcagacactatgcttaacagttaagaagaaaactcacaggcagttctctctttaggatccagaatcctgttcccttgtccagtgttagaggtatcctctacataaagagaaaaatggtaaaaacgaaaagagctaaagaaatacattaccttttatatatatacgtccaaatagttttgcacaatcataagacaataattttcagaaatccaacactcatctcttccacttcttatcaaagaggccattcttttaatagcagtgacaaaagtgcatcctggctttaaagcttatatggcacaccatagatttaagagcaaggtgtcataataaataaattggtttaagataaaatatatttacctgtccccatccaatgtcaaggccagaaatttctactctggagaaccccttatctttcagtgtcagagtaacagtcttcctcttgagtcctgtaagcttttatccatatacacccggaaacaataatcaggagtcaaggaaccaggtaactgttgcgcactcatgctaatcaatggaactgaggtttttcaaacataggaagcattgtgaaagttgaacgctgactcacaatatcaattgttgcatttctgatagcatccagcttcggaaagcacgaccttttgctctgcaagaaaatttcagaaatgttatataaaccaaatttacgcgtgcctttatgtttcaccagccatctagagatatcaaactaaaaatgtctaatgctagactattttggatgaactaacccaagatttttgtcttttaaagtgctatatcttcagtgtatatttactacaaacccctgacccaatggtctatgattctagttatcataattgtcggttcataggagaagaaggaaatccccaaacatcctcacataatataacaggcagtaacactagtaaaacatgattaacatgttggttacttaatataagtataaagaaacacatatagagaacataaaccacaagtaaattagtatcttaccataagtaatttatgagcttccataagcttatagccttgcacccagaacatgtatgtcaactgaaaatgaaattaatatcccttctcagtatcagtcagcaaaatgtgaaaacttgttcataccttcatgagtcaaccaaataagcacaaaattaagacaactactgtttgcaacagtcttacattttttcaatactggaaagaaaagggggaaaaagagaagagcttagtaacaggtttctgtaacataccgcaacagcaggagcccttcccattccagcagtgcagtgcacatatgtaactcctccatttcgcttaacagctttgtaaagagtaccaaccacggctggaagacgcattctcaaatcaaatgcatcaaagtctctgttacatcaatgatatataatatgtcaatcccctacgttgtgagtgggtacgtccatggtgaatttttctatgcatgtgctcgtgaacagtctcatatatgccaaaagggatgatgatggttccaagtctttagcagtaaagaaatttagtgagaatgggatgatgactaacttctacagttactctagtttgtaaacagacaaaggtggacgaacaaaaaagttagttgatagcagtgatttcacacccggtaaaaaaaaactatcactcacaattcgtcataaaccagttattgcttacacaaaagtgtgctgatttcccattagcttaggaaacgtgataaaagtaaagagcccaaagaaaaagaaagtataacacttcactgacaaaacaataagaatttaaagattgcgtgcctaaaagatatctgagactaccctccaacagtgtatatacctttgttccctcgcctattcagataattctggaaaaaaaactacctcatatgcttcttataaagtcaagcaataagaaaaatattggaaaggaaactaaaaatcaactcatgatctctccttcgattcattacgcatcagctttgaataccaatatattaaaaagtcacagctagatcgttgccttacctaatttcacagcgaatatgctgaatatcactatatttcttagcataggcttggatgctgcttatgtctactccaaaatatctggaaggattggtcaaggcattctgcactgcagatcattcttcctcactcaatgcgaaggaaagtgaaaacaaaatcataatcatgaacagaaaaagagggctttggaaggatactccaggtctggatcttgttgcaagcaaaatatggttttaactccaattttacgaagcttgtcaacatcttcaggggtctagcaataaaggagagcatacagtaagaacacgaggaaagtaccacatatccaaaacaaaatcatcatttgagagaaggatataaaagtgaacctgtaagcaggatccaacaattagatctggacgaataaagttgtagttcattcctaactcgtgcctgtaagttagaactgaaatgaaagacacatgagaatgaatcagtgactgaaatacataattaaggagaacaagaagataagtttgtcaataaacaagcaaaagatataagattccttggtagacagatgaacaaaactaatcaagatgaaagatgaaaaacaagagtagaatacaatccaatgagctaaatcaatatttccaatatgagacaaaaaatggtggacatcattagagtttccaatctaaggacatgtataggtatgatgaaaacaatttaccagcacccatagcttgagtcatgtcttggctatattcatcagatttctcttcatcctttgcaacaccactcatctctgagctggattttgactctgatactgcctacactcaaagcatttacaaaagtgtcaataaaagttagaagaaaaaaactgatataacaatatatcttaaaagaggtgtatacatgtaaaacaagtcgagattttggatcattggctttgatcggaggcgatattagcatcttcaaagaagaagaagaagaagaatgatctctttgaatgcacccgaatcccagcagaggtgagactgaacatctgaaataaatgacgatcaaagacatcaacaacacacaaattcatatcgaatcaaagaaccacacaaatcaacaacatttgctaatttcggaaagcaagaagatacctgggaagattctgaagacaattcatctttagagagagacagagagtgtagaaaaatatcagaggaagcaaacgaagctgctactttctcagtcccaagttcgacgatagataaaaaatctggtaattataataattttcaattcatgtccaaaaatgtttgtgagtgtgactctgacggtcacgcgactcacgacgatacaattgggaccccacggtctgcaccgggaatgcaatcacttttgtttgttacgtaaagtggaacacattactagaaaaagtctccaactttccacaataacaaaaacaccctcttcacaaaactaatatctgctgccacatcagcaccgtcaatattgaattgggttattctgtctaattatttttgttagaggttacttcatgaagataaaaagtgagaggttctatttttatatttctcaagagctaatgggaccactcatatgacgccatcacgtctcttattgttacaaaagatcttctctgcaattttaataatattttcagcacaagtaattagcaacagtaattgtctgtaaataaatcaattaatcaacaggtatttgtcagagcaaaatcagaagaaaggaaaaaaacaaaaaaaaacgctgcaacaagataaggaagaaagaagaaaaagcagaggaaagttacataatctttctataggtccaagttccacctactatgatcctcagaaggcgtggaggaggaacctccaaatagactaatctttggtcttttttgatcttttcccattggtaacttccaaaacgaatctgagttctcgaagaatacgtatgcagctatcactgatgccatgaacaagcaaaacagcagtgcatatatctgccactctgcacatcaaacaaatagataatagtgagaaacaaatgtataaaccccaaatatgtgccattcatattttcagagaaagagattagcaacaaacctttccactcctttggtacagtgagtttggtcaccatctctccccattcgctagaagttgtcagcataaccctagaaagaaccaattagataaagatcaacattagaaacaatgcggagacataagggttttgatttatcattatcctttcaattgcttccccatacctttcactggggcagaactcaagtgaagcaatggattgaccaagatgcagcctcttactgtagtggtagatttccattgtcttaacttcagcaacagatacatctccatctttcccacccctacaaaaataggtgcaaagtatgaggttttatgtacaatcacacaagcctgatagtgataagcagcccgggatgaagaaagactcacaaagcaatatatttcccgtccaagctcactgccattgtcgatgcagtcttccttgacagcttcttgaacccaagcttcttccatgtactaatgtcataaacattgaccataggcgtatcacctgattccaatagtttaagctttcatatgatgtttttaatttgaaatactagtgatgttactcgagagtcggatatattatatacctctttgagcagcacaaaacaaaaaaggttttgttccgtctttagagaaacggcacagttcaatattttcatcctgcagacatgacaatatcagaatcagtcaggatatatcagaagccaatataggaaacacgacagagacaaaatcgagaccgagaaatctcagaactatatttattggaaaagatcatagacatggaaactcatccttcatacaaatttcactggatcttattagtttagaaatataggaatgctaatgcaaactttaactctcacaatcacataccccactacgttccaaagtagacaaaggaaaaccatcttctgctttccatattctagctgatccatcagttgatgttgtagctaagaactctgagtcaagactacaaaaaaatatacaaatatgagaaagatgcacacaatgggtttcgtttcacaatctccattaattactatttgtgttgtataacccaattctcagctctatacagaagaccattttttactacctcaattacagttttgcattacaaataatataaaaggggggatggtggttgagaagattccagtatttacctaaaatccatgtcccggatggatttgtgtgcctttggctcatccaaaattacacttaggtttggccactccataattctaagacatccatcctgaaaataacttgtagtaagctacaactaaattgtcgcaacagtgaaagaaaaaaatcccttatattgcagttccttaccactcccccaacagctaatttagacccatcaaagctgaaggccatacacttttgtagtccagcattttggagaggaaggagttctttggctaagatcgtaatacctgttgctcctccgacaagctcaaataacctgaaaaccaaataaagttttaattaccatctagaccgtaaaacaaaatttgtatagacaatggggtagacagtgtccaaaaatggttgaagacaactcctcgtatccatgaaataagtggaatagtagagttgctaaagatgaatgcaagaaagggaagtcaaaatattatgaaagagaccaattataaaaggcatcggcaatctccaacaaaagtataggcatatataaaataaaccaaaccttaaacacaagaaattcaagcctcactacaattaattctacatcagcaaacatgggaggtgggagatcgtctgatgtaatgagagaagtaatgtaaagttctagtaatctgatatctagttctcatcataggtttaacaataccaactcaacaaatttagaaacatagtatcagaggaaggaactgtaggatgtctagtaatcataagttttgggtggtaaaagcagagatagaaacgtacttgcaaccacctttggaggttgagcaaacaaagtaatccccaccagggtgcactgaaacagccacaggatcaccatcactatccttaagcgtgtgtgttgcctttggtcaaagaaaaaagagaaaaaaggttggtttttttatttcattagtccacagaagtaaacaccaaaagaaaggggctttgctctgctttctcagaatcagaagaaaacaacttgaagaaccctagatttattgcatgattcagaagaacccaagtttcgcaatccaaagaactatagtagatttcaccctaaacccaataagatttcgaagctctcgattgaaaaattcaaaaggtgtaagaaaaatttaccaaaggagaggaggaaagagaagcagtaatggggtcaaaagagaagatgttgaggagagcaggagaagaaacagatgagccacggcgtttggaagctttagcgataagaacccagtttactttcttcgggcgacgaatccatgatccgcacacaacatgtccactttcacgactcgcttcttcaatctccattcgttgttggattgattgttattaatttcctctttggtctctccctaatttggatccttaatatatatatagacagaaaattgtttttttttgtgtgtgtgtgtagttgttgttccagagtagagaagaggaaaacagaaagtaaaacaaaaaccaaaaaggagttgactttggaaattggacagagagattttgttgagttattatataatgggattgaaaaatctcagatttaacaaacggacatttgcggtggtgggaaaggatattccttaagatccatgttccgatgccgaatttaatacaaacaagttaggtcacatcgtgcttccgtaatctatagcagactttcccattggtgtcaatctcgttgtttaaaaaaaaaagtaatattagaaaagattgaacgtaatctgaatattaagaaaaaggataaatatgaaaagatatgatgtaaatatgtaatcgatgcatactcttaattatgcaatgtaattctttttttgtgacattaatacattatatatcctttatcttataaaacacaagtcacttggcaaatcatgttttgacatgtggcaaatttatcaaaaacaaaatccacaatgtaaaacaaaaatgaatttttcgacaaaactcaaaataaaattaaatgtgaaaacagtgtacaaaattaaaacattatcgtcaattttcccacgatcactctcaaaagaaaataaaaatcaacccacatattctccatactcccacaatttctttttcttctattcaaactatgtaactcttttttttcaattaaaacattcaaactaactattgggaaacaaagacagatacgatctcaaacctatatatacaaatctcggtatcatctttctattgttgatattggtttttaaaagaaggttgagagtaaaatcatttaggagcgagaccttctttgtaacaagagtcttcaatctctaatcagttcatataaggcaatatggccagcgtatgttatatttcttttattttattgattgcgtttagatgagtatattaatgctttctgtttttgaattatcttttattatgtatgtttaatatctttttgcttcatagatcaaccactaaaaataaacaagcaaacttgatcgatagaggataaaacacaaacaaagtagaagacttgagcaagaaaaacaccaatggcaaagtagtaggaggttgaagacgaagtagaagtgtacaacattaagacataaatgatatcatctatgtattgagtcaacttcactctggtaacttttttttgtctatgactataatctatgtttgtattgagtctttgaataccatatgtaattttttattttatagcttttgtatgtattctagaaagcattgaagttggaagctaattctctatatttggaagactaataattttgtgatatcaacttcaattctccattatatatcaaattatcatctgaaaaaataaaatccacaaatacatgaaacgatatatttttccctacacgattatatactaatctatttataaaattaatttttcatgtataaatatcgataatatgtaacatatcataacatttaaattcaaaaaaagaatgtatcataacattaattttcggtgctatgcaccgggtataatactagttacaaataaagtataaaaggaattaaacttttatatagataattaacacaaacaaaatattagagacgatttcaaataaattatgaggatatagatgagaaaaatactatatagaataacaatagtaagaaattaaaaataaataaatcaatttgtacatataaattagaaagaaaaatatagataaataattaaacaatattaatagtatcacataggtcaattaaaattttatatacaatagttaaagagtattatatctcaaaactaagttttgatactgcgtagaacaaatcatgtttcaagcaaaaatgatcaaattcctatgatgctggaaatgcttgacgatccacatgagactggctatgtgcatgtatggagaaaaacgtgttgttcgacaacgcgtgcatgccttcttccacctaagtgacgacgcatcacaaaaagttatctagtagtgttaatagttcatgttccatctgccgaaattacacacaatataacgtattcgattatttgttatccaacaacttaaacgattcgaccaactcactcaaccttttgtcactagttccagtcatatatttcttataaatactcgttcactacatctgtacagatcgaaagaatctcttgatatattacaacacacccataattcataaagactagctcatatacctttgatatatgagatttgatctatatgtcgttctccttaactagatatcgctaattgggcttgcattcaacaagcaacatatatcgcttattacattcgacgatactcagcttctacatcttaagtctctctttttttctgagctcaccatcaagtataagaacacaattctacctcttatttgtctactcccaattttttgtttttggtttttcactattctgacatcttatcgtattatgattaacgttaagaatgtcgtctcgaaaatcacctacctagctattgtttcaagattcgactcccatgcgcgtcccatcaagaacaaaccatccagaagcatcaacctccaactattagagaataatgtcccattcgcccctcgctggtcaaatcgcttccatttgattcacataagtccaacaacaacgatgatctctggtgtactactaccaaaactcaaccttgagacagattctcaaaatactatatgttctattaactattttaacttgaatcaagttgataattgtagagagaaattttttgttcacttcttattaatttgtaaaacatttattttaaaacccattaccgttaagctttgatacaatgatacatgttattttctgattaaaaatggttataaacttgaacggtataagactttagtgtatagagaacaatttagagaatctgtatttatgtaaccgcgacctttcggaaacgtagaaggtggtcgcacaaacaaaccaatcaaacccttaatcgatggcactcttttaatgtctaataaacttcggttcgtcactcgaccggacaattaaatatgtgattaaaagtgtgaatttccggttcggtagagattactggtatttgttaatccgggccggaccgggccgtatctgaattatgaacactttcctaatgtcatagaatcgttcgtgccgtcgtcgctgcgatctgaccaaaatcaaaagtgttacgattcggtatcatcgtctctctcatttgtgattttgtcaaaccctgctctcttttctccaagtgctctcatggtgcttccgctcttccggcgcgctgcgatcgcccggacttcctcgcttctcagagctcgtcttttcgctcctgcctccgaattccattctcggtacgcttattctctctatctagtcccgcctctttcaaagtattttgatgttgctcttcttccatgtgtgatcctttgcaattcgatgactgaactgtttcttagttcgatttcattttccttttccgcaatcatccattgactttttttggagttcttattacgtattgtatagtgatgtttaagaatgccaaatttggttttgttggaacaattgaactatccattttttcttatcgaactggtagtacgggtttatcttctctagtttgtgagatgtaatttccattttacgtcactcgcagtgaagaacaagtgtgtccttaaactggtgtgatctctttacctttccaatacatttgacaatgaactttcttattcagcttttctaatggactataccacttggacgacaaaattagtagcagtaatggtgtgaggtatgtgttccatatcacaaattgaggacaagatttatttttatagaaaaagtcagtgtgatcgtaggcattcaaagtttaaggttataatttagttcgtttcgtatgtgttagattgttagtctagtttgagattttgtctgttctacattttcaggtctgcctctatagacttgattacaagaatggatgatagttctccaaagcccattgtaagtgaacagctagtactgtttcttttcttttttcactttcatctatccgtgtttctcacatacattgttttcttgtagctgcgatttggcgtgcaaaacttttcatctacaggtattcattgattgttatgtcatcttatggaataatgatcttcataaatgagtcaaccaagcaattccattatagaattactaaacgagttgattatgggactttcatctgatttgagcaacctgtcggcaattgttaaattgttttagccataagacttaccaacacagatgttaagtgggtgataagaataattaatggaaactttcgcttaacttgtagaaaaatagaaatgttaattgatgcaggtgcaaaaacttccatatcactcttttctctgatgtttgtgcttccatcataccttagatacagcgacaggagatgcaatcaattatacaagattcttccattaaattattattttctttgggttgtaggacccatatcacagacggttcttgcaatgccagccttgtctcctactatggtaggaaatttgacttcaatcttgtaaagaattttggcctcctccaagacatttggacttcaatcattgttttatgtttgttgggcttttgcagagtcatggaaatgttgtaaaatggatgaagaaagaaggtgacaaggtgggttatttcttatttttggttgacaaaatttcagtcgacttttatgattttgtctactaatgatcattatacaagaaagacgataaattgataatttagctggcaaagaaaatatagaatgtggaaattctcagtaacaggtatgaatttggttcttcctgacaggtagaggtgggtgatgtactatgtgagatagagacagacaaagccactgtagaatttgagagtcaagaggaagggtaattttgaaaaagacggttcatgattttatgttttgatttgtatttttatttcattataccttggtaattcaaatatctgactccctataagtatatgaaaatgtcaattggcttactatgaagcatggttctgcagatttctggccaagattttagtcactgaaggatcaaaggatatccctgttaatgaaccgattgcaataatggtaagcacagtggctgtcttatacatttatagaaaccaagtatgatctcacaaaaggtgatgcatgcatcaacatacgcttattaggagttcctgtttgtttatctagtctgctcttggcctctttcactttctttcgtttcctgggtttacattctggaagacttgacaaatcatagagatgtatggtatttcgttgtcaatatttattgtggaaaaatgtccaagatccaatctcatgctctcttcttctaaatatttccgtttgccatactgagttgtcatgttatgtccccaaacatgatatatcgtagggtttagggtgtagcgtatattggttacagttttggtcaacatcttgctacataaggttgatggataagagtttaatcttatctatttaattgtaaccaaggttgaggaggaagacgacattaaaaacgttcctgctaccatagagggtggacgagatggtaaagaggaaacatcagctcatcaagtgatgaaacctgacgaaagcacacaacaaaaaagttccattcagcccgatgcatcagatcttcccccacatgtcgtcttagaaatgccagcactttctcctacaatggtatgaaatttcatattttatgctagctttttttggaggagaaggcattcagctttctatcctaagactctgaattatttgtttattgatgtgcagaaccaaggtaatattgccaaatggtggaaaaaagagggtgacaaggttagtttctggtgacccgatgagtaaattggcattgtaatttcaccacaagaaatctgatgtttatgcacttgcctgtgttgattcttctcatttcatgaaacagattgaagtgggtgatgtcataggtgagatcgagactgacaaagccactctggaatttgaaagccttgaagaggggtataactaacatcttgtcgtcttatttctttttctaggcagtatgttgatgttcattctatatagcattcactatctgtggatattgcttcttttcttgtttggttaagtgagaagtaaatgttaattgcaaaaagtaaggtctctccaagtgttcccccttgaactgatagtgatttaaaaggttgatttcatgtttcgtagttttcatatgagtatgggcttcctctacaaaaactgatttcctggatcaaatgagtgaagttatataatagattctataacttgatggatgacttttgtgtaggtacttagctaagattctaattcctgaaggttccaaggatgtggcggtgggaaagccgattgccctaatagtaagtcttttagttcaaaagtacattgactgaattctttatgccagaaaactgtattacgactggtatatttaatccatttgttttactagcctgtgtgtaatgcattttgtgcataaattggtcgacactcttctagttccatgctacgttatatattgcctgaagtaaaagttatgcctgcacaaaaaatctttgaaaatacaattgcttgcagattgggggatataataagctaatcgttcttctctgtaggttgaagatgctgaaagtattgaagccatcaagtcttcttccgcaggtagttctgaggttgatacagttaaagaagtccctgacagtgttgtagataaacctacagagaggaaagcaggcttcacaaagatcagtcctgctgcaaagctattgattttagaacatggattggaggcatcatcaattgaggcatcgggtccctatggtacattattgaaatcagacgttgtggccgcaattgcttctggaaaagcttctaaatcatctgcgtctacgaagaagaagcaaccatcaaaggagaccccgtctaaatcctcctccacatcgaagccttctgtgacacagtcagataataattatgaagattttccaaatagtcaaattcgcaaggtaaattaacatatttattactctctatgtagaatgatgaaatatgtcctgctgcattctgttttactttccccacttggcagattatagcaaaacgtttattggaatcaaaacagaagataccccatttgtatttacaatcaggttggtgactcacaacctttgtattttctttgtgtattttatttgctgtttaagcattttattttgcctgcagatgttgtattggatcctcttcttgcatttagaaaagaacttcaaggtttgtagactgctcttatcacacatcctggtatttattaacaacttgagaggctcagagtgaactgtactttcatgatctacagaaaaccatggcgttaaagtgtctgtcaatgacatagttattaaagcagtggcagtcgcactgaggaatgtacgacaagctaatggtgagaaattattttctcctcgtaaatgatttcattaaaaataactaaactatggtttgttcccatccctaactatgcgctagattaaaaccttagttcatcctctttaaggaaactcggcttccatgttggattattcttgcaatgccgtttacctccgttgagagtatttagtaaagatgttttgagattgtaatactgtaacattcaatatgactggtaatgcattttagactcggttttagtcgttacaagtaggacattttttggtgtgagtttgatgtaatgatttgtggattggaatcgtgtggttgttttttctcttctgctttctcaaacctttcttatggttgcttaaagttctctttctcaatgtctggcagctttctgggatgctgagaaaggagatatcgttatgtgtgacagtgttgacatatcaattgcagttgcaactgagaaggtacacttgtgtgtttgattttctgatcatttcaacagtttatccctcatcatcttggcattttttgcagggcttaatgactccaattatcaagaatgcagaccagaaatctatttctgctatttccttagaggtaattttattctctctgaagttaaacgaatatggaaggctatagaggcacatatgtttgatcagttcttaccatattccatgtgttgttgatcgctatagttatgaattttaatatgtcaaatgatttttggatcaggttaaggagctggcacaaaaggctcgatctggaaagcttgctcctcatgagtttcaaggagggacattcaggtattcatcatttttaagttattaagcatagtacggaattatcaatcatgtgtaacttttcctacttaacgagaaaaccatactttatcgttttgcagcatatcaaatctaggaatgtatcctgtggataatttctgcgcaatcattaacccccctcaggtaatcatagccttaacgatgcaccctgaatcacagattgaagattaagttttgctgtttgtaatttgtggtgtagaggatttagtttaatatttatagagatgcagatgtgtttttttggataataaacttcaggactatcaattgtcttgcaggctgggattctagcagttggtagaggaaacaaagtggttgagccagttattggactagatggtgagctagtagaatccttttgggttttcaactagggttgctattctgatcatggtatgacaagttttcgtcattgtttcaggaattgagaagccttctgttgtgacaaaaatgaatgtaacgttatccgctgatcatcggatctttgatggacaagttggaggtaatggaacattcataaatcccttcgtttcgagttttatgttatgctgctgccatatttcactgtgtttctcctttgttactcattgctttttctatgaaaccggctttgtttcagcttcgtttatgtctgaattgcgttcaaactttgaggatgttcgaagacttcttctgtgagaaagatccaactgtttaccaaatgaatcttggattactacataataaacctcggaccaacccacgtgcacatccagaaccagaactgctggtctacattgttaactctgatcacatgtttcatttttttccatttggttcatatacttaccaaaatttgttttggtctttaacaattcgtcttatagattggtaacttcctgaggtattttttgtctggtctgtcctctgcaaaataaataatttcagctgtcaatccgcaactggtgaaataatttaaaaagtattttaccctcatcaaaatttttaaaatgagattattgccatctctgttctaccagatcttattgttgagctccaagaaacgatttatagacttatagtggttagtgttgaattcatccgttaagtctttaaccaagagattacaaaatttctatccaaaatttagggtttaagtaccattacaaaagaaggaaatatcagagatttgaaggtgatgtaggttaatcatctgaagtagtctaatgtcttgcaaattgtgttgtaatttgttctatatataaagtttttgcattttcggagaaataaagaaaaaaatgatcacaatacatccgaattgatagcatcgcattcgcataataaaaacttgtagaatgaaaaaatgaaaaatcacataatgaaacaagaaactatacgcttacttattagcataatatgcttttatttatatttttagacgtaagatctacattttcatgaatcttatgcatattttctcgattggttcttgcataatcgtattaaaaacccgttattcaaccattatccgtgttacgaataaagtatgaaatataaatgaaatatggaggcaacagaagaagaaaagtttaaatgtgtgtcaaaattgtaattttcagaacttcagccggagaagaaagacatgagcggcttcgtggtttcaaaaccggagcagagccatcatcgtctcttcgatttcgcaaagacggccataatcaacatcttcgcacatccttatgccactgtatctaacaaacccgcttcctctcaactccatttcatttacaaagtcttatcctttatgtctctctctctgcgtcttttctaggtttgcgaattgtactgtggcggagctcccgaaaccgacaagtgggaagctgctccgattggtcactacatcggaattggtattaatatactcttacttacatactcagtgttatatcagtacggcttcatcgaagattgataggtttgcgtttttttctatttgggggaagtagatacatcttctgggatttcttctgtacgagaagcttgggagagtcagaggaagaattacgatgtggaattctttgaagctgatccttccaaggcaaggcctttttttgtttttccatgtgtttcagctaaactaagtaatctggagcaaaagtcttagtttttgcttcattttgtgtcacaggatgattttgaaatccagctacagaagaaattggagcaggctgatttagtttcttgttggcgccatctccaggtttgagattttgtcgtttgttttctccgaaaaatgtagcatagcaaggatgtgatggtctaaaatcttctttatgtagttatgctttgaaactgaggagagtgcgagaagactcctaactaatgtagcatgtttactgaaaccagggggttattttttcggtatcactcctgactcgtctacgatttggtaatgatgttttctgtatcaatgcatcaacttcagcatttgattgcctatatattttgatcagttggactgcgctccttaacattctggtcaaacagggcaaagtaccagaaaaatgttgaagcataccacaacagaagcggtgcaaagcctaatgtatttccaaactacattcggtctgaaagttacatgatcactttcgaattggaggaagaaaagtgagcattttttatctgagataaattcattttgctatcaagttccttttgtgaacttggactgtttgtcattttcttctcagatttccgctgtttggaaagaggtaccagctgaaattttctggtgacaatgcttctgaagaccattgcttggttcacttcccaagcttaatcaggtgggttctcgggcaccatgatctcgcttttcttgtttagcaaaatgtaacactaattggatgatatgaaattaccatatcaacaatgtgcacttgttgaacttaaagcttgtatttattcttaaaactctttaagtaaacaagatttccattctactcgtgatattgcttctagttgagctacaaatgacatctagtttgtatatatctttcgagtcttggtcatctaacttattgttttggtgtttgctattcaggttagcgagggaagctggccttgaatttgtggaaattcaaagtttaacagatttttatgatgataacaggttcgaagtctcccatacttgtagattctcaatcttttatcatgagcttttgtatgtcatagttgctcctttcgaaggttgtattacaatgctgatgttgttcaactcttcttgtcagagcccagtttgcaagcttgctgatgaatgctggcccgaatttcgttgaccctaggggaaaacttcttccaagagcatttgatttgttaggtaaccttgccatcatattatgccatcttatcatatctaatctctagttttgatactttatatccttattttgcgcaggtctgtatgcaacattcatatttcagaagcctgacccagatatcgaacctcctctaacgaccccaataccttttgaaagctccaataatcatgatgaggcaagtacctttgtcttgtcatattctcgttctacacaagtataaataactctaaaatttccttttcacttgagaaaaagagtctggctatagctttagtatggactgtatagttttcagtttgtagcacaacagtgcttcagtctcagctccttgcccggatgttattgtagttgatccatttattaaattgtttttgacaactttgcagagagaattgccagttatcacggtgatcactgacgcaagtgcaccagcagaagatccatcacaaggactagggaagattgttgaacaaaaaggaatactgggaccaggccctgctgatttacgtttctctgaagcaatttgatgccttttattttaggaagatgtactgctttggtgatgtagtgaaagttgtttatcagtgccacagatgagctaaaacgagcgtctcggtttgttataatatcaaaccacatttttcatgtgttttaacaaacattttcaacaatgttcaacaacactttactccacgattcgtaaatgaaataagcaacagatttaaatcttgcagaagtggtagctggattttggtacctagccgaccactcttcctctgaagagcaaaatgttccatcctgggacaattcgcttcaatcagaatcagagtcatgccttctttttttctccttcttctctttcttgtgcttctttctatcatctgaatcacgagcgcttcgcttctcatgcctttcgcgtttttcacgcctatcatgtctttcttccttctctctctttgcaggtttcctttcctcacgcctatccttcttttggtccctctcaacatcatccggtccatcttcaacagttttgacccctgatgtatctgctggtaagcgtgctgaatctgcatcttctttctgagaggatgcaagggtgctcggatcttcccaaggtcgtggtgctctgtacagagttggagaaagacatgtgagacaagggacaaaggtaaactaccaataaaccataaagccaccaaaaacattaacatagttaaaaattagagttttttacgaaagaaaaagaacttacttagcatatccaagaccgtgaacccacacagcatcagcattccctgcacctaagtcctctgctgtcgaacccctcttcacaagttcagtaaactcttgcttatcaaggcgatttccttgtggccttgtagaggactttggtgccaagccaagagcctccctcatggcctgctcctcttgttccttaactctttgaatctcttctttcatagcatccatctcggaacccttttgctttttatctctagcataccaatgaagatctttacctattcagttggtgtacatggcaaatgaatgtcagtcaaaactcactaaactgaagattaatctacaaaaatctaaggcagtggatttatgaaaggagtaactaaagtaaaacaaccattgactgcccatactccaatgagattgaacagagcaatgaagcacaaaggaggattatatcgtcaagatgaaaactagttagcttacaaattaacaaccaccgagagtgtacataagaaaaagtacctttttgccatcttccaacaggggctttgatactgtgacccaaatagttctccctatatttatcagccttgacttcatcccaactgaattctgcacatttataaacaaattcaattagtaatagagttctcatcattagcagctcatgttctacatctttgatttgaaaactaattgccaaaaacgatctgttaattagaatgacaaagcttcttctgaatttcagcttctcccacaaattgcttatagacaattcaatcaaacactagatccaacaaaaaaaatcatcaaaatagcagagaagaacgaaaacgttggataatacataggaaccctaacagttgagaattttatgtaggatcttgtaattagaagcaaaatccaaaacgaattataatgaaacttacgatctcgaccaccgcgaacacctcccctcgttggatgatacatcgaaaccctgaaagttgcaaccttgatttttcctcaggaggctaaaagccagaactttgattggatacgaatttctcagatttttggttccaatggagtttaaataaaaacaaaaatacaaaaaacaaactgaagacggtgattattattatgggccaaataaggctttaggcccattagaggttaatagaaacaaaaacttgaaaagacacgtgtgacacgtgtcgtaagcaaagaaggagagaagtggagagaagtgaccaccagacaattgtaaagcctacctaatccacaccgattcaattcaaaaccctaaactcaaaatccgtctcggtggaggaaaaatggctgaagaagctcaagtagatcgttctaatggctctgattcatcatctcctcccataaagttacctcctttcatcaccaacctattcgcctttcttcaacctaagcctcctcctgctactattgatgccaatgctcctaaacctaccggcgagaaggaacctctgaaatcgacctacgagactgtcactttcccttacaatccacccaaaagcgcagagccaatcaagtttgaggctgagcccagctctggcaggacttccaactctgtcatcctttggcaggtgattttgttaagatgtttatattttagagggttctttgatgaaaaatgatttgaattggcttataatttggggtttggtgagaggtgctttgttatgttatttatgagaattgtagggacatggttgtttatggtagatgttcataattatgactctatgactcagattatcacttcctgtttactagaaactattctggctttttttctctatcaataggcaaatagttttcgatgttttcaatgtatttcattggttgcagtcagttgcagtgtgctacaatgaatgttgaaaatggtttcagtttttgttatgccttcgattcctggtaatgctttagatgacctctaacaattagcttgatgttctgtcgttcatggagtaggaagcatactatttttgctcctttcaattgcaagttttgtagtagtcagagctatcaaaggctgacttgatatatgaatagcatgactcgagaatcgagatgttttggttgtggtgtgctttattttctcatcaatggactcctgacgtatacgaaagagttttgttctgatgattgtttcaaatcctggaaaaagttggattctttcatggttaatttagtggagtattctctataactatttcaggtatatgcacttggagggtttcttgtcctgaagtgggcctgggcaagatggaatgaaaggaacgagagaagtgacaaaaaggaggcgacgggtgatgatgatcagaaagatgatgatgaggatgatcaatcatctgatgggcatgaagactagtcatattacttgaacacgatgaaaatgttacccactttggttctgtatagcaaaaacaccataaacttcaaaatgaagatttcttattttccattgtatgtacttgaatcttgagtctcatctccttatctaaggggactcgaaatctcttctcatgctggcaagaagttttttttttcttactggacaaatctcttgttgttgctgtgcagtgtctctttagttcgtgacttgtagttagatcattgctagttaagtttcaagagatttgtcatgttaaatatcataaaccgaacaaatgaacacacaaacattatcaacaaatgggatttcaacaaacggtcctataatgaccaagttatgaatcacatacataacttttgcctcttctatacagtattttgacgttacacaaagctgatattagtctacagtgtatataacaaccaccacactctacaaagatccaacaatcatatcacggcttcacaaggatcaacagaatcattctcgcctaaataagccatcatctgaaccactagtaggagacagcccaaacgggcgtgtgtaataaggagtcgaatacaattctctactgcttagaactgaatcaggatacaagcttcgagtaggtgtcacaggggtattatatgtacttgacgatacttggttaccttcaaaaccagatgttccaccagagattgcactgcctgaaactcttggtatgcctttattaagtctgaatcctggaacatcaaccatcggtggaccatctgccctgaagctggaccatagttttggtccaccgatgtatggggtggtcgaaagtcggtcatccactgacaaaggaggactggtttctagttggctttggaagccagtatttaggagattgtttgtggctgttctgctgaaaagctgatctccaggtactagggggacgtctcgctcaggcatatgggtaaccatggcgttctgagaactcgaagctagaaaagtgttcctatttgaagcatcagatgtaaaatcggtggggacacggaaaagtccagcagcacagataactggaaactctaccatggacccgacactggaagcagggagagatggtttagtactaaatgctggttccatcggtagtgcatatgtgttcatatatgaacctggtgttgaaggatatgagctttcagaatgacaatccgggtttctgatatgtaggctattgactttctcttgcagagacagcttcgcttgctttagtgcggtcagtacagtttcacaagtatcaggcttcacatctttcactgaaactaatggatcatctacttcatgaatggtagtggtagtactgccaaagaaaccacctctcgagtttggttgcgttacaggaggcgaccgaatagttgatgaagaatgctcattgatacctttactgctctgtggttgggaatactcacttgtagggctctcagaaatatgttttcctttgtctcgagaagaataagcatcttgttccacagatctggaaccacaactattgcagcacttatcaggtgacgttactgaattatcaggtgaaccatgcgacaaagtttcaaacgattctctaaagtcaacttcattagctatagaccttgtatcacggagtgaagggactactgtagaaccttgaagtggagattgagctttttctccgttactttcatccgtcacatctgaatggtttccaacgtcacataaatcctgaaagattggacaagaagtattgttcaggaattccagtgaattaagcggagactaagttcaacctttgtgaactaagatatcttcatagataatgtcttcagaaacaatatggttatataacagttaatacaaagaagaaaaaaagcatacatttttcataactttttagcacaatggagagaagacagaataaaagaatcaatgtatacgcatgcaaaccaaatatagaaaactgcagcatatgcacaattatcaacgccacataaaagaaactttgttggttgattcatataaacacgaaatataccataatcacaattgatgaaaacaatttctaaaggtcaaagcctgagatatagggcataccagggcagatgatttattctctctgaaatttttctcccattccctttgagtctcttccatttcttcaaaagatccgataacttgagcacggttttctaacgctctctccaagttgatgtccgtactgtttcccttctctaaaccatttgaatttgacaacttgttcaaactatcgtctcccttcacaacagcaacatccaccacggttctagatacttgatcattcttttgaggaagcatttcagtgcgaactccattttcttgaaattcaaccggatttccatctctcttgtaatcctcagatacatttctggaaagttgaaaaatgttggttattctattacacaacatacataagcaagctttacaattgctttactaataaagcgatttatgatgtatataattagagagacgatttctaagcatataaccttcaatctcaaatttctaagcactgtgtttctaggcaatgcttgcacaatttgtaatagtaaaccactcataaatcactgagcagctaaagataacaaaacagaccttgcttcaccacgtctaatttgccgacaagatcttccttgacgatgtctcggtgaggaaaaataagcacactcgaaacctctgtgatgtctcctattccggttttccttgatcttgtcagaagaacctggttccctcctgcgacctttccaggacaaacttttgcctaacactaaaaaacaaacaaatctccgacactgagagttgctcaaatctcattaaacccatgaatcagaaactttcctcctatcacataaaaactctaacctgagttactctgagagtagcattcatgatcagagtttgaatcataatcatcagacacatcattatacccattttcctctaagatcgcaagaacatcagcagttgcctgttcagccttcttcctctgtaaagatacaatcttgagctgttcctctaactcagctacctaaagatattaagacaggacataagactaaagaacatttcactggatcatccctacaaattataaaagaacatactttatcagcgagaccatcaagctttgctctagcactcttggaaacagctctttcagctaataaacgtgcacgaagaaactcaatagtcactgaagtaggatcttgtgcctctgaatcaatacacctataaaaatgtaccaaaacccaaatctaaatttcgattcgcaaaacgatcttattcatctggaaaaaaaaagacagaactataccgatgatgatctaacttgtcttgattcgccatcgtgtagacgaaccaaaagatctacgaacttcgaagatcggtgtgaagaagaagacgtctctctctttgcttacacaagtcaatgaagatagttttttttttaatctttcactaatgtattttactctcttctcattggttgtaagtatttactaatttcgattttatacttttttgtgtagtagacaaagtcatggatttggattgagatttacagaaaaaaaaaagtaaaaaaaaaaaatgtctttttcagaataggagtaaaataatataaatagagcggacgcgaaaaataaaatgaaatagagtttaattggaatctttaggttacagggattattttctctttccttcttcttcttcattgttctctctctctctatctcttcttcttcttcttcttcttcttcttctttggattttgtgagctaataaacagagaggaatcgccataaaaaaacctactttgtctttcaacaccgaaattaaaggaaatctctttttctctattgagcttttttcttcagcggtgaaatctcccttccttgtctctcagtagtgatttttacatacagctccgctctcaggtttcttcctcttttgattctgtttccgctctttttgggtttacttcggattttaatcttcagattgacgaaaccctagtttgattttggtttcagaaacgacgagtcttcattgatttggtttccccaccagctcttcttcttctttttttgttccgagacctttttgacggaggtaggtacggagggaatctggagttgggtttgaaggatactcttatgcgattcttctggataacttgatgccgcaggatcacgcttcgtgggatcggaaagagctcttgaggcaaaggaaacacgataggcctgaacaatcttttgaatccccgccttttcgatggagggattcgccttcttctcaccatgttcctcgagagttttcttctcgtttgggatctggagacttccgcagaccttcttgtaagacctccttttctctctctaatttagggctttgaattctcctgctctgtttttggtagagtctatttttctgtggatttgttagatatccacttttcctttttggttctataattttttttgaattgatttagaggcaaatccttgtttcttagattgagttctcactgtgtcatgatagcttagggtatttttggagcattaacacagctcttaagattgataggaagtgaattgatgaggttactcttcaaaggagcaatttttaatactcaggtagatttagtttcattgcaagaggactttattacctcaattgtgtttgtgttttgtgttcatgaatcttaaaacggataaaaagtcctagcatcgtggagtgttgttagttttagttttacatgttgtagatttagatgaagatagctcctacttttgcaggtttcttacttgtataatttttcctattagtattgaaaccctgtgtgggcgtaatgacacttttttctcctaacttgacttcgtgttataatgattctaagtttgacttccttttggagaatcttatactacatgttttgacagcagtaaaagtctaatttttttggatagatgtcgtttttagtttcacaagttatatatttggttgaatacaggtcttgctttagtttgtgattctcatcttccttttgtcttcaaaattttctgaaggtcatggtaagcagggtggacggcaccagtttgtggaggagactagtcatggatacacatcttctcggtccagtgcccgaatgtttgataattataggccatcagcatcgcgtggagactggagatataccaggaattgcagggatgatagagtttctgtaagccaaaaggaatggaaatgcaatacatgggagatgagcaacggatcttctagaagttttgagaggccatttggtattagaaatggtcggaggtcagttgatgaaaggccgctacatgcttcagatactcattctaccgtggtgaactctttggatccagccaactcggctcattatctggacaatgagatcagtaccccagtacggtctcttaaaattaaaaatgagcataaattttcagatcaaaggttatcacttccttcagatcctcattctgaatgtattagcttgtttgaacggccttcttctgagaacaattatggcaataaggtttgttcaccagcaaagcaatgcaatgatttgatgtatggtcgaaggttagttagtgataattcattagatgctccaatccccaatgcagagctggaggggacttgggaacaacttcgcctgaaagacccgcaagataacaatagtttacatggtatcaatgatatagacggtgataggaaatgtgcaaaggagagttctctgggagcaactgggaaacttccactgtggaatagttctgggagttttgcatctcagagttcaggttttagtcattcaagtagcttgaaaagcttgggggctgttgattccagcgatcggaagattgaggttcttcctaaaattgttactgtgactcaatcttcttcaggagacgctactgcctgtgccacaactactcatctttctgaggagatgagttctagaaagaaacaacgtctcgggtggggtgagggactggcgaaatatgagaaaaagaaagttgatgttaacccaaatgaagatggaacaacattgatggaaaacggtttagaggaactacattcgttaaacaaaaatattgctgataaaagtcccacagcagccattgttccagattatggttcccctacaacaccatcctctgtagcttgcagttcatcaccaggtacaatacaatttgttaatacttctctctgcgtgctcttctcattcctgatctatttggagttatctgcattattttcatattacttgaattcttccatcatgtatctgttcttgtaaacactgattttgtttttctctttttatcatgtcttccatttgtttttgttatcttctgctggggacagtgtaactcactcgtaattttattcttttgtgtacattcagggtttgctgataaatcatctccgaaggctgctatagctgctagtgatgtcagtaacatgtgccgttcgcctagtcccgtgtctagtattcaccttgaacgattcccaatcaatatcgaggagctcgataacatctcaatggagcgttttggctgtttactcaatgagttacttggtactgatgattctggtacaggggattccagttctgtccaattgacatcaatgaacacattacttgcctggaaaggtgaaattttgaaagctgtggagatgactgaatcagaaattgatctccttgaaaacaaacataggacactaaagcttgaaggtagaagacactctcgtgttgttggacccagttcatactgttgtgatggagatgcaaatgtgcccaaggagcaggcttcttgtagtttggatcctaaggcaacagcttcttctgtagctaaaacactggtgagagctcctgtgcatcaggctggtttagccaaggttcctgctgatgtttttgaagatagtcctggggaagttaaacctctatcccaatcttttgccactgttgaaagagaggaagatatactgcccataccatctatgaaggcagctgtttcttcgaaagagattaacacacctgcttttgccaatcaggaaactattgaggtttcttctgctgatgacagcatggcctccaaagaagacttgttctgggctaagttattatctgccaataagaaatatgcttgtgaatcatctggagtattcaatcaattgcttccaagagattttaattcgtctgacaactcaagattccctggcatatgtcaaacgcagtttgattctcatgtccaagaaaaaattgcagatagggtaggcctattgagagctagggagaaaattttactccttcagtttaaagcgtttcagctctcatggaagaaagatttggatcagctagctttagcaaagtaccaatcaaagtctagcaaaaaaacagaactatatccgaatgcaaaaaatggagggtatctgaagcttccccaatctgtacgcctgaggttctcttcttcaggtaaagttctcaaacctcttttctcttctatttactctgatatattaagcttgtcgtggtttgtcgctgtctgggatgaagtttggcttttatgatgtgttagttgtagagacttgaattatgtgatttttcaagggcgtgaggtgttgagagaaacatatacaactcttgagaactattgttacagagctgtacatagtggtcataattcattatttgcaagctaagttcagagtcattccatgctaacgtgtttgttggatgttgataacgctattttaattttatgttagatgttggttttattctagtattatatccactgtaatattcattttaacatctagcttgtttaacgaggaggtatagtttaagcagatgcttatttcttgtctatcttttatgttgtcgtaggtaaatatttgtcttagatgctaactagaaagtatatcaatacgcaggagatgattgcggtgtaaaaatttgggataatgatcacagatgaattgaagccttttttcatcgaatttaaagttaataactgttttacactacctgtgcagctccaagaagggatagtgtagtccccacaacagagctcgtaagttatatggaaaagctacttccgggtacccatctaaagccttttagagacattttgaaaatgcctgctatgattttggatgagaaagagagggtgatgtcgaggtttatttctagcaatggactgattgaagatccatgtgacgttgagaaggaaagaacaatgattaatccttggacctcagaggagaaagaaatctttctgaatttgctagcaatgcatgggaaggatttcaagaagattgcttcatctcttacccaaaagacaactgcggactgtattgattactactacaaaaaccacaagtctgattgttttgggaaaataaagaagcagcgtgcttatggtaaggaagggaagcacacctacatgttggctccacgaaaaaagtggaaacgtgagatgggggctgcctctcttgatattttaggggatgtctccattatagcagcaaacgctggaaaggttgcatcaaccaggccgatctcttccaaaaagatcacccttagaggttgcagcagtgctaattcattgcagcacgatggaaataactctgaagggtgctcctacagttttgatttcccacgtaagagaactgctggtgcagatgttttagctgttggtcctttgtcaccagagcagataaattcttgcttaaggacttctgtgagctctagagagaggtgtatggatcatctgaagtttaatcatgtcgtaaagaaacctcggatatctcatactctacataatgagaacagcaatactctacacaatgagaacagcaacgaagaagatgactcatgttcggaagagagctgtggggaaacaggtcctattcactggacagatgatgagagatctgcctttatacagggtttttcgctttttggcaagaattttgcttcaatatcaaggtacgtcgggacaagatctccagatcagtgtaaggttttcttcagcaaagttcggaaatgtcttgggttggaatctataaagtttggatctggaaatgtaagcacatccgtaagtgttgataatggcaatgagggtggtgggagcgacttggaagatccttgtcctatggagagtaactctggcatagtgaataatggagtttgtgccaagatgggtatgaattctcctacctcaccttttaatatgaatcaggatggtgttaatcaatcaggctctgcaaatgtgaaagccgaccttagtagatcagaagaagagaatgggcagaaatatttgtgtctgaaagatgataataatctcgtgaacaatgcatatgtcaatggcggtttcccgagtctagtttcagaatcttgtagagatttggtagatattaatactgttgagagccagtctcaggctgccggaaaaagcaagagcaatgatctcatgtcaatggaaatcgatgaaggtgtcttaacatctgtcactatatcttccgagccattgtattgtggcctaagtgttctttccaatgttattgtggaaacccctacagaaatctcacgaaagggctcaggagatcaaggtgctacaatgcctaaatttagttcaaagaatcaagatggagtgatgcaagctgcaaacagaaccagaaattctggccttgaacctgaaagtgcaccttcaggtttcaggtaccctgagtgtcttcaccatgttccgattgaggtgtgtacggaaaaccctataggcgtcagtgcaccacgaggaaatccaaattgccatgcagagtccgagtcaggaaattctcttgttggacaagttgacgaaacacatgacttgggttggcccaagaacaatctggaattggatgggaggcttcaggttttaggccatgtaaaccctgagcagattggtctactaaaagcgaccaatacagaatcttgtcaaaatccccagagatcagtcacccaagatctgagcaggataagtagatcaaaatctgatttgatcgtaaaaacccaacgtacaggtgaaggcttctcactcaccaagtgtactagttcagctcctaagcctctggcagtatcccataaagagggcagatctggtcatagcaggagccattcgtttagtttgtctgatactgagagactccacaagaatggagatgtgaaactgtttggtacagtacttactactgatgagaatggaataaaacaaaaacacaatccatgtggaattgtcaggtcatcatcaaccttgagcagggaccatgatacaagacatcattacattaatcagcaacaccttcagaacgttcccattacgagctacggtttttgggatggcaacagaattcaaaccgggctcacatctttgccagagtcggccaagttgcttgcaagttgccctgaagcattttccacgcatctaaagcagcaagttggtaacagcaaagagattctggtggatgttaatggtggaattttgagctttggtaagcataacgaagatagagctgagtcctcaagcgctaaggatgaaggtaacataggaggggtaaatggtgtagcagaggcagccacgtgaatgaaaaagcttcttagggtcatgattagtttgttttggaggattggcatattctttgcttgtcaacctatctgtattatatctcttttaacatcttttttttttaatttagaatgtcaattaatataggcattttttttttttttggttcagctaaagttaggtgcctgcagaaaattcatagctgatgtttgtatttgtaatgttactgataataacagagagatctaagagctaagcttagctctctgtatgtttttcaaaaaggataacacttgatgaacaagcatgtctaatgttgtacagtgaaagacttatgcaacttcacttgcaggaggataaacctttttcttacgtctcacatcttgtttggagaattggtggcagcggtgctacaatttttactacctgcagaatggtaaggacatgaacaattggattgtttagataaggactgagagatctcgtaaagagcctgaccactgaggcttaggtatgatctacgtgagttaccttatgagtgttcagcaggtttggtagctctacttgatgagcatgcagatgatatccacaatccccaggaacagcctgatttggccttctgtaacctctgcaatatattcagtcataatgacgacacatgccataacaggtgatagcatctagttaacagaccaatttactccacatgaaactacgtactagattgcatcgtacaacattggttagctcaaatattgttcaatttccaaggactgttcatctcaaggtatacagaaactataagtatgaagaatgatgatctaattttgtacccatcttcggcaaaggctgcggcatcatctacaagatcgggatcaaagcactttggttggccgcccgctacataaagagggtcccctgcactttgatcagcacgtaagcactcagatccagtaaacatcgtcatctctatcatagaccactgccaaaagaaaacttatgtgtagcaaaaagcttcctagactatgccataagcaactcatgtcctagattgcaactatattgtatatggctcatacaattataactagttgaatcatcaagtgggagtaagatcttttcatccatcaaaacatggtttcatcaatttgtattcaatgttttactaaagttttcctaacaccgccgagcagtttggttgttccattattgcttagttatctgggaaaaaaacatttgtctatcttgtcttacaaagctacgtatccaactttttttattctatactaataatgaaggactataaatgcacaaaccacgcataataccagctcaaaacgtgtgacagacccgaaggaaacagaagtttttacctaccaagggatgtcccatgtatgcaagatgaatccggatttgatgtggtcttccagattgtatctctacctgttttgcataaaaacaagatgattgtggctaactttcgttttggttttactatctcatttactttctgggtaaaccttgtgtgacatatgacatttggaaataagatggaacagaagaaaaccttaacaagcgagcaatttttttccctgtccctctccagaacaaatactttactgaaagcaggtttccctgacaagagcaaaaaacatgcaaaaacaaacaaaaaacgttataacgacaacaaattatatttagtgtgaattaatctgttgctctagctaatggtataagataatataactaaccttccggagaagcaacatataatccttgtgcgaccccaggatatcgaaccactcctataggctgtttgattactaccttcagaatgtaaataaaaaaaggagcattgttcatagatgttatctcagttgcatattaaggtatactgtacttatagtatttgatattaattctcagcacaaataataaaaatggccttgcctcgtcttcttcaactataccatctgctagtgctcgatatatctttgatagttttcttcctgttccacactcttgatccaggttgctgtaagaatgaagagtttaaatccaaaatccaatatgtaatactaaggatcttttcaagaatgagctgggtcaaaaagtaaacaagagatcatgtttgaactcacccggagccgacaagagatgttccctcagcaaaatacgctgcaagtttcgtttttgccagcttggtctttgcacagagaagtatacctgaaataaatgttgaaaacaacatatcttaacagtagagagagatcattatagagatgcttttgcgatacgaactgataagtccagtgaagagtacaacatttataaagcagtggagaatactaacatcatagctggtttaatgaaaaggaaagcaaaacacgtctatagactaacctgaagttcctctacccagtcgatgtacagggacaggatgtggtgattcacgcgatccgatgtaagagtcatttttaccaaaacaccactgcagctgcgtcaacacagtccgttgctggaaaagtcctccgggcaatacttgaagtccagaaggcttgtttaaagcgatctgcattatgtgaaaatccaccaagtatacacacatcactacaagttgagaacaaaatgatagtacaataccaaatttcatttggagctttaaacatcacaacaagattttctatatgttttgttcagagcaggaagttaccaaatcatcatcttcatacaaaacttcaagcgagtatggcgtgtcaggttccttccaaggaagcctactgtaaactaatttcgaaccactcctgagaaacaaaaaaaaatgagacacctttacaaaagctaaacattttataagtgttcaaatcaattgtaggaattgttagctgaacctaagaagtgtgttgggatcttttacaacttcaccgtcaatttgtatctgcaaaacgtcatacacgagaaatgaatttcaaattctatagaatcaagagagaaatgtttgtatgaagaacaaacctgtccgttttggattcgttgaatccacctaggaacgaaagatgattaaagagaatggaaagtaagaacgatattattgtagacgaagagtagaggaagaagaagagtaagaaccctagcaatggagctgaactcttgtatttggtgaagtagaattctgacaccgtcgttaactctgtattcaacaaattccacacatttcaaaaaagaaccaaaacaacaacaaaagatcaaattttttgaatttcttacctgattcagaagaagagatggcatccttgtatgccaaaccatcgttaagctcaggccatggcaagccgatacgttgcggcggcggcgacatcgttaccggttggtcggcctcagttctggtttctcaaatccggtaaataaaaccaaacagaaattgaagtgaaggagactttaataaaccaaaccgggatagaccaatcacatccgagtcaaactcagttattcaaatcttatttataccaactttcaagagtttttttttcttttcctaatttcaagagttattaactttaactcttttagtttttgagtaaaaactaataattacaagatatatttgttattttgttactgctgataatatcactattgattgttttgatagaataatcaagagttacccatttggaaaaactattggttatatttttttaatggaataatgtgtttttcttttgtcaacaaaaaaagagagagttataattgttaaatgtcctggttggatatcactcgaatccaattcttcacatagcctttttactttgttggtgaaaagtttcttaaagcacaagtaaagccacaacttttatgagctttgggacatgaatttccaaaagttaaaacaactgattactttctaaagcatcactaaaaatgattagttacgttaatattgtgaatacttaaggcatacaattgaacgaaccttcctttcttattatagccatgaagatcagttacaatttaagtaactgatcaagcttaacctcactatagataatcaaaagatagtatccaaaacaaaccctgaaaaaaccttttgaccaaacctattcctgagtggctttcttatattcaggcttcagctcataagttccttggttgctccctttgttgttgtatatgcatagatctttcaacaagtctttcaggaattgctgcaccaaatacacttttccataagcaacacaaaccttcatttttggtatttgttttcttatttctccattgaatctctcagtcaaacactaaacaaaaagtctgtaatttccttgtgctcacctctggctggtcagtttcctgaatgagcagcctcagagtccaatttgattgtctttcaaagagattaaacatcacctcctccatctctctacggtcccttcttgttctcttcatttctgatgtcctgttcgtcaattttttcttttcctgataaaaaccaatgacttgtaagaattcaagatccttaagctacagtaatgtgtgtgttacaattgggaaagataaaataccggagccgcggttgggattatcattcctggcattggcctcatatgcattcctctggcattatcaatgacctggtcaagaaaccagaaacatgatcatggaaaaatgcagaggaggtttgtttgaaactccaagtcaccacacaccactttacaacaacctggatctgtctatttttgcccatatacttgtttgttctttcacggcacaatctcccatagctttcaatattttcgttatgaggcctcatatcaaatttgttctttatcttcccttctactgacatctttcctacaaagaacattgttgaagaaaatctgcacaactgtcaaacaaaataaggtacacctggactgtaaatgaacataccaatgctaaattcttcacccaatgatccaaaatcttataaacgtaaatgccattattcaacaattataaccaacgtaacgccatagatgaaccaacagttgtaaaataacttcggagtacaatgtgtggagaagtgtacaacttaccatctgaagactcacagaaaacattcataggaataaaatctttagacatatccaaagtgtaacgcctcggcatgtttccagagtcagctcgagctaattccattacgaactgcaaggcaaaagagttaccatgttttacaccaagaaactcgtagtttaagtgacgagcaagaaagttcatagaaagcaagctcaaatgtagaaagaaaagagaaaagatctctaatttgcagaaatgtttcatacactacccaatcctcaaattacaaggaatttcatgatcaaagtgaggaccacttgatatctccaaactcagaaaacccatttccccaaatccatggaatttcagagaatgtaaaagcaagtttctcaaaggatgaaattttcccgaatggttactagaaaccctaaatagctaaaccacgcaattcctgaggaagattcaatgtaacgagagatacgcatgcagagaggagagaaaatgcgcaggacgaaagcatacttgggtcccttcgtcctcgtgagccagaggatcgacgccgaggatgactttggcgtcaggacggtacggatcgtcaggacggtacggatcgtcaggaaaagaatgagattggagagaactcgcgacgagagatggagctttcatcagcaacatcgatctctctgccaaacccgtttccaacgcttcattctcattcttccttaccttcatttccacctttacatcttccatttctctcagactcatgattgtaacagaggaattcaaagcgcctttatatacttaaccttccaactatggatcgcttaattaatagaccaaatagaatcataaagacgaaagctttatttctagattttgcaatttgtcaatgttagttaaatccacgtactactacaaaaacgtttaatatacaaaagagatcagtctctcatgttcatgggtactcatatgcgtgaccgcttcgttttcctctcagctaactttgtagtcgcatttcgtttcttcgaaacctctttcttttgtgctccactcaattctctagtctttgtctcctcttctttcttcttcttcattgcattatccaacgcatccttcacaaagaactttagcctccatagtgttggttcgtcctgcatacaagcaaaactagctaagaagaagaaaagacatgtctttggaccagaaagccatcaatgaaggtggcgtatagtaagtaagagatttaccagtatgtccatctcaatactaacttcctctgctctaggttgaaagctcgggttagcctgagcaactatacccaacactttctgtagatcatccggtgacagttttaacaatgccaatccaatattacgcttctcctcaattgtgattttcctgatacaatcgttcaccacaactgtaagcaaatgatacattgaccagagaacgctcaaatttaagagtgattaggccaacctgcatctttccacaactttacgcattagcttctccagctcgtcattagcatggcaaatctggacagcaatatatcagtttgttagtcaaaaggttaataatacaaaaggatcactgatatggaaaaaaaaaataacctcattccccaattctctagttgttttgatatgagatgcttcttttgctagcagcgcctcctttgctgcttgcttctcctcttcctctcgtattttctcctgtaatcacttttgttaactttggtgctactaagctccatcaagagaatagtgtgaaagattataacatttttgttacctcttcttgaacctttggaagaaagtgtgcccacttctcctcaaacttttccagtaactttttcgccatagagtaaacatcacttgtttcttcattataattcattgcgttctcaaacactagccgcatatcagcataaatttgcatgacatgtttgtacccggtaccatccttagcctccatttgattttttatcgtgctgaagtccataggcttgtcaataacctacaatcagatcaaacatgttataaagagacccgcttacagaacaaagacaatttcataacattgaatggaaaccgaggaaaacacacacaaaaaatcttaaacgtagtcacatagcaaaacatagtagtgtacttttaagacttcccccacaaaaatctgatgcttctaataggcaaaagctatttggtcagatgatcatactcaaagaatataccagtaaagaaaggtgaaattctggtagctgtaataggcaaatgaagtttaatcaactttaaagttcgattaaatgttctaccaaagtaagaatcaaaaaggaaattggtagctctaaggctctaataagcaaaaggcatttactcagctgatatttctatgttttaccaaaagaagatatcaacaaggaaagttgaaagctgagatgaaaaacgttacctcaaagtagtcatgcaaaccaagaccttcaacattgacaggatgcataaacggccaagcgcacttatgctgagttatctgagaaaatcaatacaaacaaaattaatgatccaagttctccctggagacaacaattcaggtgaagagatgattcttctacctgacgaaagattgttccaaattgacgcataaggtcctgcattcttttagcagcaacagcttctctacgcgcagcctcttgttgaatcttcctaatccccacaacatgtctccctttttctgtatctttaccaatagagccagagtttgagacaccaatgctcgagtaaaactcctccacttctttcagtttatgctcaagctgcacatagaaccaacaaccatccattgaatcaactatgtaacatcaaaaaatcaattcaaagccaatcttcaaaccaattcataacgatgtaacacgaaaatacccaaattcagtacacgatagacaacattattgagcgaaaaaccctaaagataataaatattgagattatgtatctagtaagtaacaggaataaaagctataaaggagaagactttattaccgaatcaacccactgtaaaacctcgtcgacacgctgcttgatgcactcggcgtcgacagagaaaccctgtaaacctccgccggcgacatgacctggcactgagtcagccattcacagcttctcagaaaaaaaaatccctcaagaaaaggaaaaaaatctgcgaaagactggaatgagtttgtttggtgatgatggacaaaggaagaagactgaaagagccgtgtggtggagatggtggactacctgtcgtttttaagatgcaaaacgacatatacttccaaacgctatatacaagtcgaagagaaaattaaatgacaataacaaaagatatattttttgacaaataatcaccctgaattcaaataaatagtttgtatttttaatcaaaaaataaataaataatgttaccacaccataaacttcttaaaaccacatcatatatgcagcaagccagcaaatatagatatatcttttgacaaatattcaccttgaattcaaataaataatctgtatttttaattataaataacataaaaatgtaacaacaccgtaaacttcttaacaccacattatatatgcaacaacttttgataacatgcgtttttaccaaattttgtttattcgtgaatagcatattgttatttattttattattattaattattagttatagtaggcatgttaaaaagtcttgaatggtgacataattattagaccactgttaaattgtttagtccgcacgattcatacacggtcttaacttaatttcgatttcaaaatttgaatttcacagtgaactaatataatctcagtcccttgacgagaattgtacatggatactggaacaccgagttgctaacgatgttgtatctgttagagctttccatcgccatctttgtgattcgctaacatctcgtagagcttatcgtacgagaaacaagatgttcaaacttgttttaaattaatcagcggtttgacacaagcggttcttgtgtaggtggctagaatcatctatgatccaagcatcataagccatatctacatttccgggcctaaagattgaagatgctgtatctgatggatcattggcttgctcggtgatctcctttacttttttgctttattttgttttgaattcgtttactttgttgaatcttccaagagtctgccttaaacttgtgaagtacttcatgaatttaactggtttatatcattggatttgttttgtttgagcttttttttttaaactttgaaattagaaccttgaagtatttgatgaatctagttcatttgatcagtgtcagaatttggttttaaaaaagtcacatcaaaataattggggttgattggctctttcccctcatcaatacttgcttcttttttatacccaaaacaaacaaacaaaaaattgttaaaaggcttctttctgtttttttcttttactatttgacttttactttcgtcaaaaaaattaaaactttggcaaaaaaagaaaggggcattccgagaattgaactcgggacctctcgcaccctaagcgagaatcataccactagaccaaatgcccttttgttcaattgtttggttgacatagtatatttatcttcgacatattttgggacataacctaaactaaagtatgtttaagaatgttcttagaaccaactaagtaacaaaagaaaaatccccacaaatttcccacagaattcttaagaatagaaacataaatggcaatggtggtggacctgatgggtcaagagccatggaggagctggtggaccacatgtctatcttattggatgaaaaacgacaaatctttgtacaaagagcgttttgagaattgaaccccggcctctctcattcagaaaattaatacaaatgcaaaacatataatttgtttatcaactgcttatagatttcccaaaaagaaagtagaaggttcaacaatttcatgttactagctaccataaacattaaaactggaaattaaactagaaaaaaatgttcatttcatggatatgaattgcttctgtagcctaactgggtttagatatgtttctagttagtcctccaattaaacagatcaattcgattaaattttagaaactcaaaacagatgtctgtcacatcatccatcacaagaacttaaaaaaaaaaaacacatttctcatatgtcaatttaattagttttttttttccaaccaaattggttcatgtacttgattatgtatacactatacacactcatataaatggataaggtagttttatagtccaaccaccgacaaaacgtgcattccacttcttcttcttcaattgccatgccgtcgtcaatatctcaaacttgactaatataaaccaaagaagaagaagtatataacagaaccaaaaaatataaaaattcatgttcgttgtattaccaaatttaatttacacttaaataaacctaccaaccaatcactcaaaacaaataccagttcgttacacaatggacacttgaagttgaaagcaaccgaacaacaaaagttttaaaaactaataaaaatttaggtgaatataataataaggccaactatgaagaaaaggtctattttatactttttatataaccttttgtcacgggcactgtttcattcccttggaccccttcttcttcaagatctgtttcttccttctttctctctaaccagattttgttgtaccagagagagagagagagagatcccttaataattcttacacatttatctttcttgtctgaatcctaacaaagactttagttttggtcgatcttataattttctttttttattctatggatttctcttccgggtttcaataattgtcacttccgtagtgtaagtacgcgtgtattgtatactagtcagttacacaagtgtccttatgtgtttccttgtctttaattcatttctgaaactgaatttattcttctctcagattctgcaaaggttttggttttttctccgagtttttttgtccttcaaaaaaaactttggttgctctctctctgttcaagaagatccgagcttgattcctaatctgtgagttttatgcattccatttaaagctctgattttgtattcctgtatcaatgtttccccctaatgttatagattttggataaaagattaagtcttgatggatcttatgattaattgtaacaatttatatcatccttgggtcatgaatttacctctgtggttttgcatttgcagatcatttgagaagaagaaactaagaaatgggtaagagttggttttcagctgtgaagaaagcattaagcccagaaccaaaacaaaagaaagagcaggtctttatgctagattattcacattttttggttatctatatccataaagagaaatgcttctatatgtctttgatgtaattgaaaagctgatactgaaaatggtattgtttttgactccattagaagccacataagtccaagaaatggtttggtaaatccaagaagctagatgttactaattctggtgcagcatattctcctcgtactgtcaaagacgcgaaactaaaggagattgaggagcaacagagcagacatgcttactctgtggctattgcaactgctgcagctgcagaggcagccgttgcagctgctcaagctgctgctgaagttgttcgtctctctgcattatcacggttccccgggaaatcaatggaagagatcgccgctatcaagattcagacagcatttagaggatatatggtaacgtttttgttttttaacattttcaagtctagtaactataaaggtggttttgctaactaatggaacaaagttcatactttttggttaccctttattaggcaagaagagcattgcgtgcgttgagaggtcttgtgaggctaaaatctttagtccaggggaaatgtgtgagacgtcaagccacatctacattgcaaagcatgcaaacactagctagagtacaatatcagattcgtgagagaaggctccgattgtctgaggataaacaggctttaacacgacagctccaacaaaaacacaataaagactttgataaggtaagcaaatcaaatccttacaaagatgtttataattttagttacaaacttggctttttgttgatctcggatacatgagaaattcacaatgtgaaatagattatgtttcttgctacaaacttaaagattgtattacgttttgtgaaatagactggagaaaattggaatgatagtacattgtcgcgggagaaagttgaagcaaacatgttgaacaagcaagtagcaacaatgagaagagaaaaagcgcttgcatatgcattcagtcaccaggtattaaactagtttcctatcttactttagtgtgtctttacaccagaagaattatatatctcaaaatggtgaaacttgttaatatgcagaatacatggaaaaactcaactaaaatgggttctcaaacattcatggaccctaacaatccgcattggggttggagttggctagaacgttggatggctgctcgaccaaacgaaaaccactcactcacaccagataatgctgaaaaagactcttctgctaggagtgtagcaagccgtgccatgtctgagatgattccacgaggcaaaaacctttcaccaagaggaaagacaccaaacagtcgaagagggtcaagcccgagagtgaggcaagtcccaagtgaagactcaaacagcattgtgagtttccaatcagaacaaccttgcaatcgtaggcatagcacttgtggatcaattccatcaactagagacgatgaaagcttcaccagtagtttctctcagtcagttccaggctacatggcacctacacaagccgccaaagcaagagctcgattctcaaaccttagtcctctaagctcagagaagacagcgaaaaaacggctttccttctcgggatctcctaagactgtaagacggttttcaggtccaccaaagctggaaagcaatgttactaagaaagatactaatcttgcttaaacagagaatggatatatatatatagtttatatctgacattgttgattaggcaaaagtctggtgcagaggtgaattcagagaagattctgttatgtctttgtttgtttttttggtatttttttttactacaacaaacttaattatttgtttgacttttttaattggttgaacatatttgtattgatgaagagacatatataattttccacatgctatctgagttccttctttaacatatttgctaacgccaaagtaatctaaaacatagaaccagtattgaaacttaatgggggtgttttttaggtcaattaaataataaaggggttaaattagaaataaagagaagtaaaagggcctgtaagccttttagggattctagggctttccttcattggtcagatcagacgacgttttacatcttcttcttcttcctcttcgatattcgtcagtgtgtgtattttggggaaaactttgtgagcaaagagcgagaaaatgagcggagccggtaagaaaatcgcggatgtggctttcaaagcttcaaggactatcgattgggatggtatggctaaggtccttgtcacagatgaggctcgtagagagttctctaaccttcgtcgtgctttcgatgaggttaacacacagctccagaccaaatttagtcaggttctcctctcgatttcccccctctcttgatctgattttgtcactactgcttggtttagactttttagatctttataatttcgatttctggatcaggtgcttctttcacgaatttttacgattatcagatttttgttggtgacactcatttttttctattttgttgatgttgttgttcccattgttgattgatccagatatgtgttaagatctatttccttaagacgtgttaatcagagaacattgtggttggtctttgtttattgatcattagaaatgtggaattgtatcgagaaaaacattgatgtatactatgattagcccactacatttccaattcctaagagatcttttatttcctaacttgttttatgtattgggttgtggagtgattgttgtttttggttatccttttaatccaggaacctgaacctatagattgggattactataggaagggtattggagctggcattgttgacaagtacaaggaagcttatgacagtaagttttattttctctgcaatttatactgatacttgggagcgtttgtgtagccttgcaactcattatcacaatgagtttgtcagtggttatcaagcggatgtcttttgcttgccttacttcggctctcaaacctgactatattgttttgagagagatgtgcttaagaatgggggctgaaactgaagttcttatacttgttatatatctatttgattgttggaattgtggagatatatcaaagaagattatgagaaactaaactgcatcttttatggcttgctgcaggcattgagattccaaagtacgttgacaaagttactcctgaatacaagccaaagtttgatgctttggtgagtaatagctgagacactcgagacttttttacaattttgacaggtcttttcaattgacatcgtttttgttctcttgtgccatgtttcatgctatatctagttggtggaactgaaagaagcagaacagaaatcgctcaaggagtctgaacggttggagaaagaaattgctgatgtccaagagatcagcgtaagtagccagaaaaaacaaatcctcttctatgaagtttgtgtgtattttttttcaactcaagattctgataaaatgatcatggttgtttctatgtgttggtgtaatcagaaaaagctcagcaccatgactgcagatgagtactttgagaagcacccggaactcaaaaagaagtttgatgacgaaatccgtaatgacaactggggatactgatcatgtttctccatctccggcttggaaagaaaactctctttctctttctctgttctcttactgtgattttgtgagccaatcataacaataataagtacaccattcacttaagcagtgttgagatcttcattccaaggaagataaacgcatttggttttagttatcaatttcacaaattgtttcgtttcgttcttcagtgaataataagagtcaaaaaaattatcattgtcaaggaatgaagaagactcttgactcgtcattgttacatttcctctcttagctaacaggatagtattaatgtcatgtttttagttgatttttttgagttagcaattcggtgcaatggtaaataaagacgaacccaaaccaactctggtaagcaaatttggttgataagtctgtcggtttgttgttaagccttcggtttacctcgaaccgggttttagaatttttgtcgacccagaaacacatatcccagatttcgttcttcaagacacaatgctaatttctgcaattacactcaagtggtgagcttattacttgatggagccttgcgcaaccatagatagttcacgaaatggtatgcggttaatggttatcaaaggtgggtgaggtctttgattctgaccgttcatagagggttaatataatcgattgctatttttgatttttgccgttaagtctctctgtaaggtccagtgcatgttactgcttgtctaattacacgaaacaaatactggttagctatgtgcttagagcagaatgcttaataacaagtagaaagacaaatctttattggtctaaaagaatcaagatccacgtgctctcctcctaccctcttctttgtaccgaaagtcaggttttggccttttgctaattattgtatcaaataagatagggagataagaccaatttcctcttttaaagttaaaacctgtatctgtaaaatgcatgagccagatattagcctcgtagatcatgctatcatgtctatcacgtgtccaaggtcaaagggtttagcatgtcaatcaatccaattttggagggtatattacagtatattcgtctaaccctactctataaataggtgatgtgtgtgtccaagctccaaacaaaacaacacaacaaggagcttctcaaaacctcaacacaaggtaacttttaacccttttaatgagtctagttcactcaattaatggttcaacaaaaaacaattcttttgaccattgattctgaaacgtacagaaacaatatggaaatgggaacctcatcatcatcatcaggcttggtcaaggccaaatctgagacactcgcagaagctcttaagtccagttcacttgatttcagcaacggtgatggcagcagccacgggagcaagcagcatgtgagggctaggacattatcatcgccgagctacagtagcaacagcaaaaacagatggaacactcacataaggaaggccaagagtgctcatcctgctcttgaccttgctggtctcactggtggtgctgctcttagccgagcctctagtgcttctcttggactatccttctctttcactggattcaccgtgccacacgaagagataattgcttcagagcgctgtagcaatgacgatatttgtaagaaaaccattagataccgcacatgattgaagccttgatgttaactttggactttattgggttcttcttctggtatcattcatattgcagtggaagatattgaagcagcaaccagtagcgtggtcaagtttcaggcagaaccaacctttccgatatatctgaaggtaacccatttccgctgatagataatcttatgggaaacatgggaaaatgatctttatatctatttgagcgcaggcactgtctgatggagatatgtaattaaaccatcaacaccaaaaagtccgtagaaatatataaaattttgctgccattggtcagtccaaacttcaatgggtctgttgtatctcatatgatgtttcctaaacaagaaatcgctatttctcccatagtgaagaaacatccataaattttacaagtagaataatcttcatcattgcattaagacatttggaaacctctgttttgccttctttgttggtctaactttggtgcccaaaagtcaagcttaggaggctcaactaccatttacttgttatcggcaacatgtgaagcagagcttcacgctggaccaaaagggtatggttatattagtatcgccttgtataaatcagagagaaattctagtcatatttctatggaaaaagactggttttcatgaaaattcaagcatataggaacttttacttgcaattctttctgaccaaatcaattcttatcatgtgttgtgcagttcatagatatcacatacaaggtgacaaccaaaggaatgacatcttcatcagaaaagagcatcttgaatgggattagtggttcagcatatccaggggagcttctagctctcatgggaccttctggaagtggcaaaactacactacttaatgcgcttggtggcagatttaatcagcagaacattggtgggtcggttagctataatgataagccatattctaagcacttaaaaaccaggtaataagaagattccaccttggtctgttgatgaatatgtagatgtatatataagtttacagttgacacgggaaagcaacatggcaggatcggatttgtgactcaagatgatgttctgtttcctcacttaactgtaaaagagacactgacctacacagctctgttacgtcttcctaaaactctcacagagcaggagaaagaacaaagagctgctagtgtgatacaagagcttggattggaacggtacattatcatctattatactaccgtctaacaacttaggaacttcctctgatggtcaatctaagtcttaagaaggaacctaattagaagattgtgataattgttgttttaggtgccaagacacaatgattggagggtcatttgtgcgcggtgtctcaggtggggagaggaaaagggtttgtattgggaatgaaatcatgactaatccttcacttcttctccttgatgaacccacctctagtttggactctactaccgctcttaagattgttcagatgctacattgtatagcaaaggtaagaactccactctttacagctccaaatcatgtttctttatggatttgaccatatctaaatttttacttgttggcatgcaggcgggtaaaacaattgtaacaacaatccaccaaccgtctagtaggctctttcacagatttgacaagctggttgtactcagcagaggaagcttgctttactttgggaaagcatcagaagcaatgtcttatttctcttccataggatgttctcctctactcgccatgaacccagcagagttcttgctggacttagttaatggaaacatgaacgatatctccgtaccttcagctcttaaagagaaaatgaagatgtgaaattcttgcagcgagataggatcttccaagccagctcctacagttgtatatgaggtgagaaaaagatctcctttacatatcaagaattcgtttagagctttatgtaagaaatgttaaatgtgatgttgaaacacagtatcttgaggaagcttacaagacacagattgcagttatggaaaagatgaaacttatggctccagttcctcttgatgaagaagttaaactgatgataacttgccccaaacgtgaatggggattaagctggtgggaacagtattgtttactttccttaagaggaattaaagaacggagacatgactatttcagctggttaagagtcactcaagttctatccactgctatcatcttaggtttactctggtggcaatcagacataacatcccaaaggcctacaagatcaggtagaaacatgtttatggtctagaaactagctgtaattggttgtctgccttaaaagttggaactctctctgcatctcaggtagggctactcttctttattgctgtattctggggtttctttccggtattcacagcgatcttcacatttcctcaggagagagcaatgctgagcaaggaacgagagtcaaatatgtatagattaagtgcatattttgtggctagaaccacaagtgacctgccacttgacttgatattacctgtgcttttcctagttgttgtatatttcatggctggattgagattaagagctgaatcttttttcctaagtgtgctcacggtctttttatgcatcgttgcagctcaggtacgtacataaaaacaaaggacatgttgaacagaaaatgctaacaagtaacaactaatgatgatgatgttgttttagggacttggattagcaataggggcgagcttaatggacctgaagaaggccacaactttagcatcggtaaccgtaatgactttcatgctcgctggtggctatttcgtgaaggtaagaatactcagcttcaaatttcaatattataaacaggtatgggtagtgattgacacactttataaatatggcagaaagttccatttttcattgcttggatacgtttcatgtcattcaactaccacacatacaagctccttgtaaaggtacaatatgaagaaatcatggaaagcgtaaacggggaagaaatagagagtgggcttaaggaagtgagtgctcttgtagccatgattattggctaccgtctcgtagcctacttttctcttcgaaggatgaagctccactcttcaacttgagtttagagacaaaaattgttcatttaccttgtattgattgcttgtctacacatgtatcttacttagtttggaatgtataacaaaataacgtactatgatcaaaatttaggtttccaaatacatgatgctatcaatatggtcttggtttggcatgtatcttacttagtttggaatgtataacaaactttgagaaactgattggtcttgttaaagctaccaagtaatgatggtctaatttcaatccttcgtgctatttcattcctctccatatcataaaggaaaaagcgtgcgtgttgattccgtaagagatttgcctttctcatcaaaaccttaccactgtctctagaggcacccaccaccaaccggtctccatggacgaaattcatctgagaaataggcaaaacaaaagtcttcttgttcgaccactgactcttgtcggcatcttcaaggacacaaacatccacaaagccatcacttgcaagacgcatatattgacaagtagcaacttttccttggtagttcatgtgaatggtgcgtgaccagttctcaaagggtaattcaatcaaattgaactcttcagaacttaagtcaaaactcataaggacacatctatttgcatcagtccgagcactataatacaaaacaccatcaatagtcatccctcgtgagtatggatgaaaaggacgatgaggagtgtggtggcttttagtgtttctccatgaagctccaacaccaagtaccaacacttgatgttctgatctcacaactgtctgttccttggtgacctcccaaaataagctaagcactttgtattcatcatgaaaaggatcatgtccaaaccaattccacacattagtcttagatctcattatgggcaattccacaatctgccttgtgctagggttacaaactttcactcttctcccagttctgtaacacaacaaaccacgagcagcgttcactaagtagcctcccattatcggtatggtcgaatgttggtcaatcacagagacagatgtgtccgagtgatcatgcctcgatgacgatgatgattggagcaacaggtatttgctctgattttccctgtccacaagatacgcgaacaaacaacttggtgatgagggtttaaagaaacggttggtgaagtatcgagaggtgataagggaaagccagagctttgagacgcacttgaatctcatcagagatttcgccggcaatctgattaggatatcgatcaacatttcttcagggatctctggtaagaacaccacggtcttcttctgcttctgcttttcctttttcctcacggcaacacataaagacgagcccatatttgttcgcagaagaatagagaaggagctatagagtacactaaggaaaaaaaaactcgaacatttcgtttcccttaaaaggttgcatctccaacttgttctctctgtttgtatgttgcggctctcacaagctaacgctgctgcatattgtgtaaacccttgctctctctttcctacgcggaaaatgatttccatttgtaattgggcttgttctcagattttggcccaactgaattcaatgggtttagatataggctaaaaaaactgcatgcaggtccaagagagatattgactggaacccaaatatagagatattggtaagtaattaatcaatccaatgttctctatgaattcctcaagaaaaggatcattgtttctaggactcgatgtggaaagcataaaatataagcacttaaccttcagctgagtggccaacagcgttacaaggtaaagagaaagttactaattttagaaacattaagatcataccctgatccaagaaaacattccagttgtttccactttcgagacattacatatccaagaaatagcagggcttgtagtcgatagcatggacagagatcgaatacaagaggccaaagattttcttgacatggtggttgatgaggtaacaaatttttcaacctgtcttttaatcattgatgagcaataagtcacataatttaacgttgtataacagatacaagtgattgaaattccatttaataatttggaatgtaaaaacaaaatgacaaactatacttaggtttccaagtacatgatgctctcagtatcatcccataaagtagccaacaaggaatcagtctgtttaaagctaccaagtaatgatggacttatttggatctttcgagttatctcattaccctccaaatcataactataaaagtgtaggggttgattccacgagagatttgccattctaagccaaaccttaccactgcgacctgtgccacccatcataaagccatagtcgtgggggaaatctgtaggcaaaacaaaagtctccttgtctgaccattgactcttgttgacatcttcaattacccaaacacccacactacaatcagaaaaaacagtaacatagttaaaaacagctatttttcctttgtagttcattagacttggccaaggggatctctggagtttgtcaactttatagggtaattaaatcaaattgaactcttcagaagtcaagtcaaaactcataagcacacacttgtcatcagtccaagctccataatacaaaacaccgttgatggtaatcccttgagaataaggaagatggtgaatgtggcattgagtctttttccatgaagttctagctccaagtaccaacacatgatgttctgatctcactttccactccttgttgtgcctccaaatgaaactaagcactttgtattcgtcatgaacaggatcgtgtcctaaatagtaccatatcttgtaattttctcctcctttaggtgttagaataatcggcaagtccacaagctgccttgtgttaaggttacaaatttgcactcttgacccaattgtgaaacacaccaagccacgacaagcgttcaagaagtagcctcccattatcggcatggttagatcttggtcgattacagagacagagtgatcatcatgactcaatgatgtagtaagcaacgcataattgctctgttttgccctaaccactaaataagcaaacaaacttcgacgtgatgagcaagatttaaagaaacggttggtcaagtatcgagatttgatcgtggaaaaccagatctttgagacgcacttaaatctcatcagaggttcaccggtaatctgctcagaatctcggtcaacaattcctcacagagttcgggtacgaccactattctctccttcttttgctttttcctcacggcaagacctaaagacgataggtaacctaggttaatgcatcttgttttcattttcccttgcctcaaattttttacgacgggggcacatgaagacgacaccatagttgtttcacagatttgtatctccaaagcctatgtcaatcgatcgatcttattgtatacagttgcatggttacctgtcaaagacaaaaaaaaacgaaatttaacattactaaagaatgagattacttgatgattcaaagtgtttaggataatattatatgccctagtttcctattaacaagaaaaaggagaaacaattcaagaatagaatcctaaattgcttaggtttggctctgtttaaaaaacatgcaaacaatctgaattgatgctacacggcccaaaagaactgtaatgggccattgtactacttgtgttataattcatgaatttcacattctttctttttcttttctatttagaaatctatttattctttaagcttgttattatagttctgttaatacagttcaaattatcaactttcaatagtgtccacatattcccaagggtattcaattaattagtaatatgttcaaagaaagtccccaaaagttttaagactccgttatcaagacctaaatatatacattatctttaaagaagcttaaagttccaaacttggtctattaaaagaaaaagttatggcaatattttgactttgggaggagaaactgaaaagaccaatcttttcttctattgtagatactctgaactaacagaaacgaacaatagagaaacaaatattctttcctctttttaatgcttaaaagatcctgaccgttgatttttggctttatgggtggatggggcggcattaactacgtggtccttgaactatcgctatacgtccaacacgcggaatagtgtgtgtgagtgttattctccttctccttcttcttcttcttcttctccagaaaaaacaaaacttttttcttttctctctcaacttgcagaagaagcgatttacacaaggttttgtgattcttctcacttatatataatcttctgtatgcttggaattggtatcaaaatcgattcttttaatctgtcattgaaggaactgggtttatacatttatctctcaagtcatagaatctgcatttgtcccaagttaagaagagaatcttgtactgctccttatctatgttttgctctctttaccaattgtttcaatgttatgaacaaaacccatatctctaaatagcaacaatagtgatttcatttaataatggattttgcctctgtacctatttatatagtaaccatggagcggctgatttctcatcctcctctcatgatcgtctcagaccttgatcacaccatggtaggatctgattcttttaactccctctctgtttgcattttcatagtttattgatgttgtgattcgtgttttaacaggttgatcatcaagatcatgagaacctctctcttctcaggttcaattcattgtgggaatacgcttatcgccgtgactctcttcttgtcttctctacagcaagatcacctgttctttataaagaattgagaaaagagaaacctttgttgactcctgatatcattattacatcaataggaactgagatagcatttggtaactccatggttcctgatcatgcttgggttgaatccttgaacagctgtaaatggaaccgggaaatagtcttggaagaaactagcaagttccctgagttaactcttcagccaaaaactgagcagaggctacacaaggtcagcttttacattgatgaaggtaaaggtgaggcattgaccaaggaactatcacaattgctggagaaacgtggcgttaagtgtttacttgttatctttttgtgggtcttttgtttcttgaagccaaattgtttgtgatgttggtaatgttcttttatcttttcagttggatgtcaagataatttacagttggggaaagaatgtcgatgttataccgcgtggtgcaggaaaaggagaagcgcttgagtatcttctcaagaagctgcaggctgaaggaatattcccggtcaatactcttgcttgtggtgactctgaacatgatgctgaactatttagcattcctgatgttcacggtgttatggtaacaatgttccatcatcacactctcgccattcttaccgaaggaagctgactagtttgtctatgtgttttgtgaaggtgagcaattcccaagaagagctattgaagtggcgttctgaaaatgcgttgaacaaccttaaggttatacattcaaccgagaggtgtgctgatgggattattcaagccatcggacattttaatcttggtcccgatctatctccaagagatgtttcggaattcttggatcgtaagatggacaatgtgaatcctggtcacgaggttgtgagattctacttgttctacgagagattgagacgcggtgagatcaagaactatgagacatacatagccagcttcaaagattcatgtgtgagtaacttagatgctaatagctagaatccatctttatgtctccactggactaattcctctttcttggaacattttcagctccatgctgctgtcctttttcatccatcaggtgcagaaaaatctctgagagacaccattgatgagctgaagaagtgttatggtgacaaaagagggaagaagttttgggtttgggtagatcaggttctggtaacagacaccattcctggcaaatggatagtgaagtttgataagtgggagcaatgcggtaaacacaacaccaatatttgcaatatgatctttcataactaatatgagcaagtcctaagattttaaatataacatttgatcgtttgtttcgtttggcagaggatgaaagccaatgctgcaaaacgactgtcgaatttacttcaaaggtatgatcagattcttgaagatgagctccattaagtagcttagattgaatgagactgaattaaaatctgcagggaggagatttggtgtgggagaaggtgaagcagatatggtcagaggaatcaaaggtgaaagatgataacagttcttggattctctgaatatattttggagactgttcttctctttctcatgagtgaattggtatatgaacattcttcacgatttttcttcccttcctcatataggcattataaagttttgaacttcttttgataattattatcaaagaatagtataacttaagatttggcagaggtttatggaaaaaaatttaaaaaaaatgagggcccaaccgggttcgaaccggtgacctcttgatctgcagtcaaatgctctaccactgagctatggaccctttgttgtacatcatatctatattaagctatctaaatctacattaagatttctacatatagtagcttatttctttgttattgctttagaaatttggtaacaagatttatattagtagacctcttatatttgtctctaaacaataagaacaaaatgagaaaatctagttatacattatcaggccagaactccctgcggaaggctcgttcaaattcgttttccgccaatcgtttttcgtgctcgatcatcttcactaatttcttagaaagtttcttgctcttctttgatacttcttcaaaagctgtatcctgaggctgtgccggttttctcttggctggtttttcagctcctagtccttgtttgttatgttttggttctgcttgtagaggcaccaatataccttgttcagtgattcctagaccagttccttccttccagccatgcttctttaggagctgaaaaccaatgttagaagaactgatagcagtcgatggattgcttgattcagaagaatccccaataacattggacactttttcactgtagtgagaaattgtagcctgggacttttctgttttcttcctcctttgtataaccagtccctgtttggtgattcccatatcagtactttccttccaaccttgcctctctcggagctgaacaacggacgtttctctccgagtacaagccagatattctgttccttgcatcgtaagaaaggaacttcttccgtttagggtttgtgtttcttctgatgatccattctccttatatagaattattatgatttcctaacacatgaggacacaattattaatgggcttatatgccccgtacccacaaaagaaacaaaaattgtttgctaatccagttatgaactaatcgtgtttataggaactcaaaatttgcagagtcagtggcaatcctttaacttgttgaatctcccgtaacaaatcctaaccaaaaacgtgaaactcaagtaatcgccgaacaaaaccagaccaagaaaccctagaatcgctgatttgatctaattaagtaaaattgccaaaaaccgcttcgactaattagagaaggcctggccctcttactctatccgaaccaccgcctctgctttattttaaccttatctaatgtaaaattcgagtgatgcaactctgtacacgtagaatcgctcattaggtcattaatttgtgactgcaatataccccaaaaccagaacatttagccttagaaaccggttcaactagtcgacagaaagaaaacgtattcaaataataattttgatgtttctaaacttcctaattgaagcaaacaaaaacgacactagtacaacttttctaaactaccaaaccattatacaaatttattcgaattggttataaatgatataccgagcgattccaatcatgttttgggtcatatgtaatttggatgacataaaatggttagaatcttttttgtctggttcatatatttaattttctctggttcatatattttccccaaactgacaagtttcaaaaaagaaaaaaagaaagaaagaaagaatcagaccgaacccaccaccatctgtcagcaaaccggtaatagaggttgttggaaccacatgtcaagaccaatcatatctattatatcttggctttcctcatctctctttatttttatgttatcctatgaaaatcatttcatctttgatatagaaagcacacttcatatccttcactcgttggataaatatgaaattatatcattctatatataagacttggcagttatagacttattgtatatctcattttgtataatagattctggtttaaaatttttggtgtttccgaatataaatcacaaatgtggcaagaaaacagaaaagcaagttgatgatagaaaaaaatataagtaaataatattggtattatcatggaaaatctagcttttgaggatttcccgccttatcaaaatttaaaggaaaaaaaaaacaaaataaaataaaataaagaaagacctaactttgtatgtttaaatattatattgtttggaaaatattttaaaagaaaattatcactttgaaagttttttactttttaaaggaatttttgtcttttgaccaagagaataagaaaactaagtttgaaagatatacaaatttcacaatttgcgaatgcaaatcattcccaaattgacatatattgtatggtattgacacacccacaaatacttgaaaattatctgatattggatgtttttcaattatatattaataaaaataatatttgtatatagtaaataatagactatcatttataacaacaaaaattttataaactaatatagagtgctatataattttgtttaatccgaatctaattcaataaaaagactcaaaatttataaacataatttagaacatagtaaaaaaaagtgagagagaaaacaaaaaaaattgagagaggaagttcaaattgttcttgtatttagacaaaaacaaaaaaaaaaaaaaaaggaagaggtgactaataatgaatgatgcttttacacttataaaaaggtcatgacgcatcgattaaataaataaaatgttgtttgtttgttgaccaaataagaaaagcaaaattacttaaaattgatttttttaaaaaaggcagtgtatataaaaacctttgtcgttctcaaatcctctctgtaattctggtttttcttgcaatgcttcttccatttctctcctcctctctcctcctccgtctctcttctccgatcatgtcccctgatcccaaatccaataccttcttcttctctttttccagttgattaccggagaatttcagatcgcgatctccgatttattaataattacagaaaaaaataattaaaccctagagagagagagagatatatatatacatggagagttcattaggtttcatggcggttttcgccgtctcaggaagcgttgtgttcttagcgagtcaatttcacaagcgtcttctctccgattacatggacaagttcgaattcgaaatccgtacgaacaaaatccctctccgcattttctcgatttcattctcttaaaatttttaaaattgattatggagttttgttgtttttgtgtggcaggagcgcagaaaaaaatggtgatgaagaagaaggtgagattcgcggcggatgtggtggagccgtcggggaataacaaagagtatcgccggagacattcttccaaggctaaatcgaattcgaagatggcggcaactatttgactttaaggttttttgtacaaaatttaatgtgtaatttattcatttgggtttttgtgatttgaaattcgtaaatttaatttcggaatctgaatctgggctaaacttttcaagtcttccccagggtcaattattttccttcttcttttttttcttgagggtttatttttgttgttgtgacctgtaaataaatgtgttgtttgtgtatatacaaaatgtgattgctaattaccttttatattttggttcttgtgatttttgttttcgtttaaagcattgtgttgttgtgattcagattaagccttaattaagggttttacatacagatgtaatatgttgcgctggctcttcttagttacaattatcatagttaattatttatagttatgattgtgtctggtgattaacaggctgacgtaataactaattattaagacgattaattaaatttacattgattattagtcatcatttttttatgataccgaatcatctattcatttctcgttattaaattaaaacctgcatgaaaaaaaaaagttaataattgaaccattacgttttggtttggtgttttggtacatgcatttgtttggtcaaagaataaaaacttgtttaagaaaaagaagagactcgggagtcgagacagataaaccaaacacaaagatgtaccttttaaaatcagttaactacaaatcacggttaaatacttttaagttatctttgcatcaacgtacgtatgaaagcattaatatttcaaaaagtcaagtgtgtactaataatatgttttctgaagcaaagtgacagcagaatcctaaagacttattaaacattcaagatttgataaagatttgggatggaacaaagtcagtaaaatgctatactaaaataccaatttgttagaaacgtggtattttaaattaatcaaaaggtttatcgtgaacaaaccccgaagggtcataggccaaattaaaatgtggcttacgagagtatggaattggccatttgatttttaaaatatattaatcttctgacgagtacaacgtgacgacatgcatacttttatccaaccatatattcttaattcttataaaatagtactagatactagtatttgcatcatcctgtaaaagaagagttagtgagcatgacgacatacacagagggtaaaatgggactaatcgaatagaaggttcttcttattctcgttaagcatgtgctgtgccaagtttttgtttttggctacgaagtcatgtttttgcaaggcatatatagtgggccggtgatcggtagttaaattcacttacggcccagtttgttggaaaccatttctattgtcggagattttctacaagttcctttcttctgtatttctctcgttaacattcttaactctttttttcctaaataacaccataatagagtgatggccgatgggtgtattttgaatgggatttccaagtacttgttcatctcctctacgattagacacaagattacagaatggacaacccatagttgttgatatacattggtgggagttgcgctttgaagggtttcgtcattatcatacttgtagaatttgaacactatagaatttgtaacactatagcggatgctctagctaggaataatttttgaacactgagggtgattattatgcttgttgtattaatgactataccaaattggttcatctcaaatctctcaatcgtgattgtgtaacttttttcatcttaataaatttcaagtttgagtaaaaagacatcaccacaagtagaatttaagcgctctccattttagacagttacatcacttttttcttttctttgcaaacaaatgcattccttccttcttgtagcatatcatcgttttaccaaaaaccgttttttcatccatgactaaaattagttttgtctatatttttgttaaaagaaaacatgtatgtttctacatatatattagttatatatttttctattacattataaacaatatgtagtcaaagttcgttaatttatttaatactctctagtctctattatcaatgcgcatgcatgccagcatagagtagatattttaacaacataacttcgatattagatatatataagtctaacgatacatatcgttacatatgccatatagtttttaattttttttatatagtttttaatttatgtctagttttttttccaccatttatgtctaggttaaatagaggaaatgtatagtgtattccgatccagtgaataacattagttttcagattgtcttgtgtcttattacgtgcatgtgcccagatcatagaccagttagctgtctgaaatataaatgtctgttgttccattaaatgccatgatccataaaatatcacgcatcaaattcatacaaaccgtgtattctatattttcgaataattttaaaggtatgaagcaatcatatggttgtcccaataaagacaaataaaagtgatttattgagaactcgcatcgcatctaatactgaattgtaagatcttccgtatcaaaaattgacccaaatagttcgcatctaacagagaagtttccgaagcagtttcttctttaactattgcttttagtccatttttctttttcctataaagaaaagcctcgacaaagggctgcttttttcactccattattttaataaacaagtaaacagacttttttttttcatctatcacattccttttactgctttacataattagatgccaaattttactggacgaacttaactatcacaaatgttgaatcagtgatccaattgttgtgtatctgtatatccaagactgtaggctaggccatataatctggcaatctattatatatacgatttaaatcaaagcttttatattataaacataaaacttctcactcactaggccagccattagatcaaaattatataatttacagatgtacatgttagaacaaaatgaattttcaggaaacctactattgtgtataaattcgaagttaatgagttcgaagtagattttgtcacgggtttcttggcaaagtttttaatcaagaaacaattatttaaaactttgaaaagtatctggtcgtcaagagtaaattcgtgatcagtgtataaactgctgtttggaggcacgtttattttcttctaaaattatattttgccggcttactttatttttgacttgtatagatgcttgaaaacaaaggtatatgtgtttgaaggcgatgaagaacctaacggtaagcgaaacgtcgtcgtttcttgttctacagcatgtaagggaagcgatgtgtactctaattaaggcttagcgtaaacggtaaacactaattgacatattcccatgagaaccttagccacttttttattttcacgttgttgtaagaatataacaaattgaaaactatatgctgtaatttgtatgttgcatatttcgtattatactaatccctataacaaacatctttgcatacaatcctagttttttcttcagctatgacaatttatattagtccctagaaatcgatatataatcttgcaaaggtataacttcgattcttttcgtataaaaatttgaacaatttgcgtttacgctatatattaattaataaaaaattgttttacaaattctaaacgcaatgttttttgttgttgttgtttgcgtatgaaatagaaacaacttttgactaaaacagtaaagttacacgattagatctagattgtatgatttgccaaactgaacatctggctatctgagttattacatattagaaggatcaccggcgaggattctatgattcaacaaacacaacgttaaaccaatgatttcttataaagaaaataattctctctttagaatatttctgagaaggggttgttgttttttaagtgtcgcttactcgcttcaaactaaagggaataaggatagtaaatagctcatccaggcggctatcacaatcatattaaactataggttacttaaataaatatatcattgaaatttttaattagattttcatgctaattccttagaagttttctttttctttttttttgttaaaactaatttcttcgaagttttgacggtcacgccgacactttgttttgacatgcccgtctaactctttttttgtttgtctttctttaatactactaatatacaatttgtatgacacttaataatgttagtgtttaaaaataattatagttctacataccccaatacaggacaataataagtacatctcttttatttcttatgcgatttcatttatgtctactacgaaccaactagaatttgcatccatcacgatgaccaattgacaaaaacaattgcttaacatttaggttttacggaaattatcattccttaagaattttgtttattttattacagatagaaaaagacgaaaacggaaagattttgacttgaaggcaacgtgaaatttgtgcatttgagtaaccgacacacatgaagctcaaacacaaagacagagctgagctgttgttaattccctgaaaagctcaactcttggcttcatgttttatcgacgtcaccatacatttatttcccttatagacccacttctcctccccaaaataaatactataattagagaaagcattaaacccacccacccaaaaccattaaatcattaagaagaaaatgtttattaataataagaaaaatgaaattatacacaactaaaaaaaaacaaaaggaagaagaaacatcacaatcaccaatcacctcactatatcaaattctttccttattcactaaccaaaaaataaataaactcaaaaccattcttcatttcgccgacactttcttctccaccaccaccatggatgatctctccaagcttctcttcttcctcctcctcactatctccattaccaccgcattacccgataaacccgggtcgggtcaaataaactcaaactccgtcctcgttgctcttcttgactcacactacacagaactagcagagctcgtcgaaaaagctcttcttctccaaaccttagaagaagctgttggtcaacacaacatcacaatctttgctcctcgtaacgatgccttagaaaaaaatcttgatcctgaattcaaatctttcttactccaaccgaaaaacctcaaatcattacaatctttattaatgtttcacattcttcccaaaagaatcacttctccacaattctcctccgccgtcgttagccaccgtactctctccaacgaccacctccatttcaccaacggaaaagtcaactccgctgaaataaccaaacccgatgatttaactcgtcccgatggaatcatccacggaatcgaacgtcttttaatcccacgttctgttcaagaagatttcaaccgccgtcgtagtctccgttcaatcgctgccgtattaccggaaggagcaccggaggttgatccaagaactcaccgtctcaagaaaaagccagcaccaattcccgccggagctccaccggttcttccggtttacgacgcaatgtcacctggtccgtcactagctccggctccggcaccaggaccgggtgggccacgccaccatttcaacggagaggctcaagttaaagattttatccacacgcttcttcattacggtggctacaatgaaatggcagatattctcgttaatctcacttctttagccaccgagatgggtcggctcgtgtcggaaggttacgttttaaccgttttagcaccaaacgacgaagctatggctaaattgaccacggaccaattgagcgaaccgggagctccagagcaaattatgtattatcacatcataccggaataccaaaccgaagagagtatgtacaattctgtacgccggtttgggaaaatccggtacgattcactccggtttcctcataaagtagaggctcaggaggcagatggttcggttaagttcggtcatggtgatggttcggcttatttgttcgatcctgatatttataccgatggacggatttcggttcaagggattgacggtgttttgttcccggaggaaaaaactccggtcgagaagaaaaccggcgttccagttgtcaagaaagcacctaaaccaagaagaggtaatcaaattttgatcaatctttagtctattaatttttgtccttacctatttgatcgtgacattttaaccccaaattatagaaattaaaaaaatacataccactactacaaaaatacaaaagttttggtatagacaccattacaaagttataaagtcactcgcttagggaattttttatgttctatgattttgtcatattaaatggataactaaatcattgttatagaaagataatggtgattagtccatatacaattagtctttcaacgagagagtactaagtaaacaagtgagatttggaaaaagtacaaacgtgtgagaatggagacaaagtctctctaacaaactttgatataatatataaaatttcaacaatattatacaaaattttggagataattaggatttataactacttaatgatccaccgacgaaagtatcccatgttaaagtgaatgaaaatcacaaagtgttcctttttctttgttttttgttctaaagccaagtatgagtcatataatcatattgtaataaagagagaaaattttctttatttatttctaaatatattatttttgcattagttagaaacaatcattttaatagtccttcgttgttattgttaataaaacaaaaaccaaaccgtttgaaaaaattaataatttgtatgatttatattatattgcaggtaaattgatggaagtagcatgtacaatgctgggatcacaatttccaacatgtcaatgagatcaaattaaatccgggacatgagaattttataattctgtaaacatgtgataaaaatgtgaacagaaaaaagaaataatgtaaatgattatttttttgggctcgttgcaatatgattgttaaattgtaattttcagttgttttgagctgacgtaaccaaaccagattgggtgggtcttttcttttctgttggatgctactgtattggatcgaatctgtccatttagagatcttctaatggactactagattaagcagccctaggtggtaggttatgcattggaaatactgtaaactgtaaaggcaacaatgtccataactctaagaaaataatccatctaattcagaacatcaatatacccaaatccagttttagaaacaaagtaaaaacagtataaaaaaaaagccaaaatgtgatgagaagtcacatgtcatctcgagttgatattccaacaagttgctaacattaaacaacatgggatagcatatttgatattccaattcacaacatgagcatgcccggtccacaactcaagctacccaaacaatggctaagatcatcaaaagagatgagtaaaaatacaaaatattataggtatttgttattaattcattttttgttggtcttttttttaccatatcacatgagttttaagctttaaagttaataaatactaattaagcggattggtaatgaatttttagtaaaattttggttagaaaaaaaaaaacgaaaacaaattttttcttcttctttttgtatgaatataaaactatattcaaaaagacgtttgcacaaaattttaatttcgattgattccattgttatttatttttatgttggcttggattccattggtattaaggtaagtgattttagtgacaaaatggaagaagttgctttgaagaaaaataattgaaaacaaaaaaaaaaaattgactattgtttttattttcttacaaactatttatggatttaaaagttgttttatcaagttttagtatgattttttttatattatattattagtaaatttgcgagaaaaatataaagagcatggtttttttctttacgtaaacgttcaaaattatcagtccggctctaaacatgagatagtagattctaattctcgtcatgagatcgtagattctgattgacaacaagagataggagattcctgtttacagtatgagattgtagatttcattcacaacatgacatcatagatttcaattcacaacatgaagcaaatcattaattattttcaaatgtcataccaatctcgtcttctcgaatgtttggagcttcatgaccaacctttgagtaaagagcattacaaagtcgtaatcgttttaaaaacaagttaaagatttcgtttctttggatgattttatgaatagtataatacaaatttacacaactcaccacataatatcctttgtatgatccaaccaatttcagatggagaaaatatagttgcatgagtatctacaatctaagacacaaagacatagatggatctaagggagactgaactcttgtataatggattcacaatcacaagaaacaaggagagaaacacaaattgaacgttattatttccagcttaatggacttgaagaatgaccatcatgtttgtgcctaatctgattttctccaaattctttagaattctctctttgctaatcctgaccaatatgagaaattcaccatttttttgctcataggtgctatcaataacagtttcaagtttcaacaattcaccatttatataacattaccaacagtccaacactagtaacataatcaccaaaatatattagtaataaattttcatcacagctttatatttttgtgattagaaattaggatcttacagaaatctttcaaaaaaaaattcataacagttccattttttttggtaagattcataaaaaaattcaagttaaatgcattttataaaaatgtaggaaaaactttcatcaaaaatcgttgagaagaacatacagtatatcttatccactctcttcctcatccacgcggcaaaggcacaaacctctttagaaaaatgtcgtcagcttattgttcctccgccgtggctgtatccgccgcagccaccgcttcctccgccgctacctttaatccattactctcctcccactccaattcccaactcttctatcgctttacaccaaaatccttcaaactcgttgccaattgccctaatccactaatcctccactcaaatatccgccgccaccgcttcttctgcgccgccgaaaccgaagctagttccgccgatgatgaaatccaggcatcagtagaagaagaagaagaggtagaagaagaaggagatgaaggtgaagaagaagtagaggaagaaaaacagacgacgcaagcgagtggtgaagaagggaggctttacgttgggaatttaccttacacaatcacttcttctgagctctctcagatttttggagaagctggaactgtcgtcgatgttcaggttcgtctctaatcttcatacgattctatcaatcgatttggagacagtgaagcaaaattaggatgaagattgtctaattgttagcattgttctctgttgtagattgtttatgataaagttactgatagaagcagaggatttggatttgtaacaatgggaagcattgaagaagctaaagaagcgatgcagatgtttaacagctctgtaagttcacatcatttgatcaaagatgattcagcttcagaatgtttctgatctcttgtgtgttgagtttgtagcaaattggtggtagaacggtgaaagtgaacttcccggaggtgccgagaggcggtgagaacgaagtaatgagaaccaaaatccgtgataataaccggagttatgttgatagtcctcataaggtatatgcaggaaaccttggttggaatctaacctcacaaggtttaaaggatgcatttggtgatcaacctggtgtgcttggtgctaaagttatctatgaaagaaatactgggaggtctagggggtttggtttcatctcgttcgagtcagcggaaaatgttcagtctgctttggctacaatgaatggcgtggtaaggcttcttctcccttcttgtttggttgggtggtttgggttttgagactcactagttttggtttttaggaagttgaaggacgagcgctgaggctaaatttggcttcagagagagagaaacccactgtgtctcctccttccgtagaagaaggagaaaccgaggaggccagtctagagagtaacgaggtgctttcgaatgttagtgcatgaagcagcaaaagcacaatagattccggataagtttcagactgatctgctcgaggtgccaaaaatgaaaattttgttgtctttataaatgtgttgttttgttctagtgaggctgaagaagaagacaatatatgagatagaaaacaagagattgtttgtaatttttattgagaatgtttttaatccataaatggtgtaatgtaacaacatatcttgattccagtaaactgcaaatttctgtcacgattaatgctagtcggtctcgtggtgcccggaaagcagagcatctgcagcagaatctaagtcctgagggaagaagaccctgcagaaatattgacaagccatcaagacaacgttttacgttagaacagttcttcatatttctgtcatgaaattatgtgaaaccgaaaaagagaaaacatgcctgcaagtgttgtggtacaaggttgagctaacttgatttagatcgccaagtcctttgtagccagccaccacttcaaggacttgcctggagaagaaaatgattgcctaagaattgttcgaagactgtatatgcttatggatttgacaagattttaatctagaagctacactcacctgactaaacaaggctcattacggcctttgacaagggactcttgatcatacttctcttttttcttggaaggccaagtcgactttacaaacttgattccggcgtgtgtgttcttgatatcacaatatggagagtcggtttcgatcatcattctctctactggtattcctttcattacctcaagattctcagctgttttcaacgagcacccgttcacacctgcagatagaatacacatcagcaaaacaaaagaccagaacagtaattcaagatattctgaccaaatctgatcctacaaacgcctaggcgagttaaagcctacaggcatagtctctaatagaaaaaaagtggaagtctttaccaaggtacattttatcgaaagagagaagctt

SEQ ID NO: 1079 - DNA, 97798 bp, Arabidopsis thaliana
gaattcacaaccaaggatgcaaatacattgtccttaattaaggaccatacatttcacattccgtaacaaacagaagatgataatactaggaattaaaaacacaagggaacaattttgacttaaatgaaaaattataagaagctgttgagaaagagagataaataaaagaacctgttgcggatcggatttggagcggtcattatggacgaatacgatgggacgaggcggctggcggctaagttccggcacatcggcttgagatatgaacggacaaagaaacaagagagtaaaactaagaaagagaccaaaaagtttcatcttcttgtttaaagagtaaaagtttggtgaagaatattggattgttattgaagtgatcggtagatgttttcagatgtgtttacactttatacatctcgttagccatcgcgtcaagtaacttcatttccttctttatttataattcaaaaacatgtcatatatacatttttgtaagctttgcttgcagctttctttatctttctattattaaaggaataaccagctataaggtcaatgcttgaattgttcaatataaggttttcgtaaccttaaagaattggaccctagaaattagaaaaaaaatttgagacgtattacatgaagatattagtatatagtgtcgtccgtgtattagtatatatatctgtatgaaagttgtattcacggtgtcaaactattctgtaacactatactctaattagcagatgattttttgcctgtttgaagaaagtcattacgttgttgcattgaatagaaaatgtactagttacgatataagaaatcaaagttaaatagactgaaagacttctcaagaaacagaaagttgaactgaataagtaactttgaatacaagataagaaaaatgaaacaacgtatagtagttatataacatcgtttaagggtgttttagttatggacttaataatatatcaatgaattaggaaatttaagaaatcgttgaataatacagaatagaaataggacgaaaggggtcaattttttaagttccgacgtcggccaatgagtcattgagcaaggatcatgaccacatacgagtgctatggtaccattcaataaatccttgtcctataagactttactataatgtttttttttttcggttgtttggtcgacttaatttaaaccttgatgtgatggaaatccacgaaatgccacattgccatcccatattgttaatgcacgaattaaacaagtacgggtgagtctcaagggaaggtgaagaatcaatctctaattcacgagctgaactcgaagctggacaatcgacgggctgaagggcttatggcgaactgagaacgtagtcggttgagggcgctacgaggcgatgccgtttcgagctggtggttctggcgagctggctcttcttgctaagttggcttgtcttgacgggatgtcttctctctacgagctgacttgtatcgatgagcggacttgtcctgacgagctgaattgtcttgacgagctgacttgtcttgacgagctgacttgtcttgtcctttctccaggtctcccaaaaaaaatgtcctttcccgagactttctattccttatttatacccgtccgtgtagtagggtacgcaaggtgaattcccgagagtgcccttttctgcgcagccgaactcacatctcgaccaggccgggtttcggcccggcgggccggctcgagttctaaagtgatggtcggggctgggtcgatattccttgaaatgggccggttgatcactgaggcccaattgatgtatcaacacatatctaagattattcaacttcatgtgaatgagcaagcaccttttttctgttttattagacttagacatttttaattgtctccaaaaattgtatacttaacaaaaaattgaagctcgaatttcatcaaatcatgtttatttattggattattttagtatgtaggagttgtcttatcctggttactctaattaacatattaatggtagtggctggtgatcgagaaacaatataaactaattcaagtgcacattattttcacgatattacgctagttatatctgggactgcaaaaaaacaattagatattttcatgtgtttcgtaattaacggagagattatttaaccacaaaaatgatggccatgtgtcaaacaatgaacaagtgataaagacgagaaagagtaaaacaagtaatctgatggaacgtgcgaagatgtagaacatgaaccatgtcatctggccacgttgcttagttaatctggtcctaacgaatatgctttatggatctttcctaattctgaatagaaaatacaaataaatgatttatgagttacgtattttagataagccgtgtacggacgacggactttttcttatggatattgaaatcgaaatagcatatgcttttgacacaataataagaaggatagcgaattatggtgtaacattttggcaaaatataaaatagcgccaattatccaccaagtccactattttcgtccttttcaacatatacactattttaaaaatttatattctaatttgcattttatatttttaaatcagagtctattaacatatagttatatttggcatgagatattgatttaaaagattgaacttgtgcaactcaccagttcaagaaataattaaaaaaaaggagatacatgattcatccctgtttaagttttaattgacttagacgtctgtttatcaattcggcaatatggcttgagataaactaaaatgttagtgttttcaaccaaaaaaaagaaaaaacacaaaaactttaggtcaaccattttaatctcttaaacgcaataaatctaatcgcctgataggtgaggagaaaatgctcaagtgtaatgttcatatcatctgggttggtctatctgagaattcatgggccaattaaattcaccagcccaatacatagataaccaaaagccgaaaaaggaaatgttgttagcgcccaaaagcccaaatgattactttttagaactttagacgaattaaatctttaattgacatttaataataaattacaataactaaatactaattatattagttcaattaaattttagttaatggacacaaaataaaaaatgtaaccggaactctttggtcgaaaacggactcttcaagtgctttggaatagacggacgcaaaatgaatatcatcaagtgcagtttaatttgtaaacaaattctctctacgcaaacaaaaaaatcactggtgaatgtcatttaattatctattcatttatttcccgtaaaagaaagtgcgtaaaggttttcttgttgaaaacatgtgtgtgatgaatgattaataaaccagaaaatgttatgtctggtctgttcttatccttgacgatacagacatacgtggatttcactagacatatatagtcacacagacgactaaaattaattgatccttatttttgcattattttcgaccttttttttctttgttaaatacattcgatctattgaaaagatagttaccatttttctaatgaacttatccgatttgcttcgaaataaccttacttaatttcaatcaaactcgaataaggtgatttactttataagttataaccatacaaattttattagactgatacagttcttaatgacttgattgtcggcatatttcaaccaataatttaacacatttttgcggctttttctttattttcaccaaaaaagtctatattcgggggaggtttcggtaactataaaatctgaattaccaaaacaaaagaatgtacatactgtatatgaatctgagacttttagaatggggcatatagctttccatcatctgtcttgcaattaaacttgtaaactttcaatatgttttacctacttagattacatcacggaccacacaacttgcactgatcagtaagtatctcatttttttcaaagttttattttactcaattaactgttcatatctatatggttttcttaaggtgttgtatatatatatattgtttaaggtgtcgtattttcctttaattctggtatattgattgacaacaatgtaacgtcgccgaaccatattcgtaaatgacatttccgttgtaaggcataaaccataaagatatctaatagtggagttcatcactattacataaaattttgagccaaaaaacaaaaggttacattttatatattacaaaatatagtaaaatgattatagaggtgaaaaaacaaaatagatatacaaattttttaaaaagaaaggttactaaaaataatatacaatataacaaaacaaaacaaaaatcaaaagaaatagatatatgaaaaatcataaaattggtagggcacaaagttttaatatcatccgctcaaaaaaccagagagatagggtcccattataattttcctcattttcatatgcattcaataatctatctatatgtacagtgacataagtgtcagcctttacatctatgtacatatagcttctagattctcattcattccaatcacagagctgataatttcagcagaatatttactattttttataaagaaacaaaaaaacatagaaaggtttggtttttcaaagaacgtgaaaatgagtatgcattttaggaataaagcatggattattctggcaattctgtgtttttcatctttgattcactcaacagaagcagtggtcacttatgatcacaaagctttaatcatcaatggacagagaaggatccttatctccggttctatacactatccaagaagcactcctgaggtaatctctaattattcattaatctttttcttagttacatgcaaacttttttggttatgaacaaattttcttccggattttttgaaatgattgctttgattttctgcacataggtttttggtttctctgtaatctgctaatagtataggctacatcatcaagagtaatacatttgtttgaatataataagttgaaagcaaaaacttgtggatgttctgttctatgcagatgtggcctgatcttataaagaaggccaaagaaggaggtttggatgttatacaaacatatgttttctggaatggacatgaaccttctcctggaaatgtaatttaagaaatttaacaattttcttacttgactcataagtcatttaaatcctttcattcttaatgctctatattttttgtttgctccagtactattttcaggatagatatgatctggttaaattcaccaaactggtgcaccaagctggactatatcttgatctaagaattggtccatatgtttgtgccgagtggaattttgggtaaaaaatacaaaaaacaaaaactgtgtattatataactcttacgaatatataaatttatatttagtttatgatatctcaggggatttccggtttggctcaaatatgttcctggtatggttttcagaacagataacgaacctttcaaggtacacaatgctagaaactaccaacttaagtttttcgttctttgtttaatttttttttaagaattacaaagtgtaacttgatgtgatgattgaaaagattgcaatgcaaaaattcacaaagaagattgtggatatgatgaaagaagaaaagctgtttgagactcaaggaggacccatcattctctcacaggtttgtgtcttatttgcctagttgtttaaaattgatacaaaaattacaataatgtgaatgtataaaaatggacagatagagaatgagtatggaccaatgcaatgggagatgggagcagcaggaaaggcttactcaaaatggacagctgaaatggcattgggactgtccacaggtgtcccatggattatgagcaagcaagaggatgctccttaccctattgtatatttctcttttcctttttctctagcccttgattaggatgtctatttggttttggttaatcttggtttagatagcatcctagctaattaatttattgccaaaaatttgagtatggttggtagagtttctattttcgtttaaattctgcttttttatcaacctatttatattgatatgaaaggttttttaaaatattaattttgcttatcagtttagttttttagttgttgcgaaaggttacatttatgttgggggttagatttatatgcttatccggatagaatcaatacattgttatcagatcaaattttgcttttgtcggcaattagatattctttaagcgaaagaagatatttgtttgttattattttgtcatttatgtattttataatttgaaaatcattacttctttccttggtgggttaacttttgaaactttttggcctttacttgaagtcaaaattctctttttcttgttagctattgttatcggtatgtagttacaatgaaatatcgttttccgatttacttgcttgcaaaggccaaaaatcaaaaagaattcatggagacaatttttcttcacctttttttacctttaaatgtcttacaaaattaatttaccgtggaagtaaaaaatataacagatagacacatgcaatggattttattgtgagggtttcaaaccaaactcagacaataagccgaagttgtggacagagaactggactggttggtaagtcacaaagctattcatttatacagaatcatctttttgttttctttatatatttgtgtgtgatggtttaatagtaatgtgtgtgtgataatataattctcaggttcacggaatttggaggtgcgataccaaatagaccagtcgaagacattgcgttctccgtggctcgtttcatacagaacggtggttcttttatgaattattatatggtaaatttaagaaatttattaaatataaaaatagattaatttacgatttaagagttaattaaataagagaatgctgtcacagtattatggagggaccaactttgatagaacagccggtgttttcatcgccactagctatgactacgatgctcctattgacgaatatggtaattaattccgctcacatgtctattcgatttaattgactattctctaacgtttttgttttctatttatgtgtgaaaaggattactaagagaacccaagtatagtcacttgaaagagttacataaagtcatcaagctatgtgaacctgcattggtctctgttgatcccaccatcacatcgctcggcgataaacaagaagtaaatatgcaaactaatgaaatgttacattgaagataagaaccataaaagatttatacattttttgtttttgttatgttttcagattcatgtgttcaagtccaagacttcttgcgctgcatttctctcgaactacgacacgagttctgcagcaagagttatgtttaggggatttccgtatgatttgcctccttggtctgttagtattttaccagactgcaaaaccgaatattacaacactgcaaaggtaaataaactaatagcttatatccaaaacgttactttgtacatgatcattttttatcatgtgcaacttgtgcattcatatatggctttggttcaaaaattgttcttcatatgtatattcatgggattccttactaatatatatatgaaaacatattttaacctattgaaatagagatttgcatacatctttcaaacagtttattacggtcttgaccttgttgatcttgacttatatatgtgttccttttttttgtgatatagatccgtgcaccaaccatacttatgaagatgattcctacaagcacaaagttttcctgggaatcgtacaacgaaggaagcccttcttcaaatgaagctggtacatttgttaaagatggtctagtggaacaaataagcatgaccagagataaaacagattatttctggtattttacggagtaagtaactttttaaactctttactaatgaaatctcagtatcttgcttgtttactaatcacatttgggtttgttttatgttgaatatgcggttattgatctcagcattacaattggttctgatgagagcttcttgaagactggtgataatcctcttcttaccattttttcggctgggcatgctcttcatgtattcgttaatggcctgcttgcaggtaaaatcatataaacttgaagcccaaactctccttttggaacaaaaaaacgtaataaaaatccattttctttgttttaggaacttcctatggagcactgagcaactcaaagctcacatttagtcaaaatatcaaattgagtgtaggcatcaacaaacttgctctgcttagtactgcagtgggtcttccggttagttatgatcttgcttctgttagaacatctcacaatgaaaataaagatggatctaccataggaaagaccataaagttcgtgatccattattttttggcagaacgctggtgtgcattatgagacttggaatactggtattctagggccagtcacattgaagggagtaaactctggaacatgggacatgtctaaatggaagtggtcttacaaggttctcttgaacatgtgtttgataaaaacaattttaccaaccacaacaatactaaactaaatgtgtttctttttatttgtgatgagtagattggtcttagaggtgaagctatgagccttcacaccttagctggaagttcagctgtgaaatggtggatcaaaggattcgtggtcaagaagcaacccttgacctggtacaaggtaagaaatattctctcattttcttcaaaatagatcttttaagcttaaatttgtgtttcgaaacacaaatgaaatggtttaaaatctatgccaaactatatgatattttcatatacctacctatacgtacaaaattattggttaatgaattttcaaaaatggcaaatgaattaaaaggtttatatatgagatgttgaatgtttttttaatacatgtgtaaaacactttaaacatacattttacattagttaggaatgtagctaacattcttaatctggtttttgtgatgaattataactatggatgttattgaaattatgaacataatataagatatagattcatatcggattcttgttgtctctatttgtagtcttcttttgatacaccgagaggcaacgaaccactggctttggacatgaacacaatggggaaaggtcaagtttgggtaaatggacataacattggacgccactggcctgcctacacggctcgtgggaactgtggacgttgcaactatgctggaatttacaacgagaagaaatgtctcagtcactgtggtgaaccttctcaaagatggtgagaaaaaagaaacaatatccttctcttcttcttatttggtctaaaatctaattcacatgattgatttattaatgttttaggtaccatgtacctcgttcatggctaaaaccgtttgggaaccttctagttatatttgaggaatggggtggtgatccaagtggaatctctcttgttaaaaggacagccaaatgaagcttcttacttcaaattttttccggaagcatgcagagattgtcatgtacagatatagttgcattcattggctcattgtggaagaatattatatatatatgtatcctgctctaaaaatgtattacaattgtataaaataatatttatacaatagaccaaaacaagccaatctcaatcaccccataagaggggttcttcttcaggcttgatcaactaccccttcctgattgctctaacgtaactaataatcattttagcctcccattttgaaaggatgaaccttggattgggttctgcacttgagagtggatgtattgcatcatcccatttgaaccaatcaacataaagctggcaccaagagaatcaatcaaaaggtcacattttaagtgacatattagtagaaaaacggctagacttaaaccacataacgtaccacatatggataaaagttagcatgttccatcattctacgaatggtctttctctcctcttcagtcagctccacttcctcgtcattatattcatcatgaatcttgcccctaagccccataaattgcatcaccataatgcaactaaataacaaactatatataaaaataaacagaaaagtcttcaaactgaccaattcttggagtcatcattagtttatctcgcatttctttcttggtaatcttcttcccaatgatgtcataatcaatatgtttctcatccttataccactccaagggaacatccccaaatctatttcttggagcaacctacacatcaaagatttcgtttggaaatggagaaaagatagttacaaaatctagaatgaatagataaagcatcaacctcatcggcgacttcatcttgctcagaaccttggtcacttccatattcctcaccatctacttgttcaccatcatcatcatcattatcatctgatccctcatgacctaatacatgtagatgccggcacaattactcgctctctctctattacttgcaacatactagagctagaatccctatcaccccataaatgttcattataatctcccacaagtatcaaactataataaacctatatttgatgaatgtggtggtggtgacccaagtgggatctctcttgtaaaaagaacagccaattgaagcaagcatttgtgtggtttacaaaatcatgcatagattgtcatgtatagatatagtcacatttattggctcattgtggaagaatgttacatgtatccatgctctaataatgtattcctagtgtatgaaataactattcacaaaataaaccaaaacatcaaatcttttttaccaatcttttgaatagttatttcacttgagctctgatcaacattttttatggtatggtaaaaaatccacctctcagataaagcatcacatcagatgaaacacgaattttctttttcagtaccgtcagattaaaagattgcccacacgtgtttcccgtttactcttcttagattcttattcaatttgtacaaactctttttttacatatccacgtttccggaaacgacaaagaagaacaattcaataaagtgataaacccttctccattcctaaattaaaataattaattaactcttaacattcatgaatctctaatcctaatcaccattaataatttatccattagattaaatcttctttcttctcttccttaacttagaagactcttaaatctaataactctgttcacttccttcacacgaatcaaaaacaaaaagcttcgtacatttcgcctagctttcttcgttctagggtttcggatcttacttaattacccaaaacccttgaatccattactctgtgtgagcttaaatctcttaccttttatcactttcaatcgattgggtattaagttgtaaaggaaggaacttggaatcatgaagcttgggcttttcactctctcgtttcttctgatcttgaatctagcaatgggtagattcgttgttgagaagaacaatctcaaagttacatcacctgattcgatcaaaggtatttacgaatgtgccattggtaatttcggagttcctcaatacggtggtactttagtcggcaccgtcgtctatcctaaatccaatcagaaagcttgtaaaagctactccgatttcgatatctccttcaaatccaaacctggacgattaccaacttttgtccttatcgatcgtggaggttcgatttcaaagttcttacctttttagttgttcccttaattgggtattcaaaagatctgtttttgattcaattttggaactgaattttgttttcagattgttacttcactttgaaagcatggatagctcaacaagctggagcagcagcgatacttgtagctgatagtaaagctgagccattgattacaatggatacacctgaagaagataaatctgatgcggattatcttcagaacattaccattccttctgctctcattactaaaacattgggagacagtataaagtctgctctttccggtggtgatatggttaacatgaagctagattggactgagtcggttccacatcctgatgagcgtgtagagtatgaactgtggactaatagcaatgacgagtgtgggaagaagtgtgatactcagattgagtttctcaagaattttaaaggagctgctcagattcttgagaaaggtgggcatactcagttcacgccacattatattacttggtactgtcctgaagcgtttacgttgagtaaacagtgtaagtctcagtgcatcaaccatggaaggtattgtgcgcctgatcctgagcaggattttacgaaagggtatgatggaaaggatgttgttgttcagaatctacgtcaggcttgtgtctacagagtgatgaatgataccggtaagccgtgggtctggtgggactatgtgactgactttgctatccggtgtccaatgaaggagaagaagtacaccaaggaatgcgcagatggaattattaagtcccttggtgagtataatgcttcattacttcgatggtatttgctcctgtggtatcatttaattaacatattacctgtggctagaaattagtctagaaactgaatagtattttcagatatcagctcatccataatatagaacaaccaattgattgatttaaatgagcttaccttgtatggccttcttgaatccttatattcaccaagtggatattttgttactttcaaatttgtgcatttcatcctaaattttctgactatcagctatatatgcattcaggcattgatctcaaaaaggtggacaagtgtatcggagaccctgaagcagatgtggagaacccagttcttaaagcagagcaggagtcacaggtttgcctttttgtaactaattggctcttacacgtcttcccaagatcttgttggttttaagttgccatatattctccattcctcgaggtgttcttaaaatgagtctacttcaatttcagataggcaaaggttcccgtggagacgtgactatactcccaactcttgtcgtgaacaacagacaatacagaggtattggggaaatgttgacttgtcagtttttcctccctttctacagcatctttcttatgtttttgctaattgaattatctttcatgcttttaggtaaattggaaaagggggcagtgcttaaggctatgtgttcgggttttcaagagtcaacggaaccagctatctgtcttactgaaggtactattatccacgacatttgcaactctattttttttaacagaaaccacagttctcttgataggccaatatatattttcaaaacttgcattagagctatccttaattctttatctattgttttatatcatgggagagaaggatagttttcagacatgcttctgatttttgcagatttggaaactaatgaatgtttggaaaacaacggtggatgctggcaagacaaagctgccaacattactgcatgcagggtatcatttgggcatgctattcttttcattttctaacttttggttttgttgttgctactatgactgattactcttatttggtatgaatcggcattttaggatacttttaggggaagattgtgtgagtgccctactgttcaaggtgttaaattcgttggtgacggttacactcactgcaaaggtaaattattttttatttgtgtagcttaacatgttttgtgtggaacaagatacagaacaatgccataccctctgcttagcttctgtattccacaagtatttgttactggtagtcaaacaatactctgatttgtcccttgtcgatattttcttggaatcaacttagatggtctatttgttgatttgtaccacctgcgagtataatatcaagattgataaataaaattgtcacaatcattgattaaattttactttgaaaaagtttacacttgaagaaattcgttgatgtgactgagtggaaacattctaatgttttttatgcagttctactgaattttcccctttgcgtatatcataagttgtcttactataatctttgttaatgtgcattttctgtatccatatgttatttcacttggcagcctctggagctttgcattgtggtatcaacaatggaggatgctggagagaatcccgaggtggcttcacttactctgcttgcgtagtaagtatttcgcttctatgtcaatgtgtttgaacaatcatcttcttaacctaaaataaaacttctttcgttcttgaaatggatttttcaggatgatcattcaaaggattgcaaatgcccacttgggttcaagggcgatggagtgaagaactgtgaaggtacttgctaagtattatttacaaaatatatgcatgtggtctacttgcatatataaagagctctatgtcgatttatttagtaggcatcactagtaacatgctattagcctattgtttatatgcatgcatgtcggtctagaatatttagtgcagatacacaattatcagtggaattttttattgtactcaatcaaagaagtgagatcattgttaaacgtcaaattcaaattcataatcatattcttttgattgaatgtgttagatgtggacgagtgcaaagaaaaaacggtgtgccagtgcccagagtgtaaatgtaaaaacacttggggaagttatgaatgcagctgcagcaacggtttgctttacatgcgtgagcacgacacttgcataggtaaaagaaatagatcttccttcctcctagccccatacttaatttggagtcattaatcagactttctgcttttgaatctggtgaatgtgtaggttcaggcaaagttggaaccacaaaactcagctggagctttttgtggatccttataatcggggtgggtgttgcaggtctttctggatatgcagtctacaaatacagaatcagggtatacgatgttctttactctggtcttgttatcatattaaaacataggaagattttgcggtctagatagagatgctaagtaacaattgaaattatgcagagttacatggatgcggaaattagagggatcatggcacagtacatgccattggaaagtcaaccacccaacacaagtggtcaccatatggatatatgagtgaagttatcaacacaagccaagagactctctctctttctatgagtagctttaagtttccatgtaaatgaatcaatggacttgatacaactctagagaaaagaaaaaagccacaaacagaaataagtgtacctgcactatttgtaagaaatgtggatttgcagatggaatctcctttttgtctgcatattactcttacaatgtaaaatagacataactggatgaataatgagtgttacattatttactgttgaaactaacttaagatccataagaagaaaaacaataaactttgattgagagattgttaaactttctccagctcatctctgtgtttctcaatctgttctttcacaagcttctgcgactcttggaaaagcctcatgtgcttctttataagctcatcttttgtcttaagctcttcctccattactgcaatatcctgttaagaacagaacagaagagagcagaaactggtaagacaatatgtgtttggagttttcacattggtaaatcaaaccacaccttcttaaggctttcagctctcgagggcgcgcgatcttctcgctttagtcccatgaagtaaagctgaagctttttcgcagcttccatgaaatctctggcgtgccgctccacatcaactgcagcagttcaatgaggggaattaagctagaacatcgaatatggaatcaaagcttcggtttcaactgaattctaagcacaaaattcactgagatcataagttaagcacaaaaacaaacacaacttccaaactatcattcaaactaaaaccctagaatggtgaaattggagagtagaaaagggactgactttgatgagaagggtgaggagagcgatcgatggcctgaagctctctcgccggcaaacatggtaacagagcagcttccaaggctgtgacgcaagccataatgtcctctatgtcattattctgattgttcgagggggtctccggtgatctgattcccggtggacggtcaggcggtgacggcgaagggtcagaagactgcggcggcttttgctgataatccattcacgccgatctcgatctctctttctctctgcttgtttgtttgcccataaggtttagtgaaaaatattataatgggggcccatttactggatttaatttgggcttattgggccttttccacattcttaattgttcttaagaatatcattttgatgtaattaattgaaaacactgaaaattcatttttaataaatatatgaagtaaatcatttatttcatatgaaaaaacaatagtaaggagaaggaacaacattttctgatactttactcttgatttgatgtcacaagatataacagatgatggcttttgtaacaaattttgattccttatgtaactttttatctccatcaaattagataagttacatccttacttaaagattttttagctatggattttctaatgaaatttgtaaaatgagtaagcgattgactaaatactgtaaccattctcttcattatcagtgaaaatagcttttaacacatctctcattctcttccttctgattcacaatcatccatgtgaaaagatgacaacaaaaaccttagatagagaactcacacattagttacagaagaaagattctcatttactactacataaggaagtacggaacatatgatcagacatcaagcttcccggtcggagaaagtctgctactccggtatttaggagacaagttaacaaactccaaagcctgtgttctgagctgaaccggataatcagctgcacaaccgattcttggaccaactcctgtcgaccatttcagtgacaactgatgtcccaattgtaatgatcttgactgtttctttgagtttatccttagtagcatagatttctgcggcacgttagcttttggactcccaagtccacctgagagtgttctctggtagctactccgttttgcctcctcaagtgttcccactgttccgttaccgttctcatctgtttcagtctctgcttggaatgttgtgtcctctttctttaacggttccggttcagatcctccgttggatttaacataatcatcgtagctgtcagaatcttcactagctttatgcacctacacatacatagatatattagctctcaagtagtctctttttctaaacaaccaaactctagttaatgatatcattcaccagccaagattagaacaagggcattacctcaacattgtctaggttcactgcgttctctctgagaaacccgagaaatgtgtcgagactatcgtctgacggcctgtaatgtccgctatatgcagagattgtctgagattaaaccgaaaacagaacgatcaaacagagaaatcacagaaggcagacataataaaaaagttgatatgaatgaacatgtatctcaaccactctaagaaaaggacgtggccttagtaagttaccttgagaactccattgtcaacaatcaccctcccagcagctaatgtagctcctccagccaaaaagcttgagtgatggaaccttcctttctttttctgaagtaaacataaacaaagaaaagaaccattagaatctttttcaatactaatatcaattcatcaccaatagaaagatataacggttttaacttaccagaccggcatagagtttcttgaaagtactcataacaaagatccattttgttccttccgatccatgcattgtgtgtaagaactttccagttaacttgtgaacaatcttcccttctatgatcacatactcatactcttccctctcttgctgataccagaaaaggcttatatgagagaaatcccaaaaacaagtaaaaccaatattgacataagagaggaaaaaatggcacatacaggtccaagatatctaatgcattgctgcttaagctttgacctcggacattcgttaagatccaaatctatccctcctccaacatccaacctgccaaaaaaaaaaaacccggatatatcacaaagttatagataagaattatcacctaaaaaagattcttgagctacaagaaaacactaactaaatgaacctaagattttaagcataccagtaaaagaatggctgaccagcatcagctttacaccattcttcatagtatttatgcaggttgtgtccataccggtgtctaggatcaatctgattttcaaattttcatattattagtcttctttttacatttaatcagaatataacacaaacaaatattgaaatttgtggaagaaaggaattacagcttcaatccaatgctgaaaggccaatttctgagctttgtcgactatagacagacccttccccacctaaacccataaccaaaccacaagattacaaaaccaataaccaagtggagatctttttcttacaataatatatattttgagatatttacatatacttttttctgaattttaatcaaaagaagactcattagggaaaataaataaatcacaaagttcaactagaaattttgtgaaaatatgtttttgatatttttgtgaaaaaaaggcataccttagaagcattcaagctaacacggttccatctagaaacagcagtttcaggtctcgagtaatcgaaaaacgaaatcgtactatgattaagcctcgcataatccatcgcttgccaccttttgttttttaccatcattaatttaacacgttaatgactctaaaacataatctctccatttaaatatctaattacagtgttttagttgaaaaggttataaataattaccagagctcttcggcgacaacgacagagtctgctaatctacgccgcgtacgataactcctgtagaccttctgtactttcaccgccgccaatctagtcgagtcatcacacgcgccttcaagcgcgtcaccgtgtgaggataactctcggtggtctaccggagaaatgagaatctctccggcgccgtgtgagaacggcgaagactgaaaatcgaagctcgagactacctgcatcttctccgaccaaagagaggacttgaatcttagtgtctgaagaagaaactaaactcagagaaaatggaggatttgtgagtattgagagagaagaagaagaagaagatccaaaagtgtttgttctgctatcagtgttgtgtcatctctgtatgtattttttatatatagaaaataaatggcccatttctttatatatccgaattacttctttattttctaattttgtttctttttctcattttgacaaagttcttttttaattctgttttcctaaatagacaggtaagattgcgattttatttttgattgtgattattggagtatagtattaatatacatgtcactgatttattctgctaataaatcttgcaggttaggtacttagctgtttaaaaaacatattttaaaatatatacttcattgattcaatttagctgatataaagaaaatcaacgtaggttaagtgcctaatgtaagtggtggaggcatttggatcaagcattttaattcttagccaagttacaaaatgttgtaatgatgtaagaaaagaaaaaagatggagacatgacgatcgtcatttactcgagcatttttattaagttcccaaacctcaaatgaaagtaaaaacatgtgcctctttataatattgtctcaatgtctcctatatcttgtctagaaagaacaagacagtatattttactcttaactattaatgtagatgaaaagcttaacaaaaaaaaatgtagatgaaagctcattaatgcatatgaaatactataacacgtatgcgaaaataacttgaatgactacactatacgtaaaagcttcataaatacacatgtctggctcactctatctaccaacaagttatatactccgtataattgtgactgtgtcagtgacgatcatcattccgtatttttctgtatactattattttgcttaagtcatgaacggactactaaaagtatataaattccatgtgtcgtaaaagaaatttaacacttttattagtaggatcactagaatccacacattaaaacatttgatcatcgaatattactgatttattaagtataaatattcactatgtcaaaagagaaagaacaataaaaagaaggaatattcactttttctgtttagtgggtctccaaatgacttatcaattgcaaatgggtcttgttacataatacaagtgcatcagaaatcatgcgatgtcaggcttaattctagtatagaatcagaagagattattcgtttcctataataaaagatttctgcagtttcattatgttcattcattatgttccttcttttgttttctgttcatagttaatctgacaccacctaacaacgacatgtaatagttaatcacgcgtgtggaaatgactagcgtcaaaccggaaatagtggtcgagtatcactatagattattattggaatatgacatttaaaaaatgcactatgcaaaaggaaaacaatacttgcgatgttcggaatagagacgacgagaattacatccacatgattcattttaatgactgatctttattacgaaattttagaatataccgacatacacatgcagttatattttatctatatttcacatatatctttatacattatattataagatcttattctagcttctttttctcgtcgatcttattctagctaacacaaaataataatctaattataatcacctattctaatttatgtatatagttttaaattttaatgtgtcaaagtctatcgaaaacctatctaaaacgaagcctagtttaagctgttaaagactcaaagtccatatgttatataattggtttcaccatctgatttcgatgaaatgtaaaggaaaatcacaacatttgtattcatcatgtggactaaatatatgtcatgaaagaattgtcaaaaagggacaaatacgtcaacaaaaataatcgaccgcgcgtaaccaaactacatctttaaaagcataattggagtaattaattcttcaacgtttttattcgggatttatgcttgaagtgttagatttagggacctatgaactttctagctgtgacaatggaatgacatttgcataaattttttaaaatttgtattttggacaatttgtcattcaaattatctaatggatgacgtgaatccaactccatgtgtcatgttataagtagtggatacctaataatgaaacttaccaccaacagcgctattaccgaaatttgtgttatcatattttatatttgttataatcaaagtatatttgaataaatattaatcgaatgtgcatacgctaaattagtcaaactagtcctgacctaaatgcacgtacgttggatttgttcgtggaggttggctaagttgactttggttccaaggtagatctagttgaaagaaattgagtttcaatacattacctaaaatcgtgttaagagaaattagtaaaatttgggttgtttagttatatctacagtataacttattttttcatacagcccatgattaatgtatgtaacgtacgttgacatgatcggcatgtaggaactaatccgtcgtcgattagtttcaattttgtctaattttatactgacaaattaattaaactgttgtggtttagacgtcgttgtcatatgtgaagtaatgatacgtttgtcagagttactactaatcttcaatgctagagttgtcagagtttaaagtttggtgtacttaatattgtaaccggtaaaaccattaatttcagaacattttgctaaatccaatcgaattgataataatcctcctaaaatatagatattcgtaatcgacacgaatcatgcatgaacctattctttttaggtttttctatagtatctaaagtgatcattacattaatattgattattgacggatgcctacaaaaagaaatgatatataaaaaaattgtttggttgaagtgttacgacgatttacgaagaaacgtagaaagtagtcggaagaagcatgtggtccccgtgattgacttcttcacacgagtcacgaccactaccaacgattctatctctttgcgtgcttgcatgtgaatcacattgatctactcgtatacgtacgtacggtcactttctccaaagatcaaagacctatagtttatgtatattgtatacggtggtgttttgtttaatgtggtgtattttttccagcgattcatataaaatacctagaaatattatatttaaaattccatttaggatttgaaaggtgataaaccatctctaaatcaaaagacttggatatgttaggttcaatgagctacgttgcgttaaacatgactctttaaatatttcgatcacccaccgaagtataaaactgtttttcctaaggaaatttatgtagaacacgaggacaaatgtgcatagtataatttaaaatgataattagtatatcgatggatatagacaatttgtccgacgactacctaattgttccactacgtacagcttgcaaaattttgtttgttaggagaccttgaagtactccacgagatttactcaaataaattaagcgtcgtagattaatactatctgtcaacgaatatgaggagtcactcgttttttgttaaatagttctcgacctcatatgatgactaatagcagcgagtcgcagatttctaaattaatggaactaatttacataagtctacacaggctgagtaaaaatacaatgtacattacctttttctttttttctttttctttttttttgggcaaacaatgtacattaccaaaactgaaaaaacacaaattcgttgaaagggtcaataaaatcggctgatcaaaaaataatctgaccaatctaacataacttttaaaagcgtacacgagttttgttactttagtaggtgttagtttagtaatgaaatgaaagatttgtgtcattctataagtaatttcacattaattaatgcatgcaatagtgaacttggttataatttggcccacagaaagatttactcatttaaccatgagaaagacatgacaatataaaataaggtgttctttaattagtatgtctataactttgagatatatacaagagaattgtaaaatatatacgcctccatttcttgcattatttaactgatatcgaaggatgctatgcaacttactttccaccaaaagggattcacatgaatttttcctagcacatttcaaaagtttctaaatctgctattcaactactgcaaaagtctctagcagacgactgtatctactacacatttgggcattcaactaaataccaccacgcatcttaaacttttccgcatcttatataaataatattgtttttgtctatcggttacaagaaatttaaatcttagaggataatgatgatgatgaaagatgtgatctgaataaaaacgtttcagaagataaatttcttaaacacgattaataaccttgaaactgaactgatcatagatttgtagtacttgttaattctgaaaaacgtcatatatacacacacacacacacacaaattacagctattcgtcgactaataaaaaaaaaaattacaacttatattctaaatagtggattaggttgattgttcttttaagtcataaatgtcccaccatatttgttgtctttttattaggggggaaaacgtagacacataaaatcagtttattcgtcatcctcctcacaaattaagcatatcacacaaaaataagagatattaaatgaaaattttggttgtgcttcactgtcttatttatttccagtttactttaaatttaagacgaagacctaacactatgacctccatacttaatagagtttgccccaccaacaaactttatgaatatgcatcttgcatcacatctttcgttatgctaattaataacagtttggctcatcacatgtgaacatacccaacgtaattcccattactttaaaattatgaatctgatcgtagcgtttataagtgtccaaacaagttttctttcagagaaccacaaagttatactatttaaaactaaaccaaaagaattactaacaaaatcgaacaaagaaaataacttaaatgcagttcaatttttgctaagtttttgttcaatctttaaccaacaaaaagagaaaatccaaaaagcgaatctgacgctcatagtatttcatcttttcattcacattaatcaatatttgctttcacaatcccacattataaataacattattcctaactaatatatttagaatgagtagatttaactgaattccactctacgactggaaataaatttgattatcactagcaaaagggactaatatcatgttaaatttatgaatttctaactcaaaattttcaagttttcttcggtttgtgtatatatcaaaactaattctaagaaaacctagtcgagccgaggacatggaacaatgagagatgtccaattaaagatcgaattgacatttcaagggtcgtccaatgcccattagagtctacgaattactatttcaaggcccatttgctttcatattgtaaattactcccttcatttgagattacagtaaatgtggttttggagttgttcacattaagaaaccaagacagatactgaaacacagaaaaccaaacacatgatctaaaatgtgaatgtggttcagggtttcctctgccgtagactcttctcatggagtttagagagacaatacaaacacacaacttattatagctaaacaagtttttattttaacatagaagagaaaacgtgagtttgttttggtggttgtgtttcactcagatcttagctgcgaaggaaattccttgtttcacgagctcgtcgagactctctgcagaaggtcgagctttggcgactttagccaaggctttgttctcatcaccactacctccctccatgaatgctccaaccactttaccaccttgaacccaatatgctccaaatcttggttttgggtttgatggattgctgtctccaaataacacagagtctcctacgttgtctccgtagaactgccatgagagatcaaaggagcgagagtagaagaatggaagatagtcgtattcctccaccgctgcgcctccctcagccgctttgatcgcctgccacaatgtatcacatatataaacgcttcatcagatatatacaactgtatgttaatctataagatttaggcctcaagagtttgcgttgcattttttatggtatggattaatagggttttggtgtagcgatatcagccatattgtaagcattatttaccttaacagcttgctctgctgatttgcgggaatggtcaacatgctcgacccttctcacgtctccgtacattttcaaagggaaagtagcaacgtcaccaacagcgtaaacatctggaacacttgttttgaagaatgcatcggtctgtgtgaaacagttaagcagtcaatttaaaagatccaaatcagaatggtacgggataagaagaagaagagacgcacaggcagcagataaataccttaattccacctttatcttcctcgacctgtcccttgaataaggatgtcaatggttttgcaccaaccccaactatcacaatgtcggcttccaatgtcctcccatccttgagttgtacttccttcacctggaggattatataatacaagtaagacatttgcaacgagaccatttggaaaagctaattaatcgagttcgtcaaacgaaaccaaacctaaacataacattgtaatttggttttagactttagtttctataaaatcaaaccaaaacttaaattggattgcccactctattagctaatgtttctttgattacctctccatttggctgagctgtgaacccagatgccactgttcctttaatgatcttcactcccttgtttgtatagtaagtctcatagaaagcagcaatatcggcggtgaaaagcctaggcactgcgtcaacattttgttttcattacgtgtaacaatgtcatatattacatgaatagcaaaaggatactagtcaacttactgcaccaaggttcagggaaaaccatagtgacatctaaattgttgatccttaaaactgcactaagctcaagaccaatgtaacctccgccaacaactacagcctttccacctttcttagctttaattgcttcaaccaatttgtcggcatcatcaatctctctcagatagaggatattcttagagtctgcaccttttactccaaaatcagtcaatctgagaacctgcaaaggaaggtaaagagttactttcttcttgtaatagaattcataagaagcattctgatgtgagaaatgcaagtatatcagtctttacagtagaaccagttgcaattatgagcgtctgatacttgaagacatccccagttgcactgacaagactcttggcagagagatcagctttcactatttctgtgcttagtatcaactcaattcctacaaacacaatggataacaaaaaaatcatagcacgatttagttccaataacataagtaattaagcttgtatagagagtaatgtaatgttataatagatcagtgggactacacagatgagcagggcattgatattggtgatgttgcagacagttcattacctttctgcttgtaggattcaggaagcagtttttctccaccactaccaacacagcaatggaaacctggaagtctagcagcccctgcaacaaaaaaagattatcataaaaagcataaaccaaagccaagtttcagcaaatcaaaattaaacgttgtagttagcaaagtaaagtagaaaattgtcttaccttcaggaaacaaataccccttgctaagtgcagggcgttcatatggagccacctaagccaccatatagagtaaataaggtgtgaggattagagaagacaagtccacataaggatcatcatatcataggttacaagacacactgcataatcacagttttccaaatcgagaggaagcttaccgcctctttcgagataacagccaattctcctggttgaaccccttgattggcaaactccttagctgcgtatccctacacacaaaaatggagaaaaggatacaacaaaggttaagagttgaatttgcttctgtatttagttatttctttggaattttcttcattaacatctgtgactatacgattaatctgagctagtataaactaaagaggatcctgatgatactatgcttactattaaccatctgcaagtgattttgcagagatacacttttctcacacttaacaacaacaaaagaactagaactgaatcggaagtttttaagatgctctgtgcagaggaaaccagattacatccatgttttacgtcgaaaaaacaatcaatcaacatacgattgtttgattcaaaatcaagtttcgattgtaaattcatctcaacgatactagaaactagaagcagagccgccgatctgacgtttaaatctatgaatcacaatctataatcatcgtaatcgctatctgattaacaataacaaactccaagccaaaaaaactacgagaattgtggcatttcgcaacacaaatcgaatcaagctcttcgaaaatcgaaagcaatggctgaaaaaacttaaggaggaaggaagatactcacggcagagacgccgccgccgaggatgatgtacttaaagctcttctccgccattttatccgatcgtgtgaaagcgttttgttatcttgtcgctgaagttggtttgttagagaagcaaagaaagagcaaaaaggctaatatgagctgagtgactctaattggctaaaacttaaccaagacttggccgttgattggaggatgtagatacaaagcttacacgtggcaatattgtgaccgttgaatttatccaaccgtcgtggttcatgctatatgtggaaagtaaaaagaattaaggacggaaataaaggactgattgattcttaagtcttttttaattaacccgaaaaatagttggtggaaaagtcacaaatgtgccacgttattggataagttgtggaaaagtccacaaatgatgggttttagattattgggcttcttttcctgacctcttaaggcccaaaataacaaaattcaagaaacatgaagcttagtccttcgacccacatgataacccatttgaccatcacatgattaacaattcgactaaaacaaccataaattttgatttatcagcaattatatttgtaaataggtttattactacaatctgtacgtaataagtatcaatctttgaaggaactaaaatttacacattcccatccaagactataggcagtcacaataacccatttggatgaatgctcatttttatttttaattgttcaaatttcaaaatactgtgtatagctaaaaaatcgaattaataagtgaaggagaaaaaattggtggagtggattagatgcatacaatgacaaaaaagccaagcaagccttttatgggggtgtggcctgtcgacacaaacatgtgaaacctatacttgttgccttattctctagcttgttctctttctttttatttttttcttttaccaaatctaatttgattaccctatatatctcatcttcctcggattctcatttctcagatcttagttcttattgatattgttttgtttaatagtagttatcaagaatatacataactcgaatcatttgtcgttgtgcaccgttgtttcttgttcgccgtccacgcaataattataaacatccatacctaaattttatatatacacatcatgaaatattgcgacaaagacatttaatctagtggctcatagtattagtgcagtcattgcatcataacttggtataaatgtttgagatacaaaaataagtatatatatatatatataatagagtttaatccgcggtacaccgcgaaaataatttattttttaaattaatatatataaaagtatgggtactttttgtattttgtacactattaatgaaaattcacattttaaaaaataaaattgaatgatggttcaaattgatcttaaacgaaaaaatctgggttccatcaatcgtttttcttgaaaagatgcaaaatatttttaaaaatcgaataaaataattagcaggaccattgatatatttaaatatgcgcatgcatatgtttgtataataaaatcttttgatgttgatggttggtttaagttaaataagaaatcagaagcggacgtaacacatctaatttttgtgttagtttagtgtttacaatatatttaatggggattaaaagcatgagggaagagattaaaggcgcagaaagaggaatcctaggctcaaagggttctcaaagacctatcaagtctctattatttcctaacaccacgttccaactgtatgatttaggcttttttgccagattcaaaagtactttgttgttattaatctcgatcatgtatcattaagttatgtttcttgatcttatggttacggttgtatattatttgatttttcctatgcattttccattagactctatttgatttttcctatgcatcttctattagattctagttcattctttcttatttttttaattcatttgtcttgggtggctaatgaagcaataatggtttttagtttttatttgagatatttgtaattaatgatgcatataatttactgttttacgtggaaaaacgtattctaatttcttgtaaattgcaatcgcattgtatattgtaccgaggaaaaggatcgatttgcctgcgtgtgtataagctttatcaacgagatccaaagtaatctatatatgacccattgacctaccatcatacacaaagtcaacacacctaaaaatgattatgatcatgttaatctattaccgcttcacatacaattgataaaaccaaactaaaactaaaactaaatataaatactataaactagttaagtaacccacgaaaaagtctcggcttggctataaaaatgcagtcaccttccactttttattatctttctgatagtcattctatcagaaatattttatacattagactgatttgtagtattttcgtctgcttaaatttgaacatatcgttcgttaatcattaatgtttcctaagttagtaacaggcctaattcttaattgtatgttcaatacttttatcttatgatctgatgtctgaactttgaggtaaaatggtactagtatagttccatagttatgaatttgaaagactgattaaaaatatatattcaaaatacatatcaatctacagtgttctttttttgtttgctaaattatatgaatctacaaaataaaaacgttatttcttcgaaagaagtgttgtcgaaaaaacattttgaaaagaactgcgcattggctacctgtcttattctgacaatattgctccaccgttatattttaaaagcattcacatctatttttatcttctcaccaatcttacctactaccatgtgttcgcagtaaattaagacatacgacgatcgaaatactgtaattatttatttttattgattacactaaactaatcttttcatcaagataatctttcttatgggatttctgattgtaaaggggtttttcctcaatttttccctattattttttcaatttagttttgcccaaaaaaaaaaaaagaaactatttaataaagttctataatatattattgatataatccgattgagttagctcgattagaagaatcatagatggctagataaagacatctagtcgacctctactactctagtgatctaagattcaactggagagcagtgttatgactttgaaaaaaaaaaaaaaaaaaatcagcatgatatacaacttttatagattagtcactattcgatgaatgatgggaaatttctttggcaatttgactttggtcaaatatgtcatgatattggtggaagtaaattattgatcatcaacatttccgggaggtgaaatcagttttgacatgacagtatataatattaaaatacttgtttctatgaataaaaacagcataaatccaaataaagctcgaattatttaaataaaagaacaataacaattcagataaatttatgaacaataataaaagagttttgaaatggaattaaatatcttctgaagtgaaatatgtaataaaaatacagtagtaatttttatttgttttgaggcataataaaatgaggaaaaaacccgcaaacatatgctgtgggacccaccatgttttttttttcaacttgatcatctcttaactctctctcattcaccagaaaacaaaaattacacaaaaatcaaaacttttactttttatttctcctctctggatcttcctcttcaaagctcaaggccattagggtttatctgagctccaaaatcaccctaattctagtgtatttctcagcaagcaagcttcttctttttttgtcctgggtaagcctttgttccttcaatttatcgccagcttcttctttatctcttaccttttcttctttgcacgcctccattagcactttatttatttttcttctgtaaccctctctttgatttgctttaattcatgagatttggggaccgtattcagggttttttttgggtgggtttctctgatttttttttcctttttcagacctttcattatctctatgtggtcacttaaggtctctgcagtttcaattcaaaaatttagtttaaaaaaaaaaaaaatctgggtgtgtgttcattagctagctcctctttgttcactcattggctctctatgatttgacatttaagattattgctgcatttaattgtgctaaatcgattctgcactcatgcttcagctactgttctttgtgtccctgtaaatttaagtttttgagatctgaaactataagaaattttccgattttggttctcattagttgttagatctcttatctcactcgaagcttctttttttacgcggtttgatttattaatttcgttacttctctgtaaattctcgatctttagggttcttctcatcccctggtttaataatgggtccaatctcagttcttgttcactctaattttactttcacaatatctccaattacgcagatgctttttgacaaattttctccattaaaagtgtcttcttttttagctgtattaaatttataggtctctctatctgtactggtatagggttcatgattgagtctacaaaaacataatgaatgacctaaaagctattaactttcgtttctagatctgcttgcttctctttaatatcttcacctcattgctctaatagacattaatctccatttgaagttagtattcttttaccagttttactgatttttctttttcattcaggtaactgtgattgttgcaggatcttgtgtagaaacagatcacaagaagatgaatgataactcggtggtgcggctttgattatcttcagagattttagattctgtatccactctgttgcgatggggtcgtttgcaggcgcttgtgagattgtggaagagaaggatgatgaagtaagattgccaaaacattccgggagatatggtaaatcggttatgggatcatcaagtaaggatttggtggagcgtaagcaacgagagtatcatggttctcttgagtatgacattgatatgctttttcagtctatttctgttaaaccatctactacgaggttgatgagttcttctttccatcatcatgagacgagcgcgagtgccggtccaagcaggaccacaagcccttcgaagagaattgcgtccatgaaaaaaccagggacacctcagtctcctagatttgttggtctctctgattcagtttctttgaagcaggctcttagggatcgttgcatttctaaggcgtcggaaatggctgctcagaaacggttgtcgaaatctgctgctgcatctccgagggtctcagaagctgacaggataaagagtttgtataaccaagtttcgaatgaatctactagcagcaggtctgggcttgttcctgtggacaagggtaaaggaagtttggttgagatacctttgatgcctgtaaacgataaaccaagctcttcaaagagcgtacctcaacggtttgaagatccttctaaccccatttctgagccatctcaagctggaaccagttttggattacaaggagtggggaatcaaacgcgggagattaagctgttgcatagatccaacaaacctgggtcttgtcttagttctggcagtggagattatgagatagagttagatgaaaatgttgcgtctccttccactcatgcatttgttgaagatgatgtgatagaaatagacaaacacgttacttcactgccatctcactctagcaagaaagtcaatgcgacggagcttgacaagaatatttcctcatctgctgtagactcagagcagaaagggaagttggatgatgcacctaattcagggacagagaatggcaaaacagtacggaaggtaacaagaatgattccacgtcccaaacaaccgaaaaagaaaattttgcttaagaagaagttaaaaatcggggttgtgtcagcaacttacccaacaaaagacgatgaagaaattgttccttccttggactctagtgccaatcaacttctctgccagagatgtcactgttcgttgaagagcaccagcatcgatgacaacccaccttcatatacttctagtcataatcctaagatttgcacagatagtttgagctctgtttcaaataaagaagctcatcaaggatctgacgagaactcctctggctcgtgtaatgtcagtcaaagctctgaagctgacattgtcataatgaaacaagatgtttcctctagcaataatagtggaatcggtgcaatggtagaaaaagaaaccgagaatccgacttccagtgagaaattcgagttctctctgagttcaaaagatagtcttggggattatagcaggagcacaagcattagtgaggagagtaatctgagccgatttagctgtgggaataagcctcacatgtcgatggatgtgagatgggaagcgattaagcatatcaaggttcaatacggctctttgggtttacgacacttcaaccttctgaagaaacttggttgtggagatataggaacagtctatctcgccgagctgattggtacaaactgtttgtttgccataaaggttatggacaacgagttcttggcgagaaggaaaaagtctccccgggcacaagcagaaagagaaatacttaaaatgttggaccatccttttcttcctacattatacgcgcaatttacttcggataatttatcttgtctagtcatggaatattgtcctggaggagatcttcatgtcctcagacagaagcagctaggccggtgtttccctgaacctgcagcaaggtaaagatttaccttttccatttcgtgtctagcttatttaatgtactgaaaattgattgtaaaaatttgtttctgtagattctatgtggccgaaattctccttgcactggagtacttacacatgcttggtatcatataccgagatctgaaaccggaaaacattcttgtccgtgaagatggacacattatgcttacggattttgacctctcactccgttgtgcagtgaacccgactcttgtcaggtcaaactctccacctggtaaagatcccgcaaggatttcaggtccatacaacacatccaactgcatacaaccattctgtatcaccgaaccatcttgccaggtttcgtgtttcagccctaggctctcctcaaaccaacaacaaggtagaaaaccaaaaaggggtgatcatctttcgaaaacccaacaacacttgagtagatcattgcctcagctcgtggctgaaccaaccgaagcaagatccaattcctttgtgggaacacacgagtacctagccccagagatcatcaaaggagaaggacatggcgctgcagttgactggtggactttcggggttctcctttacgagcttttatacgggaaaacaccattcaaaggttacaacaacgacgagactttggccaatgttgtgttacagaacctcaagtttcctgatagcccgcttgtaagcttccaggcaaaagacttgatcaggggacttcttgttaaggaaccagagaacaggctcgggtcagagaaaggttctgtagagatcaaaagacatcctttttttgaaggattgaattgggctctgatccggtgtgcaatcccgcctgagctaccggatttctatgagtatggtggtggaccagaggcagcggcggattcgcctggaggcagtaataataggtatcttgaatgtaaagccataggcgatcatcttgagttcgagttgttttaagcaagacatagatattctctggtataagcattcagagtaatcgttgttgtaagttattatatctaagttaaatctaaatgtcttatatgtaaatttagcgttctctgagacataatctgatatagtattctcaaaaatatatatgctccttcgtatctcaatttttaaatatatgatcaaacattacaatcttagtagacactaatctacaaaaccaaaagattacaaacacttttcttcaatgaaagacttgagttgagattcccatctgatgaagaacacttgacgtcgaagaagctgacctcaaagcctcagctaatggtccacccatattgtggtggttccctacattgctccaccaattcaattgctccctctcattgttgttgtttctcaggttctcttcttctttttcttcttcattgcttgttgaaagttttagagaaacatctgaggaagcgttactattaccgggcacggagattgagatatgacaagtggatgagctcattggactggaggtagagcccaatgatgattcgcctagcccgcctaaacccgcctaatgaccgtgtaatccacttaatgtctgcatagtccgccaaatcttcctcaccgcctaatagaatcgattttaagaaagtcgaagcggtacatgaacgcctagcacctaggggatgcctagacggctgcgtaacccgctttcttgaataccgcctagttgtaattgcacatttttgggtgtatatcaatttttttccagcaaaattaggcagttgcacctatcacctatgtctcaccctactgggccgggcctgaataatttatgttacaaagattgcaatttgcaaacattaaaagaagaaaagcccaaaaaggacatctttgatcatcagattggctccactttaattacgaaattgatttctttatttttccttttttacttttccttttggcgggactgcttgctttgattttggaatgatgtaaaagcaaagcaattatgtttgggaaggtttaagcaaaagcaaaagacaagtgaaagtaaataaatagatattgagagagacatagagactgttgtaacaagaaaaaaaaatgagtagcaagaataactccggagctgctgcagtttctggagtcaacaccaacggtaagctaccaatggaggacaatgaagaagaagagatatggaaagttgcagtgacgaggtttcaagcccgagaagaagagatcgagaggaagaagatgactgttaaggaaaaagttcaacagcggctcggttttgcagaggaagctacaagatgcttaactcaaacattggaagtaagtttataaaaagccttttgtgtaacatggtagacaacaaagctaataatgttcttactaaaacaggagctagagattatgggagatcctatgagaaaagaagttggtatggtgaggaagaaaatcgacatggcgaatcgagatatcaaatctttggcacaaagctgtcagaaaaaggtattacacattttcattttcaggaaaagctggcagctttgttttaacacaagaggataatttgacaggagaaggaatacaaagacacattggaagctttcaatgaaaagaacaaagagaaagctcaccttgtttccatgttaatggaggtatttagtctaaaccacttaaaagctttgtaaaatttctactgaagatccaatgtgtgatttgtgacgatgattttcttttggcagctactggctgaaagtgaaagattaaggataaagaaactggaggaaatcaacaagactgttggaaccttgcaatgaggagaagcaatctacatggatcttaccttaaaagagagtgaaaatttgtttaagtttttggtattacactctatccaggtcctcctattaaaagtgagctacgatgtaacaggatgtacgataaatgaatggtgctaaggtttaaagatatgaatgcagcgaaaaacgaatttcttaaaagatgcaagatgtctttgtacacatagataatgtcaaaacaaatcaagcatcattatattcatatatccgaaactagcggcttccctattttgtcattacccgtttccttttactctgctggctcagtgtttacatacctgttcgcgtaatctaaatactcctgcaagtaacaaacaatcaaacataaaaattatcaagaaggaaatacaagaacagattccattggtctttaaatgaatattagtaaccttacctgaagtataactactgcggctaacttgtccaacattgtcttctcttgaacaggatgcaaattcaagggcttcaacatcagttcaacggtctgttgacagtattacatgagattcaagggatattaaacttaacacctatctttactgtgacttacaagatctttaaatctgaaaaatatatacctttgatgataatcgctcgtcccaatatgtgtatttcacatccttgagtttttcggtcttacgaagttcctcaatgaaaagattcacagtgacaacctgttccaagtttaaaaatccttttcggttatatgagctaatgtagaggaaaagtacttcacaattcagtcgaaacaaaaaaaaaaacttacatcctctacattgttcagtttgccaaatggataaccaacgactaatcccgacacagaaaatgctttgacctgcataagacaacaaaaggcaaatgattgatgtaatcaaacagagttcataagtctacttgttgatagatctctactacgtcaaggacttaacagtaaacactaactgaataaaccttgatcctttaatcaccagtaaggcagtaatcacaaaaagccgagggtgaaagtagacactaatctactacactaacaaactttcttcttcattaccaaaacaaacgatagtttcttcattccttatcttagtaaacactaatctacactagcaaccttttttctttgttttaaaaaacactaagaaatgatagtttctccatttcttaacaagaactaaaatctgtgtatttgtttaaggtctcctttaaatctagagctaaaaagtaaaggaacgatcaaacttatagcacctaccaggttctggaaatctgtagccatcaggtcaatgtttgatttctttctgagcaaaacactgcaagagaagtaacaggttttcaatagcgatgatggtgacaaaattgatcagagaggatttgcatttttgaaaattactgttaaacaaatgttgtagcatgtagacactgaatcaaaggtacctcaatggagaagcaaccatatttgaaggatctgagatagctaatccaacatacttatcaccaacatctaaacccagaaaccgaccagggactgacactttggtcttcagcgcattacccaataagctcaatggcttcacatacttcatttcctgatcaaaagtaagtgaatcaaacttccaaaacacttgttcaaatcaagactaaaaattcacatatcaattgcataaatttgagaattattgtacaaaaaaaactttaatcagaccatcaaacaaacatttcgaaaaagggttttagaaattaatcagaaagtttaaatcttgacgtactttaaaggcggaaactttctggctccggagcacggaatctggcgagaggaaacgacaaatggttctgctaaatgtcttcgcgattgaagcaagcaagcacaaaccccaagattgtgaattagagatggaccggaaaaggtttattccggttaagttcgagacttcaccgtctaatcaatctatacgatgccggtgattatcagggttttggttttacattataccgggaaccggttaattcgaggtggtttaactggtttcccaaaattgattcggtttagcttaagtgaaaagctcaagtaaccacctctcctgtacttacttgcaggcagaggatcatattagtttcattgcttatacaaaattgtcaagctttaaacataaatataatagcagagtaaggaacaaaacaattccaaaagcagaactcacaattccaaaagaagacaaattcaaagattattttctgcagaaaataaagattcaaagagcacaaaccaaaaagattacaaacacttttctttaatgaaaaacttgagtagagattcccatctgatgaagaacacttgacgtcgaagaagctgacctcaaagcctcagctaatggtcctcccatattgttgtggtgattccctccattgctccaccaattcatttgctccctctcattgttgttatttctcatgttctcttcttcttcttcattgcctgtggaaagttttagagaaacatctgaggacgtgttgttaccgggcatggagattgaaagatgacaagtggatgagctcattggactggaggtagagtctgatgatcgtggccaatcgtcaaagaaatgcctcaagatgtgaccatcgtctgatcttccattgctgaatccactgttagcttcatatggcctcttgttgttgttgctttcttgtttcatctctgaagaacaactgtgacagagaggaataaacataaacataaacattgtcaacaaaaagatccaacatttgaacaataataagtagactgatcaattcaacaaaatggttagagaaataatttaatcagtcaaatgtgtgtgttaataagaggaagtggttgcagaatctgagagctttattttgtttggcttctatgcaggtttggtcagctttcactgaggtcctaccatgtcattatttcaaatacaacataagtatacatatctctttaactttctctctcttttctatttctatgattgaaaagtctcacccaactagtaaataaaattagattctatcaaatccaactgttatcattatctctcaacaaaagaaagaataatgtttttatcacaaagtatgtatgataagtctctcttgtcaccctattgccaacattacccctttcttcacagcattacttcacagtgaaatcactatttccctaacaacaatatttgtaattaaccaaatctactaatgactttaattaaacagagtgtttgtgtttttttattgtacctttgttgatgactaaggtggagaggttgagatgaaccagaggagaagaagtggttgttgtttggtccatgaccaagctcctcacctaagacaaaagaagatgcggttgttgtggctgtcgttgtgatggtggttgtggcggtttccacaggctttcttgaacggtttcttccacggtgaatgtggcggtcacaatacttgtggcccgctacaacatcccttgaacatctccatttcttgccgtcagttctcttacacctccctggctcaggatccattgctcctcttccccaataccctgttttttattaagtgtgtgttgttcattagtaacaacaaacataaatctcactcaagacattggttacgaaatgtacttgtctgattctatctatgttgctaatagatcttctagaaataggcttatcatacacatagggttttaactccttgcaaggttgcagagcagccttatacttattttagatcttggaaatataactccaacaccaaaacaaagggaatcttttttacaaagaaagactatttcaaggataagagaagcataaacaatagagaggagagagagactgacaagaaggttggtgatgaggaaaactatgttgaagaggatggtgaaggaaatgcataggagattgatggaggagacttttcttaataggtaagagaagctcttgaggaacagaagcaccagccaacatgtatctatagatcagtgcttgtagctcaagttcttgccactgtgcccagctgaagaagtttcccatctctacatatatatgtaacatagaaacgtcagattaaatatcagcaaaaacaacttcaacattagagtgaataagtcttgtccttttaaaacaacttactgaggaacctggaagaagaagaagaattagaagagtcaggagagaagcaagagaaagaagaggaagaagtgggttcagggacaaagagaggaagaggagccgcagcagcagaagtagcagtttgggactgaatctgatcaaagaaaaagtttgatatcttagttgcagcagagccttgttcttctgactcattctgctgctgacttctccattgtttcagttgcaagtccatggaacaaagagagagtgagtgagagagagagaaagagagacagacagagaaatgtgttggttgcttttgggatagtttttttaccctcacttcttttgtttttagagagtctggcttaataagcaaagacaaccacaacaaaagtcttatttgtttggcttgtcatgtaaatacccaaaataaaaaactttttcttcttcactcttttgttagagagagctagagaaaagtgtttagactatgagacaagacagttgataggataaacaaaattagtatataatatttgattgataggtttaataaattgttactttatgtgatataaaaattatgtaagtcagaaaacaaagagagaaagcactgcaagatgcagatggagagatagtaacctgcagtgtttatgtctcactgccttggaaatatcacttcctttttttacctcattttaatattccttaagtaggttaaaaagatgcctattatgatattgttattatgtttttttattaaggattcatttaatgtgatgtagagtaaccttcaatttttgtcttacagatgtcatttgtctcagagattgtgttacaaatgtatgagattctaacttctaagcatgattaatcatttgggttttgactaaatagtctccatttgcagagagctacaatacaatctcagctctatttactctctttggttagtaagttttccaaatactttaccattttagtggtttaaccatatttgtcttttaatttgtaaccgtcattacttttctcatctgttacaatattattgttactcataaaatattatgtaacgtctgtgtttgtttgatttattaaaaaaaaattataacttccttatataaatgtagaaatggacatttatctttgtgttatcttaaaaagacatggctagctagtagtatatgtacatatctaaacacatcgaaaggagggaatcatattattaccagaaaaggccaagtaaacttggaaacatttgttaaaatgaagttagaaacatttatttgatatcttcacttggctgaataatacaaaagacatttatgattttcaaagtatctttatttggtggtgccaaaacaaaaaacgatagcattattttgtagttttgaggaaataaagtaataaatatgagaaggacgataacgatatttcatgtaggagtgagccacaaccaaagactatgatgactattgagagagtttcttgagttttcttttcattcattcccaccagtttcggcggcatttatatttgcactaagaaaaatataagaaaaactcaattccttaagtacagttcaatgttatgtacacttcatttgctgtaaatcttgtgaaccaaataaaaaagaagaggaatatcataacataacacccaaaataaactttgttttcaaaatataccataggttctttttgactttgtaaaattttcctttttgaaaaacaaaaatctttgtaacaagtataaagcggcaactgaatttaataaacattttacgtttttttttttagaatagaaaaaatatttcgcaaatggcctaaacaaaatattagcctctaaaatagaaatattttttgttgatacttgatagtataatggatcttgtgcactaatgatgggtcttaactaataaagtaataatggatcctgtgcactaatattttgggccagaacttgtcatataccaaagataatgatatcgaaggaaaacaaactgaaagcaaagtgtgaacgtaatgacatattgtatgtcttttttcaatcatgaacacgaacaaagattacatgcagatgcagtaatactaatggtaacaaaacaaccaaacaaatgttgattatctagactaactttatatatatcttgtttaaactttaacctacatggttattaggttatacatggtaaatgcattagtttaaattaccatactacatacatttttatatgttgctcatgttccaattgtttcgtaaaaccaaataaaatgacagaaaatatatagtattattcagtggacaagggttgggtcacgtgctaagattaagaccagatgagatcagaagagggcccggcccaaactctccacctactcacatagatttgaaaatcacgggagctgatccgaaccgagccgagctggagtaaagatggagccggacaacgaaatcataatctgaggaggctctctctttagtttccgacgagggcacagactgtgggtctcactatgtaatgtgagataccaaatatattcttttcactttttgaccaaaagttaccgtctgtttacgcactatgccatttacgttcacttacgatgggccgtaaataaaaagcctagtcacgctagcacgcgaggcctcacgtgccttaattattttcttaatgggcttcgtatattcctttaggaatgattcttatgggcttcttaaactctacgtttagcagtacaccaacaaaaaccgaaataagcaaacctcttagcagacctctaatttcttaatgtgcttattatattcaatttggaatgattcttgtggccttctttaactctatgtttaacaccaacaaaaatgttgtaagacttgatgtataatttgaccaatattttagtttcaacattattttgattctcctagtcagttgatattcgattataagcagagaagacacatgatctaaagtctaaaccaaaaaaagtcaagttaattagaagatgataataaaaccttcattttgacccactctttattgtaaacatgctacaatatatgttattgaaaccattagtcatatcgattgacaaaatacaacatatgcaatactatacaagaaataacataaatgtgacggcaaacgtagaataaattaatttgaagaacatgagagtcgttaccattcctcgaggatctgcttttaggcccactgttggattgaccctaccatgagatatctcgacgattctcaatccaagccgtacatttgtatgagtgttacgacgaatttatgtttggtcccctatcgccaccggttcttctctgtagcactaacgatcaatcatcatgccttttgttttaggtaatcatctatatgcttttatttggaaatcatttttgttatgttattctattttaattcagtactcaatatgaaaatttccaatctgtaaagttgttttttattgacctcgctcacaatatatccatgaataccttgtattgagaattcattttgtcatatgaatatggatatactcactgcaactctatctgtaacaatgtgaaaacaggtgtaaataaaggaatttccatagttagaatagattgagatagtatattttagcggcctataatgatttcataagctttttgttctcttaaatgtcttttatttttgtttgcatctttgaagctgtctcgggagtaagtagaaagataataaatgctgctcatatatatgattgggcagctatggttggcattttgccttttgaaattcagtaaagtgaaaacaaactcgttaaccatctcacgtatatgcttttctaaatttgttatatatattcgatcagattttaaattgcatgcatatgatcgcattattgtattgatagtctatcatcatatgctttttgtaatctatatatacatttttgcaattattttctgaaataaatcttcaagttggaacttatttacaaggaatatcattaacattaattatcatcaattaattaatatttttaattattagcatttccttatctaatatatctccatcaattctaattacttttaaaaaaaaaattagaactttattaatattatattttattaaagataaatattatagttatttaaagtttagaaaatatttagaatattttaacgaaaaaacgtttagaatatatattatatatgaaatctataaaattaaataactattagggacaatgtcccacatcggaagttgagtaggatcttaagtggtatatataagatatgggcctctcctcctattgccaattggttttaggttggaagcccacagtctaatatggtagcagagcccggtccgcacatactcaacccgatccacatcgggccggcccaatacttggcccgccgatccatgcccaaacatatcgagatcaatggctagaagagccatcatctcgagggggcgtattagggacaatgtcccacatcggaagttgagtaggatcttaagtggtatatataagatatgggcctctccacctattgccaattggttttaggttggaagcccacagtctaataataactatttcaaaagaaaacttttaaattgatttgaattataaatcttttaataaaaatattattagaacaaaaaataataatgtttaattttaccgaactggattaaatggtgggacatgtttaaaatattataatgtatggattttgtaacaattaaataaccatttgaaataaaattttaaattaatttaaattatatatcttttaaattaaagtattatttaaacaaaaataacaaaaacaaaatgtttaatttcactagacggggttagatgataggacgggtttgggtcgacagtaatacgagacggtatagcacgggtgaaatccattagatatgtttagtttcacggaacgggattagatggtaggacgggtttgagtcgatagtaatatgaaacggtataccacgtgtgaagtcgtagatataacaatcaaaatataattatattatcttaaatactaaacaaaacaattataaaataaaaatataattaaattttaaattatttagttataatctagattttaacttaatgaactgtacgttattgttcttatattttaaacagtaaaagttaaacatagtaattgtatactaaataatatacagatataagagttgtacattcagaaaatacaaaatattaaatcatatatatttttaatcgactaaacaaattatatttttattcttaaaagaacaaaatagttctgcggtgtacggtgtaccgcgagttaaaacctagtgtgttatatgatgataattgaagaagcctgaacggtgaatccgatccttaaaactagaccagagttagattggcacattgtgacaacactaacataaatcattatacattatctcgttaactaattgtttatttatgattacattctgtcatcgcattattattgttatgatgaagctgtaaattagtcttgatagtatcattagtatactaaaaactataaagtatctacacatttggcttttactttacagccgtcatctttttttgaaagatggatattggattcatttaaaattcgagaaaaacgccaagtggcaagccaaaaacttccaaatgaaaatactttagaaaacaccaaaatttgcatctacaattgaatgattcacgttcaaaagaaccattaaatgagtcctgaaattgaccgttaccgtattaatgtcaaaagaccagacgacaaaaatcaatacttagaaattaattagaatctttcatattattaaaaagaaatcgacgagaaaaagttaaacctaaatattaaagaacctttttttcaatctcctttgtttaagtattaaaatatacaaagttaaacctaaatatttgtaactactactaagcaactaataaaacatcaaattaaatcataaaataccctttttcaaatatgttaaaaaatcaaaacctccttgaatattcgcatccaaaccaaggattcacattcaaaaattcctcgtatcaattatcattcgcatatatatccaaacaaacccccaaatatataggattagatcaaggctaataatttgaaccaaacatttttttttgtattttgttgtatataaaaagagaaaaacaatctctagacgacacgtaattaaaagtgtattgttttgagaaatattatacgaacttaacggatacgtaaaacaaaccattaaataataaacccaaaaacagaaaagagagtgagaaagcaaacaaaatataaaagagtgagaagaagaggacagagagaagaaaccattaccacacatacagagagaaacaaacccactccattaaaaaccaaagctttaagcttagattcaatcccaagtcagtaaaaatagggttaatcgaagaaccccaccggaattccactgaggaattgcatcagtcgcgttcttgttgcggcttgaggaagaaaaagaacacctacactaaccaaaacaagaacaaggacgaattgaaaccgaagatgacaacaacgaatgaagctactacacagcctcctcagcagatgatgagcttgagttttagtagtcagatgtctaaagaagacgaagagatggctcgttctgctctctctgcttttagggctaaagaagatgagattgagaagaggaaaatggaagttcgtgaaagggttaaggctcagcttggtcgtgttgaggaagagactcgtcgtcttgctagtatccgcgaggtttgttttcattttttgctttttaaagtccaaaactttaagatctgagagattttgttttgagcttggtctgaaaattacactcatgcaagttgactactttctgtgtgtttgtcttttttctgaattgaattttgatactgtttatgtggttttagaatattagggttttgaaagatgtgaaattgtagatttggactcaggggatagggaaaatgggatttttttgtcctttttaagaaatttgatgatttgtgaatgatttatacagaaatggtttagctttgtaagcatatgattttgcatgtactcaatttggtgaacaaagaacaaaaatttgtgttttgagtaaatgggttttgtaagtctattgatatgtgaaagctaggatttggacatgaacttgtgcttcttgtagttgggtttacaagttctgttatcaggaaggtgtttaactttgtagaaattatcatgtttttgtttcaggagcttgagacaatggcagatcccatgaggaaggaagttaattgggtgcgtaagaagattgatagcgtcaacaaagaactcaaaccattaggctctactgttcaaaagaaggtaagtacacttgtcaaagagcagttgcttcattctcactacctgttgctatgaaaagttttgctctttaccaaacccaaaactcaaacctaaatgtcaactgaatcgatttgtggttgttatggtgttgactaaaagatttgatatcgcattagtcaactttaaagatttgtttttcaatgaacaaaacctgaaactcatgtttttgttttatgtgatgatatgacaacaggaaagggaatacaaagaagcattggatacgttcaacgagaagaatcgtgagaaagttcagctgatcaccaagctaatggaggttagtttcgagttgttggttatagttttgctgaacaatgagaacaaatccgagttttaccgcgcttattaataactgtattgatttgttttatgtttgcttaatattctccctggggagatgggacagttggttggagaaagcgagaagctgaggttgaagaagctggatgagctaagcaggagcatagacacagagagtgaatctatctcacaagacaagaccataccaatcaagaactaatttggtgtattttttctattttatttttacgttttggaatgttttcttagtttctgggtgttttagttttcttttgctatgatttgtgggttgatttgtaaaattatgatggggtttttcgtgtttttgattaaccattattgttagggaagggaaatgggataatgcttcttctgcttaggctactgaatgctaaaagggtttgtaagtttgaatttttttcttgctttgttttttctaatattattttatttgttatattgtttagctttattttaatttcttttcccccccaaattatgtttagctttttgagaaagtagcctctcgccgtcgagcgtgtgtggtgggtgttttgaaattgaaacgacttcttcttgtcaaagtaaatcatgaccttgacccacacaatagactcgataaattccaattattgttttcaaagacaaaaatgtaaaatgatattttagtaaaatggaaagaaaaacacttaacaaaatgggaaagatatgatatttggttgtaagatcttcaagtattcccattttccaaatattgttttcctaatctagcaaattccttattctttgaattacactaaattattcaatcgagctggtaagatagaaatattcgatcgtacaaaacacagcaatgtgctaatctacaaactatttggtagacatgatctggaaagcaaatgcttttttatttatgatattcagtggagaaccaatttagtatactttcatacagtaggccctttgaggcccatcttacacataaacagaatatcataaattagctgtgtattctcattacagcatttggcaataagctggcttttggaatgcttttgaagacaatgaaaacacactacagtcttgttcatattcttgtgtctgcaaattaattgagaaagtgtataactttcctatgtttctgaatcttgttcgaggctcctttcagcttatggttgtagcctcatatagcaattatgctctcacatactagtcatattgttgaaaaaatgaaacaggaacgcttggttcatactcttcatagacagatttttatgtgtttaaaagacgagatttcatatacgaatcagagaaccaaatacaataatttaggctcaagaagcggtaaatcaacagaaactgattttcaaattccacaagaggttcaacagaaataacctcaaatgacttttttatttgggcgtgtttttaaaatactcaattctaaaaaacaaaacccaatcaaaatcaaaacacaaatccaaaaggaaaatgaagaaaaaacacttataatccgataatgtcaagtagaaaaacgaaaaatccctagaaatatatccaggaagatgacaaacgtcacaattcaacccgtggacgatgctcagtacttgtaatccttcacgtgaaggctctcagctgctccatcaccaagcttagcgtcacccttgtaggttccgagtgtggcttcagagttagccttgcacctcacatacaacgcctcttgagctgccttgacattctcctctttacctgcccatgtcttcaaggtagactgctgcaacgcacgtccgaatgagaaagacaatgaccatggcttcttggtcttcaactggttcatggcgttcaagttcctggtagcttcttcctcgctctgtcctccagataagaagacaatggctggaacagctgctgggacggttctctgaagggcacggacggtgtgctcagcgatgacttcaggtgaaaccttggggctgtcagatccgggagtaaccatgttaggcttcaagagtgtaccctcgagcaagacgtggtggtcgctaagagccttgtagcaagctgcaaggacacgctcagtcacggcagcacacttctggatgtcatgggatccatcgactaggatctcaggctcgacaattggtacaagaccgttctcttggcagataacagcgtatctagctaatccgtaagcgttctcatgaatggaatgctcagatggctcgttctctccgatcttgaggactgcacgccacttggcgaaacgagcaccagcttcgtagtacttcttgcatctgtcaccgagaccgtcaagaccttgagtggtggtctcaccgtcggttccagctagctcaacggtacccttgtcaaccttgataccgggaagaactcctccttccttcaagatatcaacgaaaagcttacctgtacaaagaaaacatcatcatcaataaaaaacaatcacaaaaccacattacagagtaaaacattaagtaatagtattgatcaagttcataccatcggaactcttttggtacagagtctcttcgaaaaggatgacaccactgaggcatggaagagcaccaggggcggtgaagagaagctcacggaggttacgtctgttggtctcaacgttctcgacgttgatgctcgcaagacgctttccaatggtaccagtggactcatcagcagccaaaataccttttccaggtgtgccgatgtaggcagcgttggcgatcaactcatctatataggtttcaaaaatggaaaaacttaaatcaatcaatcaccataagagaacaacaacagaaaaagttccagatcgtgaatactaattagatccgtattaaaaccgatgagaacatagttagatctacgctagtttttaacataggaatcatcgactgattcatttcagctttcgaaaccaagctaagttcacgaatcaactagatctatacgattaaacacgctaataagaatcaaaacacgggataacgaatcgaatccaatacacgaatctaaacatgaataaagaacttaagagagatagagatcgagatcttaccggcgaatttgcttgtgaaggcagacatagttggacggagagatcgagaaatcagagagaaatgaaaagagatgcggaagaaggcagacgagtggtggaccagtagaggaaaagggttggttttatagctgcggatgagagtctattggttggtgaaaatattaattaagggtcagatctttgcatgttccccaagaaatagctttttcagccgttggatctctaattggcaatgttggctaatcttaattctaccccttaatagcgtggattctcagcaaattagctgaggggtaatttggtaactcgtagtgttatttaaggaaaagcatgacttcggccttacgacggcccaaaccgtcagacgaattgtataattgagatcgtaagataataaattacattaatcattgattatagtagttttttaatcgtaataaacacttaatagttgactacgaatctcaatagaatattcttattggaaatgttatgtgtttctagattcacagaaaaagtgcgactttgatatctccgaacatagaaaattaagatcttagatttagatagagacatataaccggaaaacagctgcgactcttcaaacgcatgaataatcaaaaactatcaaagtcttttgctttctaccgacacagtatgtatgtagtctagaacttttttgttgctattgttgttgtatacattttgaagttttaaaggtgtcttttaggatcttcaatggttttattgtttcttatcttttaggttcaagtgattataaaatgaaacatcttattattataacaaattatgagatttttacacgtattttcaacatttttttaatatgtgtatataattttttaataaaacctcgttgacaaataaataaattttaaaaaactctatgacatactaaaaataaaatatgattataaatggaaacaactgttacgatatgccataatatcttaagaaagaaactgatatagaacatacaatatttaaaaagaaaataggggaaaagaaggaaatatactaaaaagacaaagaatatatgtatattgacatgtaaatagaaacacggatgtgtatggtccatttaaattgtctccaagtcgattaagatggtacatctagaaacttcgtaatcgtcaatttctatttttgtgataattttccattttctcctataaacatatccatcagcattatcatttatcaacaccactctgttcctctattagtatttttctcagttttacataagtacaatattactttatcatgacattttacatcaaacaaatgtcttttgtaaaatctctggtttttaaacaacccaaaaaataaaatccgaaaatgctgatatcaatgctaaaataataataaggactgaagttattctcaaacgtgtactacaaagtttcactcgagcattgctaaaataaaacaagattatgaaaaaataagacacaagaggatgaatctgaaaggattcatgacttggctcttggcacatctaataaacataaggaagtattctccaggggacaagtctaagatactctgcccatatctccttgtacttctctgcacatcgaacctcgtctcttcgttctctccatatcaatagtatcagaaggtatatcgggtagaaatatggaaccggagaactgagaatacacaagacaaaatatcataaaaacagctttgggaaatgaacttgaaagctttagacttttcaaatgatggttagagatcaatatctttaagtcagccaaatcaacttcgaacgttttgatattggtattagtttctacatgacttttggtagctgtaagatgaactcaagcagaagaagttaccttattccacatggcaaactgaaggacagagcaagcatcaagtcgccaaggtaattacagtgccttgcaattcccctgtcatatatacaaaacagcacctaagttatcggaaatgtgtcattgcggaactttcaactctttattcccagcatgatgaacaatcaaacacagagatggcgaaaccaagcaaagaaacaagagaagataaatataacataccaatagcctgaaaccagtaactttccaccaactaccactggaggcttgccccatattggtgtttttgggttcttcttaaagatatgtttttgtttgttagctcctcgaaaaaccatgtacctgccaaagaagaaatagtgggtttcttagtgtagatatgtaagaatggaaaataacccaatgtctcagaacttaccctatcaagaagacaaggcaattgactacaatcgcaggaactgttagttctactttgttgtgcaaaagccaccagccctgtaccagagagaagacaattcagtcacagagtgatcaagcattctagaacaatattgtttccgagaataactgtaacatgccaagaagatactgtcaataagataaattaatatcttgtttgtgttcaggctcacagttacatgcctgaatgctaaaagtgaaaggaatccacaggagatctccaaacactagcatgaagcctagtctctctgcaattatgtcccacctgaaaagagtaaaatcaaagtagatgtaataatgcaaatggtcattttttggtaagacaaatgtgtttccttaacacgccatgaacttacgtagaggtcatgtattcttcatgaacaaagtagtccaatatatataactgcaattataaaactaatcaaaactaacaaaacacagatgatcataacttcaagaagcaagatttgtaagtaaaaaccaaatttaccgcacagaagatctggtaaagaatcatcgactgactcaaggaaccatcctgcacactttttgccagaatagagagattgataagcagccatcccatcatcccggctctgacaaagaaaaacctacacaaggaataactcccattcatcataaccatgcataactgctgattacattattaaactgccactcgattgagtacggagcaaactgaagcaatgatgtagccttggctgacaaatagaagaaaaaacagaaaaatggattacttgagatcaatgctcataaactgaggattcagctgtattccaaaccacctatcacatgaaacaaacaatatgagaaaaaattgaagcagttgtttggaagagataagtgaaagacaaaaaccagaacttctagtttcagtagaaaagttcaaaagctaaagtcactgcggttaaaaggaaaaaagaggaagctacaaccgttctaggagaaattactcaacactctacgaagttctatagaatcatcttgtccaattcagtgtttcaaactctatatagtaccagattatttcttagttttgctcttgcaggagtcaaaatatataacttttaacaacattttgtgtaacaagaaagtatcagatctacaattgtattatgttagtaccagtcatgtacaagatttcctgagacatgaggctttagggaagaacccttattcgaggaacttcgcccagtaacatacaatgctaatgtcacctgagaatattaagagatatcatggagattacaaatcacaccaccaaaagcaaatctgatggtaacacaactaaaatcaagacaccggactaaggattgaatcatcttaccaaaacacagaaaataaaagtagctgagagtaactcaagtcctctatccgcaaccacctacaaaacatctcagtggaatgagtgtgagaaagcaattgcaatcggattcatatagcatatagcattcggattcatagaaatacaatcgaaatcttgtaactacacttacaagaggtgatacaatgccaagttttgcacagattcccaaaatagctaccaacaatattagtgccaatagacctgaaattgaattaacaaaactaatggaaatgaactttcgagctcacagactctcaggaattgtagagagagtaaatcaaatcaaatataccattgcatcggtaacgaagttgagagccatctgataaaaggacgccgcgaataactttcccggggagaatttctccggcaacggccaagtaaacgaagtaaaacaccagcacataaacctaaaatctcggaacgaatttaacaaaagctgatcaaaagcgaacaaaaatttcacaataacaattgcaacagtcaaaagctaaagagacagctcacagattgcaatgatggaagaagaacaccgagatccatatctagcagcattaagcagaagaaggattttcaaaggagaagatgaagcattcgaaatcgtttgtatcgccttttctcgctttgtttaatttcagatgacagaagcaacaattttcaattttttagtgggaagctcgtggactctgatgagctagctcacttgtgtgattcgggaaaattaccaaaaagaacccttaaactcttcatttgttgcaagtaaagccttaaactaatgattgtttatacaaaaaaaaccaatcactaaattctgccaagcacaacttgagcctatggcccatgggatggcctggccagtctcgcaaacgactgtcattttaagatagctacatcttttgggtttcttttttaacatctaaattttagattgataggacaatgtctttagagaaaaaggttaatgaatactagtttctcggcaatgcgattgttatgtcttcatgtgtatatcacctcaacactggataagagtttgaaccaaagatggatatatcaaatatctagttttccatctatgtgttctcttttctaccattgatcaagtccacgagttattgatgaaagcctttttccactatggtccatctaaaaccgcagattcacaatgtatgcaaagagtgaaggaagctaaaaccttaggctaaagcttttgtttactattaagatgctgccattacataagggtgccgtaatggttccgaataatccatctcgatctagttctctcactttggtcgatcgcaaaagcttgcatcatggttgcatttgagccatccaaacggaggaggtatctacttggttccattaatcggtgttgttatttccacggatatttttgcattaaacgtctaccttaaaggcttaaacgtacatagaaaaatctgcaccgatcacatttcactaaaatatttttctgtcaaatcacatgttggatggtgtaactggtaagttattaaaagagggaattacatgcgagtccacttgtaacaaacagttgtgaggctcgacggcaagttgaccagaaacaacttgcactgcatctatacaatttttttttgctttattatttgacaatttttccatgtaacccacacaaatcatatttatttgaattaaaaaaattttgtatttatgttagccattaactcttctagatacaagagagaaatgtcatcaaatttcattgtttaaaaagaaagggtgatttatagacatttatcagaaaaaaaaaaaacatttttgcttttacgaattttatagaaagaaatattagtattatatttaacatttttagtcgtcgattataagaaaggaggtggcgaaccaccacacacgcggaaacaggaacaaccaatgaaaactcgataaatggcttaactcaattgttaagagccgtttgttttttggcaacaaaagtgctcgagagagagaccttgaagaagaaagaagaaggtaaaccctaaattcccaatcttcccacataacttctgctcaaatccttagggtttcaagttgtttcatttccctcgtccgttaaattcgaatccttttcgtgtatgttgcatcgtattctcagagcaaatcgtctttattgtgaattgggttttattcagattcgtgctttagatgaaatttcaatagtttttgaattaaaggttgaatttttcatttgcagagacgagtttgatatctaaaggaatcatttttgacggatttaggatctaagtaaaccctagattgaccgaatatgagtactcaagcgacgggtccttcttcaacatcagggaggagaagcaattctactgtacggcgaggaccaccaccttctaagaaaccagtacaatcagagaatggaagtgttaatgggaacacctcaaaacccaattcacctcctcctcaacctcaatctcaagctccttctaatggagagagaacagtgaagaagcttaggttatcgaaagctcttactattcctgaaggaactactgttttcgatgcttgtcgaagaatggctgctaggcgtgttgatgcttgtttgttgactgattcaagtgcgcttctttccgggattgttactgataaagatgtagctacaagagtgattgctgaagggttgagaccggatcaaactttggtctctaaggttatgactaggaatcctatttttgttacttctgattcgttggcgcttgaggctcttcagaagatggttcaagggaagtttagacacttgcctgttgtggagaatggtgaagtcattgctttgttggatattacaaagtgtttgtatgatgctatttctaggatggagaaagctgcagagcaaggtagtgctttagctgctgcagtggaaggtgtggagaagcaatggggaagcggatattctgcaccgtatgctttcattgaaaccttgagggagagaatgtttaaacccgccttgtcaacgattattacagacaattcgaaggttgcacttgtagcaccatcagatcctgtttcagttgctgcgaaaaggatgagggatttgcgggttaactctgtaatcatttccacggggaacaaaatcagtggaatcttgacttcaaaggacattctgatgcgagtggtggcacaaaatttatctcctgaattgactcttgtcgagaaggtaatgacaccgaatcctgaatgtgcatcgctagagacaacgattctggatgcgttgcatacaatgcatgatggaaagtttctacatcttccaattatagataaagatggatcagctgcagcttgtgtagacgttcttcagattactcacgcagctatttcaatggtggagaacagttctggagctgtaaatgatatggcaaacacgatgatgcagaaattttgggattcagctcttgcgttagagccacctgatgattctgacactcaaagtgaaatgtcggcaatgatgcatcattcagatatagggaagctcagttcttacccatctctaggactagggaattcgttttcgttcaaatttgaagaccttaagggccgtgtacatcggtttacttctggagctgaaaacctcgaagagctgatgggtattgtgatgcaaagaattggcagcgacaataacaatgtggaacaacggcctcagattatatatgaggacgatgaaggtgataaggttttgattacatcggatagcgatttggttggtgctgttactcttgctaggtctacaggacaaaaggttttgaggctgcatctggacttcactgagtcaacaaggagcttgagctcagaaaccacccaactcaagaaaggtgattctcgagacagaggaagcggatgggtttcatggcgtggtggtgtggtggttacaggagctgttgtcctaacaagcatagccatagttgtttacttgaagcgttcaaagaactgatttttgctgaagcaaactgtttgggatgcagaacaaaaactctttttctcttaattttttggtaagtttcatacagtttgtctcttgtcttttggggtcacatgttttgcgaatgcaaacagaaaaaaaaacaaaaaactttgtttccctatgatattaaattaatggggaaaaaccttattcagattactctatttgacagagtttatgtaaaacctctgaaaccgggaaaataaatcaagggaatatcattgcactgcagattctggtctttgatataagtgaatatgtgtttgcttccttcttgtgaatgtgtttgtgtcactgttccttagagcgattgttgtgtggatatgagaaagacagaggaacatatggaggaaaacacgtgtgttatctatgaagcttatctatcaatattacatggaatttgtgaatgtgtggttaggttgcatatattaagcaaaccaacaaagaaatcacaatctcgacacaaatatattatagttatgagaggtctccaaacataatgataagaggaagatacaaacgtttattaagaaggttatatttcatatgagtgacatcaaggcaggtttgcccgagaggttaagggggaagacttaagttcttctgcacataagtgcgcgtgggttcgaaccccacagcctgcatttgtatttttttttcatttttctgagacaaaactgagatgtgttttttttcgtccccttaataaatttagttaccatcaaggatttgtgttcaacatttaagaagtcttatgagagatttgtatagaatttataaatcctacatttttaagaagtctcatgaaaacaatttgtggatttgaatttttaatgattttggaggatttcctgtattaaaaatatagaaatctaaatctcatagtttaaggtgagatttgaatagattttacaaaaatcatgaacttccctaaaatcatcaaaatcatttaaatactcaataaaactcaaatcactttaaattctaatttgaatacaccccccttagtgtctattaaattggaacgaatttgagaaacttagaaattaagttcatggtaatctttagatttttaaccatttagctctttccacgtacaatgtatgcttttttgttttcctttctcaaacataactgcatcaactgatttgtagagctaaagtagtgtgtatatactatctataacttaatttatcctatgaagtagaagttgaataaatttataacaaggtaacgatcaaatgtttagaattaggatcccaaccaaggcctctccatgtagcaaaacaaaacataacctaaggacgagtagaatatttcacggtcgatatcactgaaaatcacgtaagacaaattgtataggtaatgcattttgtaaaatcaactctttcattttttctggaagaaaaacaactctttcattaatatgatatttacaatttagcaaaagaaaaaaatggatagttagaataatagacgcatatttcttctcagctatatagtattcgaattgcgttgaaaaatgaattggttttttttatcattattgtcgattgtcatcagccatcactaaaaatgattcacccataagctaaaaaaaaaacaatatgatactcaaaacttgcccatgtgaaatagaaaatctttaacatcttacacatcatgacataaaagcctccaacatgaataaaatagttagtatatctaaacgtcaagacaagcgctcctgatcgaaccaagtcttaagcatatacaggaacaaaccagaaactttttgagcaaacgtatcctttaatgatgtcatcataagcgttgccaaaaaaaagaacatctttgattgtgaccccatgaccaaatatcaacaactcacctccaagagaatgtactctttcccagttactactttcaaaattcatcttgaagatgtaaaacaagcgtgagttttgtaaccgtttaatgctcacagcgatcaaaacatccattgagttcgtaatcgcaatcctcgtcttcccaccgtattccccaagttggttatcaaagcaaaacggatggtcacggtacgggtttccttggacgatttcttttgggaaagctccagagaaatcaagtcttgatgtagctatcaattgtatacacataaagcttatcgtctttataagtcatgtgtgtacaatatatgtcttcaacattccaccaataatcatcttcattcttgtatgtgaacaaacagttttcttcggtaatacaagctacaacataatcctttgttctctcgtttatccaaaaacaagccaaatttttgagaggagacgtcaatttggtttgttttcctttatatgacttcattgatggaagattgatcatctcgcgagtaaacacgttcaaaagatataagaaatctaaactaggatcattcatcaagagccaactactccaactagccataacaaagcttttcaataaatcaaatccaagacattctacttcgaaggagaattcgcgatcttcactgtgatgacccaaaaaagtaccatcctcgtcgcgcataagttgccatggataccatataggtcgcgtacatgatcttgaaactaaataccattgtgagcaaacgctcctcgctcgatgataatccttagtctctaatccttcaaagattgatctcaaaatatcgaaacaaaggttggaccaatcactacgaattctagacattctctccgtagtgcctacgataccaatggaaacctaatttgttttttttttttggcatcaaccctctttaaaagcaaatatataaatatcaaagccttaggaacaaggcggtgaaaacaatgtaggcccattaaggcccaataacggcgttaggaaattccaaattattttgaaaaagctttccgatttcacgctcttttcctcttccctccaatctcattgtgtccaccattttttgcatcaaccctatttaaaagcaaatatgtagatattaaagaatgcggtgaataatacaatttaggcccactaaggatcaggcggtgaaaacaatgtaggcccaataatgacatagcctttcatctttctctactcaatccaaaacaaacctcaagtcacacactcttcacctaaacagcatcaatggcgacttctctctccgtttctagattcatgtcctcctccgccaccgttatctccgtcgctaagccgttactttcccccaccgtatccttcaccgcgccgctctccttcacacgctctctcgctcctaatctctctctcaaattccgcaaccgccgcaccaattccgcctccgccaccaccagatccttcgctacgacacccgtcaccgcctccatttccgtcggagacaagctcccagactccactctctcctacctcgatccatccaccggagacgtcaaaacagtaaccgtctcatccctaaccgccgggaagaaaacaatcctattcgccgttcccggcgcattcacaccaacatgctcacaaaaacacgtccctggattcgtatccaaagccggagaactcagatctaaaggcatcgatgtaatcgcatgtatctccgtcaacgacgcgttcgtgatggaagcgtggaggaaagatcttggaattaacgatgaggtaatgttgctatccgatggaaatggcgaattcacagggaagcttggtgttgaattggatttgagggataagcctgtgggacttggagttaggtcaaggagatatgcgattttggctgatgatggtgttgtgaaagttctgaatcttgaagaaggaggtgcttttactaatagtagtgctgaggatatgcttaaagctctctgattcttatgattttctcatcaatttcgtcttcttctctgttttgaattttctttactctgttttgtgttgctgtttctttaaatctacgaatcattatcggatttgtaatggaataatgaagttagaggttctgttgtttgtgaacattttagaaaagcgttgtgtttagttttcggatgttactacttttggttaattttttctcttttgacttttataattttgattgagtttaggtattaacctaacacttactgatagtttgtcacagtgacaagttaatataaacatgtaatgaaaattttccacttaaaaattcatgaaatagagctattaatttctagaaaaagttaacttatcgaagtcgggttctctgaaacgtgttgctgatcaccggtcggtcagggatttggtccggagtaagtcttatgatatggagaggttttgaccataaaatcctcttggtaaaacattagtaagataccaacccaaagacctctccaaaaggcacgtttttttattattatactacttgacatgatcctttttttttcctcggtgcatctttgatatgattatcttaagtttaaggagcataatgaattaccttttcaattgatctatgtagagtaatggagattggagaccaacaagcaacaatcctgacttttggaaaggacgttggggttggttgctagttggatgccacgtctacgtgctaacgtatgcattgatgcacaaatagcgaaaaactttagtttatatccttttttttataacaaaacagacaataaagcccaaatgtggtcagcttcactactggatcggctatgtcagtttaccgaatcaaatctcccacaataacgccaaattattcttagatatttttttctttttcttttgggtacaaatatcggattgctttgatgatttgaagtgttcaagtacactgtacacatgcatgtaaagaaaacaaagagaaaagaagaaaagaaattaagtccctcgataaggaattggaatggcttccaaaggaacagcttttttcaatgttataccaatcctttctcccatatccatttcttctgcattaagcccattttctaaagcccaatcaaacgatctcaccattgacccaatggccaacggcaaaacccgtgatgccaaaggcaaagctggacacatccttcgacccgacccgaacggcaagaactcgtaatcttgtcccttgaagtctcgggcgtcagggtcggatataaatctctcgggtttgaacattatcgggtcgatccatgttttaggatcgcgtccgatggcccatacattgaccaagacttgtgtttccttggggatagtgtattgatcgaagatgtgacaagttgacatggctttgtgtgggacgaggaaaggcagaggtgggtgtagccttaaggtttccatgataacagctgagagatagggaaggtttggtaggtcttcttcttggagcttttggttcgaggacttgaagtaggtccggagttcggtttggagtttggtcagtgttcttgggttgtgtagaagctccgctagtgcccactccaacgtgctcgttgtcgtatccgttccagccgtaaacatttcctatcaataaactttattaatttgtacatatgattgtaagaatgttggtaataattaattaaggtatgcataacttacgaaaacaataacgttgatatctcttgatgagaagctagaaggttcttcgtcgactccatcgccaccacgaaactccaaaagaacatctaagtaatctttcgtcttctcgtcgctcttttctctctccctaacctccgttcgttctctgatgaactctccggcgatctcaaacgctttttccacgtggaattgcgtttttctcctgattccttgagggtcaagaaaccttagcaacgggaagaaatcggcaacgtttggttttccggcgaactccatcactttcccggtgtggtaaaagaattcggatcctctttttgaatcaggatcaagcaaatctctcgagaacatgaggtttcctatgagattaaatgccatcaagaagaaatatctccccacatcgattgtttttgtacctaataagaaataaatatgtagagttatgatatatatatatatatactgttaatatttatatatatataatacacattttattttttcaaaaaaaaaacacaatttaattataggttcaattagaatcaacataaagagtcatattcagattagtattgttgatgtgtcacattcggatctaagcctacatataatgcatgtcataatgttgttgatagtataatacataccgttttggccaccttcctcgacaaaccgaagcatctgatcaacacacctagagcgtacatcactcatagcatcaagacggcgcgtgacaaagaactgagtggtgcaaagcctccgcagcatccgccaatacgcaccatactgagccgtgatgagcgagccgtcactactcttccctcctttcatcgcctcgtaaatcttccggccagccaaagctgcgtcatgcttcttgaagatctcccgagccacttcactcgaagagatcacaaccgtcagcatcgacccgatccgtaaagtcatgattggcccgtgacgccgtgaaagtttagtcaatgagtcgtgtggcggtaaaccagcgagctggaaaatgtttccaatcaccggccatggatttggtcccggaggtagtctcgtacgacatcgtttggtgtagaagagacatgtaacgtatatgaggacggcaatcgatgtaaataatccgattaactcgttctttgttaattgattaatcattctttttgttttgttctgaatatgagtacaaacgtttctactatataggtatcaaggtttcgtgtgaccttttcctttattcacaagtttcgtgtttcttataaattatgaaaatgctaataattcatgattttgtcgctattatgttgggaatctttaacggatataatcgctttaacaaaaaatctgttgcaacttgtaaggtcattatattgtaagcccattaaagtatccgatgatagtagtaagtttaagtgggacaaaatcagaaggcccatttgatattcttgttgaaacgtatgagcgtttttggtggatctgcagtaggaatttgaccattccacatattttagagcacaaaggtttaagtaatttaagtatttaacgaccttacttttgagatatgcttttcaaaatgatggaggaaacgaaacaatcgacgcatagagaaaaccttaccagttaccacaacatcaaaacttggggaaaatatcgacaagaacattcgaatcgtatcactttgctttggaactcatgaataacaaaaatatgaagacctattcatattttttggctttccactacgaattaaattataaaacaatacaaaagattcaaaacgatgcactacacaaacagtttttcaatagtttttacattcattcaaaaaaaacttaagtatttaacatacatgttcttaagcacaagattagcctatcatattcattttagtttggaccgaaatttgcccatattccattatatatattattatatattggtttcattttcataagtatggtacatgttacagaatacgtatctccattccaattttgtggagatccaaccaatgtatagataagatatgagaagagtcaacggaaatttaaattctttttttttttaaaagtaaatgttttagacatgaattaaaagagaaactaagtcagacagatctcgacaaaatcaccacaaattacagtagttacttatttgctatatttagtagacttggtttacatatgctatatttggcaaaagtgtgtaagcaaatatcaaattcgaagctaagtcagaaagatctcgaaccaaattcgccgaagatcacaacaagtttttttctataattgacttcattgtgtgtatatatatatatacaatatatgtataagagttgtgtatcatatatatgcaaagtctacatagatatacaatatctaaaactatgaaaacattgtacaaactagaaaaaactatcaactaaattttgataactatttttttttttttgaaaaagactaactatttatcttgttgaatagttttagttttcaaaagaaaaatattctagtttccccaaaaaaaaatattcatttacaatgctaataaaaccaattaacaaaatgtgagttctttatcccaaaaaattttagagtctagagaagaaagaaaaagatagaatgaaattcagaaagaaaaaaaacttataaaaatgttaaatagaaatcaaaagagataccaagtcagagagatctcaaattcgccgatgatcacgataataagtttattaactatatttggcaaagttgagtatacacatactcacatgtatatatgtataggtataagagctgtgtacactatatatgcgaaggagaggcaaaagtgaagtgaaaattaaggttgttgtcttttatccaaaaacaaatattattgtctaaccgttttgttcttttttaagaatgttggttgtgttctattattcttgtttacaagtggtgatttaaacagacacacataacaaaaacataggagactgaagaagaataagagagtatatctgcaaacaagaaaaaagtttggttgcctgaagaggattcaacagctatatggggataagagtgtctcagctttgattgcttcatttgattttgtttatatttttcagcaaagacccttctttcttcaattcccaaagaattcttatttacaggtatcaatttctttacatcttttgatcatcattgttatattttttcttctaaattgtaataattttggaatagaactgtttagttttttagtctctattgaatttaaaagtaaatggtaccaaatagaatgcatttaaataaagaacgaagaagattatttgggattaaaaaaaaaagttgttttgattacatatcgtttgtaatgtgtaccctttctatttgtacacattacaaaatgtgaagtatgaacatgtgcgttcatgagtgagatctactctttggtttcttattatatgttacttatgatttatctttataggagtttgacttatccttgttgaaataattaaaaaaattgaatgatttgctatgtagggtgtttttgggttgtgaaacgttagagatgaatttcacagaagctatgaatgttgtgcacaacagaatccatcaacttgaaccagagaatgcatcgaagatcataggttatctcttgttgatgcaagatcaaaacgaccgtgacatgatacgtctcgcattctgtccagattcggtgatgcgttctatgatcaactgtgttaaatgtgaattggctaaaaactctcattacaataacatcccttcttctgatcacattcaaatccgtaaattcggatcattatccggttcatcaaaccaatctcttttggtttctgcctctcctccttcggttctctctatgggaacaagtttttgggagaatacaaacgatatggattcatcattgaaagacaatgttcagtacttcttggattttgaggattctgtgaccagtcctgaattctcaactagtttcttctctcagaagaaacagagtttgtctttaagaactagtcgaagatcactgagtttaccagagtttcctctcaaaatctgccattacttcaacaaaggattctgcaaacacggcaacaactgtcgttatttccatggaaaaatcataccgtagaaagatagttttgcgcagatgtttaatccaaaagacaacaacctaagcgacgaagagcatgttgtttcccctggatcacttgagaagctagaaagagagatcattgagctgcttaaatcaagaagaggtgctccaatttccatagcatttttgccaatgatgtaccacgagaagtatggtaggagtcttcaagctgaaggatatctcacagagtcacaaagacatggcaaagctggttttagcctcaccaagcttcttgctcgcttaaagaacaccatccgcctcatcgacaggttagttacttagtcacgtaacacatattaacaaatgaatatacgaggaagtgtagtttatgcattgttttgcttaatggtgtttgaattgtaggcctcatggacaacattcagttatactagctgaagatgtatcaaagtttgtggaatatacgggagagagaagcgaacatggagcaatcttagctggttcaaggcaggtttacttgacatttccggcagagagtagtttcactgaacatgacgtttcaaactacttctctgaagttggaccagtggaagatgtaagaattccatgtcaacaaaagagaatgtatggatttgtaacttttgtttatatggaaaccgtcaaacgcattcttgctaaagcaatcctcatttcatatgcggagcacgtgttctcgtcaagccttaccgagcataattaggttcgaggaaattccaaaaactgttatcacatcatcgtctttgtctttggggttagactgtttggtcggatggcatgggccatggagttaggttttttagactatttggtttatgacagtgggtgagacacaaaacatatataaaggatctgttttcaggtgagcaagttaagaaacataaggtgcatgagttatctcttattgaacgttttgatatttcattgtatcatatgacaaatccttctagttttacgaacaatgttagaaaaatgtatgggtagtttcgcctacttaagaaaatatcgccatatcaacgatgaatagtctgtatgatcagaaacttatgaatgttgaacacttatatattgtacaatgaataagagatgaataacattgaaaacataattttttcgctaacaatgaaagaaatgaatattcaaaaaaatatttcatcgtgtcttgtgaaatgtagttaattctaaggttataaaaccaaaaaaaaaaattgatctggaaaatatacctgaacaaaataatagcaagatttgttaatagaaagaattgacaacaatctggaaaattttatagcagtataaatagatattaaatctaacgcgagccaccatttatatttcattcttcttctcgtgttccattacacatgcgatacgtagttacgtaccagaagacatgtatctgccgcgcattgtgagcgtttggatatcacctcctagcaattaacactttagccgaccaaaagcttgcacaagcgcaaagagatgcgcgtggtgattacttttaccccttctccacgaaatcaaactggtaaataaaaaatcaactacgttaataaagatcatccacgtggctacgagatgtttacgattttagtcctttaaaatttagattattgcagatctagtttttacggttgtacacttcaatagttttaattcgtttccagtccttacattctttttaacttgattttaatttaaggtataatttggatttcattacctaattaaatactaaaatgagatatgaggttgttaaattgttttctgtttgctgacaaaaataaacaccattttataaaatctggattaaagttcaaaatttagcaacaactatagatgtattatttctatacatatataaccatgccatatgttgagtaactaggatttaacccgcggattaccgcggacaatcggtttatttggttcttatactaaatatttgaataaatatgatattttaaacatataaatataaatttctagtgattagtgaaaaatcgtaatatataatttggatattattgattattgattttgtgattgaatatagtgtttttaaggatggaatgtgattatattttgatttaaaaaatgacatagattctttatttttgttgaacgatttagattaaagggaattaattttattgaacggtttagattgaatcggattatataaagtttaggagattgttaagaccaaattacccttaatgattttgaatagcaaagaacaaaattcaaaattgaaataaaaattgaggctaaattagacaaaattttaatttatatttcccttttaataataaagggatataaatatggcaataaataaaaattgatataaataaagagaaaaattaatttaaattgaaaatgttcaaacaaattcataacctatataaaataacaaattgcttttactttctacattagtgatggtaacaaaaatcaaaagagaaaattactagggtttaagaaaataagaaaaacaacatagggtataatttgaattaaattgagaatgtttaggttaaagagaaaataaaaaagcgtcgacttgttttcttttttgtcgttgttgttgttgtgagcaacttttatttatttatttgtcttccgttgcgtgagatattattgaacggtgtttgttattcggagaagaagaagaagaagaactgaagaagcatattcgacggtcaccaccaaacctcttccgtcggattttcactctccgtttatcgaacatctgagatctctctccacttccgtcaccgaagatgcattccagtcatcttcttctcgaggagccgatcaggatggcttcaatcctcgagccttccaaatctgtgagctctctctctctctctctcagcttgataatttagtatcccagttcttcatcgatttgcaatttcgcatggattcgattttgttgttgaggttgtttctctgatctctttttgatgtattttctcagagtttcttcccggcattgactaagatcgtcggaactctaggtcctaaatcccgatccgtcgaggctctctccggctgtctcaaagccggcatgtctggtactaacgatttacttctcttttttttttggggtttgctaacttgatttgtgttcggtctcactgataactgttcatgttctgtcatttagtggctcgatttgatttctcgtggggagatgctgattatcaccaggagacacttgataatttgaaagttgctgtgaggagcactaagaagctttgtgctgtatgttttctcttctcttatttttttaatctgatggatcttttttttatgtgctatatgtatttgatttgagatttcttctgcgtttgatcaggttatgcttgatactgttggacctgagctacaagttattaacaaatctgagaaagctattactttgaaagctgatggccttgtaactttgacaccgaatcaagatcaagaagcttcttctgaagttcttcccattaatttcaatggacttgccaaggttctctatgacctttgtataatgagatgacattatatatgtaaacaatggtttactgtttactaatatagacgtgtgatgggtgttcttgtttgatgttttcaggcagtgaagaaaggagacaccatcttcgttgggcaatacctattcactggtagtgaaacaacttcagtttggctcgaggtaaaatatatgaagctgtctaatgggaatttggtggtatctctatgttaaagttttgatttttatatgtgtaggttgatgaagttaaaggagatgatgtcatttgcctttcaaggaatgctgctactctggctggttctttgttcactttacactcctctcaagttcacattgatctcccaacgcttacagagaaggataaggaggtcagttttcttctaatctccaaatctcggtgattcacttcctccctttataatatatatttttaatcagagtgtttgaccagattgttttgatttggttatcttctaggttataagcacatggggagttcaaaataaaatcgattttctctcattgtcttattgtcgtcatgctgaggatgttcgccaggtctgtattattaatctgcctttccgttcttgtgtcatacttctatgtgtatcagtgtatgcactattaattctgagcttctgataagcctgaacaataaccaatttttgtttcataacacagacccgtgaaatgcttaaaaagttgggcgacctctctcaaacacaaatatttgctaagattgagaacgtagaggtaagtgctatgcatttatttattatgtatctgtaatcttcctttttcttaagctgctgacattgaatttatttatttatttagggactaacccacttcgatgagattctacaagaagctgatggcattattctttctcgtgggaatttgggtatagatttacccccggaaaaggtatgttggtggttagtcatctaaattaatttgtgcggcaccaaaatttatactcttttataacttacttggtgggttctggtgcaggtgtttttgtttcaaaaggctgctctttacaagtgcaacatggctggaaagccagctgttcttacccgtgttgttgacagtatgactgacaacttgcgaccaactcgtgctgaggccacggatgttgctaatgctgttttagatggtatgattatccttgaatatacttcttttaacattttatagcagaatctacttggtttggttagtattgtgaaatgatggaaggaaattgtcataacttgaggtttcgtcttccattttttgtcctgcaggaagtgatgcaattcttcttggtgctgagacccttcgtggattgtaccctgttgagacaatatcaactgttggtaggatctgtgctgaggtaggctttatgatatatttctttagtatggtttcattgcttgcgtctttaaatccccacacatcttgcaactatgtggaacctagttgtggcttgtcatccgatctgctcttatacaatttctttacctgttcgtaggcagaaaaggttttcaatcaagatttgtactttaagaagactgtcaagtatgttggagaaccaatgactcacttggaatcgattgcttcttcagctgtaagtctatcttctgtgctgcagagacataagaaaggattataatttctgctattaagacgcaaattgctatcacaatctctaatctgggttaatacacacttgatcaggtacgggcagccattaaggttaaggcatccgtaattatatgcttcacctcttctggaagagcagccaggttcatataattccttttggcttaaactgttatgttcctttgatctaatcatatttgtctaatgaattgttattcctttgatctcccatgcagattgattgccaaatacaggccaacgatgccggttatttctgttgtcattccccgggttaagacaaatcaactgaaatggagctttagtggagcttttgaggtatgttttccccactggtctctcaagtttagagattacattcacgccaatctcttacaaggtcaacgtgtgtgtctcttatcaggcgaggcagtcacttattgtcagaggcctcttccctatgcttgctgaccctcgtcaccctgtaagtcttgttatctttcttctattgtatattacaacttcctctcaatttgagaaacaaacggtctcaacacttgtatcatttccaagactagtgtcttagagccaatatcatctctttaagtgttttaatgaaattttgctaattcttaaggcggaatctacaagtgcgacaaacgagtcagtcctgaaggttgctctagaccatgggaagcatgctggagtaatcaagtcgcatgacagagtagtggtgtgtcagaaagttggtgatgcatctgtggttaagatcattgagcttgaggattaacttttgcctcgcaaaaacattatataattggctgcattttgggttgccttgaattgatgataactcccaatgccggagtgaaaatattatctccgggacttctggtttctttttgtatacttaggagatttgatgtctctaaggtttcagctatatttgattaccttcaaatgtacgcatatgataaaagtatacaatgcctagcaattttataataagctgttacattccctattttttcgttctattacaaaattctatcctatttgactgttttctcttctctcttgcaaacaaatatcatttttcaaaattaattattgttttattttctgtttttttgtcgtcaaatgaaattaaaatagaaaaaattggtggttgataattatttttcatttattttacagaatttggttctgaaaatatctttggacaaaaaaaataaaaagtaaaggcaagacaaaacataagaaaaaaccatagtagagttacaacaaactctttatattctgaaattctgaatgacatgatacaagagtcattttggttcgctaagttgtattaaactttgaccttatacaccattaccgtttttctttaattcgtttacttattagggttttcttcatcaactatgtactaatgtagaggtatttgtttgtgattacgtcgtcagtccaatggttattatttgttatgtgtgatttaatatatgaccaaataaacactatttaaacaacacaattcgttgtacaccacctaaatagtcttattatcttatatcaatttttatttttagttgtgtttcaatttatatggtaggttttcatttagtcttgcatgcttaattaagtttggggaccaacacatttctatgattagtttgccactgaattaagatcttttccccgattagtctttttctctagagaaaagatagtcagtcattcacgctcgatcatgagttatgatttatgaatgatgaatccataatataattatgacgttttttcttttgacttctctttgatttgtttccctaactctcccatccataaacaatccccctgtcggagtgataacgatgctcccaaatattacaacaactcgatgcaaattctgattaaaagcaagcaaattgtctcagtctatacatttatgtttgatctcttcaatcccaatattgatcacatggtgtaaatatatatcacaaaaaactaacaaaaaagaccctacatgaaaagattattgcttgagaatatctcaatatctacatgtatatatacaactaataagagactagttaccacataaattacaactcgaataaaaagttgagaaaaatacgggttcttaaaaaagttgctgcagtaggactaatgaagatcgtaaagattgttacaaagttgctagccaagttattaatcagacaaaacattggttttgttttcactaagaattcaccattgtaattttgtttaaaaatgtttagtagatttgatgagagtaaacttgtttaaactattttattaaatcagacgagtgattattaacggtaatggattcagagttacaacatcaccattgttacacgtataaattaaaaagaatacatattttggaagaatcttattttggactgatatacaattaaaacatttcttccaaaatgctttacaccaaatcaaacggacttttcacgattgttcggcgccgccacgtgtcatctataaccttcgttggatcttgcctttcacacgtcaccatttttcattttcttcttctttttaatatcatctctttccctcactttctccgtttctcgtcaaaagattttccgagaacaaaattcaccactgagaaagagagcaattacatttatagaaagcttcataagtatcttcttcgccgccatggctatctagattcatcgattacacgtgtttttatgactatacgtgcacaaagctctgtgtgtttgcgtaacttcggtcaactattagaaaacgagagcgaggtttgtgagataaagagagaggtatgggttcgtccttgtcgaatctaaacgacgggacgaatggtttggctatgggacctggtctcggcgatataccggaaagttgtgtcgcttgtgtgtttatgtatctgactccaccggagatttgcaatctggctggattgaatcgttcttttcgtggtgcggcttcttcggattctgtttgggaaaagaagcttccggagaattatcaggatctgcttgatttattgccgccggagaggtatcatagtctctcgaagaaagatatcttcgctgtgctttctcgtccaattccttttgatgatgataataaggtatttgcttggaagttatgaggattgaattgtgattttgatgtattggatttgggaattagggtttagtttctgagtttttgattttggtttggatgaattttctctgttggtagttgaactctctgtgtttttgtttccaggaagtatggattgatagagttacaggacgagtttgtatggcgatttctgctagaggaatgtctattactggaattgaagaccggagatattggaactggattccaacggaagaatctaggtactatacactaacgctgcttgatttgaatctcaaattgaattttagaagatcaactagtaggtgtcaagatcattgcaatacttggtttgtgattatgtcatttgcctttaactcatgagctgttgatacgctgtttcttaggtctttcttgaacaatttatgtcttaagtatataaaagaataagacttgagaatttgtgtgagggttattgtttgattagttgcttgttttcttttgctgactcggcttttgagttttgatgaatagcttaataggcaatgaatgttcttgcctaatctttatgattatggatttgagttgttattgtagttatgattcttctcgacagtacatatttctgaatcaggaggttatgtgtgagactgctttataccataaaacatcaaacggcttctttatgtttttgattatggaacaaaaagtaaaatccttttttaattatccattgaataggttccatgttgtagcctacttacagcagatttggtggtttgaagttgatggaacagtgagattccatctcccacctggtgtatactctctatcattcagaatccatctagggagattcacaaaaaggctagggagacgtgtgtgccactttgaactcactcatggttgggatctaaagccggtaaggttttcgctttcgacttctgatggtcaagaagcatcatgtgaatattacttggacgacgtagagagaaacgaagcacttggaaaacacaaacgcggttactggatcgagtatagggttggagaattcatagtaaatggatcagaaccatcgacagaaatccaatggtcgatgaaacagattgactgcacgcactcgaaaggagggttatgtgttgattcagtcttcataaacccaattggtgatgtgaaagaacacaaaaggaaagctgttttgaaagaagcttgaagaaagaaagaaagaaagaagatcacacaccaaaacaccaaaatcgttttgattctttcaaggtataatatcaatgactgatggtttaattttcatttcttattagtgattttgtcgtcaattttactggttcccaaaattagggtacatcgagtcaaatttcattttattattgtgcatttcatcgagttttttattttcatactcattttgttacatattttaggcgagaggacattttctttttgtgtatacccatgtttctgtgactatctgtatccaaccaagattatctaaattattttgtgtctgacaaattccaattatttttgtggtgcattttatttttatttttattttttttatcatatctattacccaatcaaagatagtatgcataagattggatagaattatttaattctaatttttttaatcaaacttatccaaatattcagatgcttgaaatataaaaaaaaactatactatcagaaaaatagatatatgaatacaagatattttcaatattatctgataagatgtcaatatacactatactaaagatattttcattttgtgtgtaatctacatttaattcatgaagtgaaccaaaacttaacgatattttctatattttctttttgtgtataatctatacttaatataaaaagatgaacaaaaccaaaagataaatttagtttaattcatgaagtgatccaaaacttaagattcttctctagaataatttgaacatcataacgaatccaagaaaaaaaaaagagaaaagaatattaaaaaatgctaaagaaaatgaaagatagttccaaaaatatttaaagaaacataaagggaacagaacaaggagaaaaaatgcatgtagagtgatggtcgagctgaatttggaatagccaagaaactctcggctatcatgtgaccgagctggacctgagaggaagtggtcagatgcaaaccgtccggttcaagaggtaggcctctggcgtcaacgcaatacacgttctcaagatcagtcttcagttgagcttttctcaccgcgtcaagatatggtcctgctcctgtcgctagagccaccttttgttgtttaggtcagaacaaaaaagatattagaagaatgtaactatatatcatattctttctaaaattttgaagtaaagaccaaaaatgtcaattttgaaacaccctgtaagcttggattggtacgatatatttagctacagcctggattaaaacaatgactaatcacgaatcatgtggaagctaaacttaaacaaatatgcattaaatacgttaaatccatgcttatgtattctttacttttattttgcatgtattttgtctttttattttccgaaaattacccatcaaagttttattttattttaaaaccgtggaatgacactttttggttactacacttgcagaatcactaacataatcaacattcaacaaaattataaagatctgtgaaattattctgttattttacgtatttaggcaacgtacctggataataggaagatttgggtgttgtaaatcatttcgaagatcactgaaaaacttcactagtctcttcttatataccgaagcatcgaccatatcaaccgtatcagactcaccctgataccacaaaaccgcccggtacgagccaccaccaccactagccatcgccgctttagccctcttcaccgtctcctcgtaaagaaactcacctttttgccattggcttagtttagtcccaccgatagagcacggaaccaaacccacctgaccaaaccggttaaccacccggttagcaaagggcatccccggtccaacaccattagtcttattaatgtcaatgtcaacgtgaagtggctctttagcctctttccactcgagtttactcgtgagacggaggatcgaagggtttgatcggcattctggcggaattacaccgtcccacacggtggtgtttgtggcagtgtcgttataaacaccgcctcgacccgccatgttgctttgcccggccaagatgaaaatgctgatgttccttgtgatggtttgggattgaagatgcggtggagattgaagaaaaatgatgatgaagaagtagtagaagatctttgtcattgttttgatgagtaaacttgaagattgagattgagatccaaatcagagtcgaagtaagatgcaagacagaataatgttttcttcttgttttgtctctttctttctattcacttcaaaaatccttgtttatctttttacagaaagaataataattggtttggtattattagtcaatagactcaaaaaaccttgtcatacacaacacaacatgattaaatataaaaaggactatattctgtctcgccacatgtacaaaccatcaatgattcatttctttaatttcttaaaggtcatgttttgcaaaattttggaggtgtttggatcagaaaaaaaaaagtaattaatagccaaaaaaaaaagagaggaataagatcatgatgagcgaatatgcaagacggcgtgggcaagtgagtgatgagttcttcactctttgtttcttttttgctttttatttttatacttcattttcgtataggatacattttctttccttacttaattagtgctttcttatcattagtttttactttttcaattatactaggtatattcccatgagttttaccaaagaatcagagtgagtttttggccttccctatttttgggcttaaaggaaaacatagaacatttccaaatcacttacaaactccgagagagtgtatagagctgcaaatagagtaggccaaatatgctttaatttgttttttgttttttttgagcaaaccaaggaatttttatttggacataacaactcgcaccaagttctatacattacacatgacttctactgaataaagaggaagaaaaggctattcaagaaacgttttgagctctttgtttcacaaggaacaatagaagtggaacacagtacacattgtaccaaagcaaacaagcttgcattttacatttgcacgtaacagccaagaatcatggccaaaaaatataccgatcaaaataaaaaggaggttattactaatatattatatacctatagatgttgcaattgcggtttctgacttttagtttatttttaccaaaacctgacaaaactcagcagaagcataataatagccaacaatcaaaattaaaattgtgaggctaatattttggcttgacgaatactctttaaccaaaatcattatgaattatgagtttggatagccacatataagatcccattcttgattctagctagggacagaacttatcgagatcaataattgccaaatatgtgacttacttatcttgaccatggagacagttaaaaactctcaatgaaacagctctcctctccaaatcagaaaacctgcatatcaatttatgattaaagtgttaacgatgtagagttgtaagaaactttaacatacatcatctaacattcgacatgaacacctgaggagccctcatctacgtctttacaagatcgtggcatgcactctattgagatcattgtgagggctaccacagaggctcatgacgaatttagatgatcagtctacgtttttctatgaccttaacacttattgaggccggttggttctctatgcccacttaacaacaaacaagtttcatcaccgtagtaaagtgtctgttgggacacaagagttcacatgatatttcaagttctgatggaactggaatagggattgtcgtctttgtttgccacccacacgtagcctctcgtgatgattgttttcataatctccacaaaagattacttgtggatcgcgaaccgagacgacagtcccttgctttccaaaatcaaacgaaaaggaaaagaaagaaaaaggaaggtgtaagaatggtggtaatgtggtagagttatcattttcttcttcttacctccttccattatatagtgtttcacatgcccatttcgtaatataacctaagccaaagaaaatcgcttcggttttaaattatataattttattttataaagttaaaactcataaatcagtaaataaaaaataaacttaggaaacgtttttgtttcaacagattatatggatttcatacttatacacaaactataaacattcccaaagttttagtaaaaattagcacccattatccaaaattttaaaaacttagcttagttttattatacaatacaatagaatcgaacaaaagggacaacagttttctatcatatctcgaatgtatcgaaatgtacttaagcgagtatggctttttgggggacaaggatcatgcatgaacgaaatatttctccaaccacatatgttatgttttggccccgtgaaaattttccacaagtaaatttattgctaaagttattgaccaacaacataaatcttgttgaaatgaattaactgaacagtgtgaaaaaatcaaccaatattcatggtgttccttacaatgcaatttcagttctgatgcaatccgtaacaattgaagttgtcacatgttcacaacaatccttaaatcgattttagcaaaagagcataagatacataaccaaggttgctgttagctcagtagttgcaattagaatcggctattgaacacaaccgggtgatatgagattgcgtagcaagatagtaaacaatgttttaaaaagagttattataggaacacaaactcttctgattttaatgataggaggacaagagagagcagtgaaataaagttcataagcagcaaaattctcaagtctgatattataagagtagcaaaagtgagagacaaaaacgaaataacaaggtttatgttttgcaaatattcagaaatgaacatcaactactaaaagtagctactagcagaaaagacgcagagtgagaaaagatggctttaagctcttcagcgtttgccaccaccacctcccaccttaggacccttggatgcagcagcagctttggggaaattagccttgaccttctgttgcttagaagcaaattccaccttcttagccttcttttcatctttggtctttttgattctttccttgatctcactgtttgttgaatcatcatcacaatacatttattaagtcaaatataactattttaatcctagttggatgatttgacagagggagaaaactaaccgcagagcagcttccctggctgcatcacgaacttcaggcttctcagctctcttcttctgaattacttccaaggtagcaccaacaatggaccttgagtatggcttcttggtggcacgtctccttctcttcacagcctcttgtgctgcatcctataaaagaaacagagttttagaatgttaacaaatcaggatcaatgaaaaaaaacaaagtacaaacaacaaaacagatccaaattactgagttttttttttaccttcttgtgttgctttctgtacatggcagtccatgcaagcttggatggcttcaacttgttatggaagtacctcttacattttgagttaagaaacaagaaaacctgaaaacaatacaaaccattaaaagactaaaaccaaaacatttgcaaagtataaacaaatcaatttgattagctgaagattcataaaagaaccaacctgagaatcagatcggataaacctaattcctcttcctgggtaaatcttctgtccactgaaacgacaaagctccgtcctgtatttcatagataataaacaaatgagacattgcaactagaaatgacaaccaaatgatctttgacactgaaaaatctcagtctacatgatagaaatgaatcatccatataccaaatacagactaatcacagatattaacgaagtatcatacttttattacttagaaccagatccagctacacagagaccatgaaattacccagcttagctaacggtaaagcaaaacatatcataaattccgattgaaacaagagtcaatttcagtgaatcgatccttccgatagtgtgaaatcatgaatcattatcactaggcgatgttaatagattcaacacaggaacagatacagagagagagagagaggtgagatttgattacttgagaaccatggtagtagctgctcctcttcttcttcgtcttcttcctcctgctcaggctgctcccggaaacactagactagaaaaccctaattctctcgatacttatatataagagacttcacatttcacccaatgccattttcgtctatatatattattctggcccacactttaagcccactaaataggcccatcacaaataggcccataattttattagcccatatatttttgtagtgatgacgtcagctctcctccaataattttttgattttttcccatagccgacgacggtagaggaaacttgtcaatggacctaaaaaacggtgacgtttcgtaaaaggtagatgaaagtttgaacaagtagctaagctctctctctgcacaagcttccagaaaaaatcaaatcaaaagagagagagatccacaaaattggattgaatcgtcgccggatattccaagagtagagagcttagtttgtctcgcgttgcgtctagatttactgaatatggaggcggagaagtggaacagcgacggtggtgaatacacgtcggaggacgaaggtacagaagattaccgacgcggcggttaccacgccgttcggatcggtgactcattcaaaaccggccggtacgttgtccagagcaaactcggttggggccatttctctactgtttggctctcctgggatactcaatcctctgtacgcatctatctctctctctcgccacacgaattgcttgaaatgctttagagattaatttttcgttgctttgtttgtgtgattttcttactcgtatatcgaatgtacagagatatgtggctttgaaggtgcaaaagagtgctcagcattatactgaagcagccatggatgagataacaatattgcaacagattgcagagggagacactgatgataccaaatgtgttgtgaagcttttggatcatttcaaacactcaggtccgaatggtcagcatgtatgtatggtttttgagtatttgggagataatctgttaacgttgattaagtattctgattaccgtggcttacctattcctatggttaaggagatttgttatcatatgttggttggtttagactacttgcataaacagctttcgattatacatactgatttgaagcctgagaatgttttgttaccgtcaactattgatccgtctaaagatccgaggaagtctggagctcctcttgttctccccactgataaggataatacagttgttgactccaatggtgattttgtcaagaatcaaaaaacaggaagtcatagaaaggcaaagctttcggctcagggacatgcagagaataagggcaatacggaatctgataaagttcgtggagtgggatcaccggttaatggaaaacaatgtgctgcagaaaaatcggttgaagaagattgtccttctacttctgacgcaattgaattagatggtagcgagaaaggaaagcagggtggtaagaaagggagtcgatcaagtcgaaggcaccttgtggcatctgctgacctcaagtgtaaacttgttgactttggtaatgcgtgttggacatacaaacagttcacaagcgacattcaaacgagacagtataggtgtccagaagtaatccttggatctaaatactctacatctgcagatctctggtcattcgcgtgcatatgttttgaacttgtcactggagatgtgctatttgatccccatagtggcgacaattatgatagagatgaggtatgcttaagttccctgctgtcttttggctgtgtgcatttgtggtttttacatattttggctttctcttctcttgttttgtgggatcttagcgtggatttgcttcaattttctattgtgggagtttggaaatctaattggcttttctgttaacaggatcacttggctctgatgatggagcttcttgggatgatgccacgcaaggtaatagaatcatcagcagataggtttatcattttactaagaaatttatttcgatgattcataattcccaacactttctctgttgtgttttgcagatagcattgggtggccgctactccagagatttctttaacaggcatggtgatcttcgacacatcagaagactgcgtttctggcccatgaacaaagtgctgaccgagaagtacgagttcagtgagcaagatgcaaatgacctgagtgattttcttgtttcgattcttgatttcgtcccagagaaacgaccaactgcagctcagtgtctgttacatccttggatcaactctggtccccgctctataaaaccttcgcttaaagacgaaaattcagataagctcgatacagagaagaacaagagggagaatgaggagcaagaagctgtggaagttaaaatgggaaacgttgttatatcatccttagactctaaaccaggtatgagccaaagctcctccactcttaagctagcaatttgactcctgagatatgtctgttcgatatctgagatctgtgtaccactcaagctgtttaatagaaagaacattttcatatacgcagagtggtatcttgtttgtgtacttctacgaatccaataccaattattcacatttaccatatatttgatttttagtaatatgatcttataaaaccaccgactctgtttccgactcctgactgcttctttgttcctaaatctgtgtgcaagtccagtttccggtttagtgctagtgttataacgccattaagtagaattattattcacaacaacgaaaatcaaaatcgaatatgcaaaccagaagtagttttattacaagtcaagattgaacaaagacataacataacagagagaaacgaaaaacttgttatcatcgttttacagaaaaccacaaaacgtatagttctaattttactacagctttttctctcccacgacgattctcactttctcctcgtcatcgatctctccaacgtcattgaaagtttgaccggtcatctgatccgcctctttcagtaccgtcgccacgtatccaggcctagtatctttcacgtcaaccgccacaactgtcttccctgtgctctcgtctccatgggccgacgcgcgcgtctcctcatcagagggcgtcgtagcaccagtcagcttgctctttatagctccagtcatgttccccaacgcacccattatacttcccttcccttcttcacctctgcaaacaataattccaacaactattatcaacacatccactaattccgaccattgggttaaatcgctttcaggacatcatgtcatatacctttgggctacggaatctttagtctcgtgagctttgtcagcagcagattcggtactctgttgtgtctttctagaagcatcctcgtcaagttttttgccctcaagtctcatctcttccatcttccgccttgcttcttctcccgcctcgtccatcttttcctattaattaaggacgaacatcatataatagccaacaaagcatatataaacacattgaatactctgctagttatattaccttggccgtgtctttggtctcaacggctttttgtttggtttcctctgtcttgcccgacaagaaacccatagctcttttagcagtgtccactgcactatccttcagttctccgatcttactcacacctgcatctttcgtttctgtcgccttctctgccgtgtagtctctatattctcccactttctcagctgtcttatcttttgcttccctcgccttatccgcagtttcctttgctttctccgccgtgtagtctttatattcgcccactttctcagctgtcttatcttttgtttccctcgccttatccgaggtgtattccgcggtttcctttgctttctctgccgtcttatccttagcttctttcgccttatccaccgtgtagtctttgtactcacccagcttctccgccgtcgtgtctttggcttcctttgccttctctgccgtgtaatctttatattcacccaacttatccgccgttttatctttagcttctcttgccttctccgccgtgtattctgccgtttccttagtcttgtctgccgttctatctttagcttctcttgccttctctgccgcgtaatctgcggtttccttagtcttgtccgcagtcttatctttagcttctcttgccttatcggccgtgtaatctgcagtttccttagtcttctgcgcagtactgtctctaacctctccggtggtgtctctcatccccgctgccttctccgatgcaatatcggctccctccctcgttgactcagccgtatcatgacttttaccgatgactgcgtctttagttccttgcaccgccttcatcaccgagcctatcaggccaggcctctcaggctcggtcgtcgttgtcctctccgttaatttgtacgtcacatcacctttgttgatatctttcaaatcttcagccgctagactcgctgcagcctcagctctctcggccttggcggacctctctgcctcccgttgtcctgatgccatgatttgtttcttgtttgcttggcttccaagtaaagatttaagatggattctttaaactttgccgaatactcgtcgtgttaatgaagcatttagagctgcttgttgtttttatagcaagtttttggttccaatgagatgccacgtcatgactttgataaagcaaaacctgccacgtgtgttctggtacgcatttttcttattttccaacttatcttccaaatatcatttcgcccgacacgtatctaagaagatcgttctattgaggaaccatgccacgtgggattttcatgcatcgagagagcttggacttaacgtgtaaggaagcaattgtggtcggctcccttacttctaaattgtgtagtacgagtattaaaaattgggcgtttcttgtttctttctttcttgtttttggtcgaaggctatggaagagaccattattgtctccaatttattggaaaaaagtaagaaaataaactgcagtccaacatctcctggataagtagcttcatcggtatttaagaacaaaatcaaatgaacaagttcggaaatagactcaaacgaataaaaatccaacatatataaatgaaaacacatagttatcgatttaactttttatacacatgagttatgtgcattatctaatcttttgatataaaattatcgcaaaaacgtatcaaagatgacagtggatgaaaattaatgatcgctatcttataaaccagtcactatttttgaatccacttcaatttccagtctcgtaacctttccaaaacaacacgataaattgtcgacgaagcattttttcttctcattaattgccataacttcattttgaaattatagtttctttcttactcgtatttattcattaacgtattgttcacactactcacatcttatatatttatgatctttagagattctttaagcatcttaattttcgctttctgttgacgagtctcatctttagcttctaataagcttagcttctgctacccatatggtccatatcgtttatcttcatctgtccaatcgaaaaagtcatgagctacagatttgttttttttttttttttagattaccgtttgtccatgatttaacaaactgtcgtttttctaccaccatttgctaactaaatagttaatgttgtttttaaatatttgtgtaatctttgtaaatatttgtaaacccgatttctgatccatgacgtgcgagtttagttagtggaataattttgttatattattaagtttttaaatggcatcctaatgatatttgttatactttcaaaattataacttacgatgtactccccaaataaatagtataagattaaccaaattagtattgtctatcagtaaagctcagcgcttaataccattcatgcatcttttgtttttcaaaatctactcgcaactaaacctagaaaaaggaagccttaagttatttagcaaacatatagaagagagagtctcaatatcaaaccaacagctgaatgattttgagaaacatagattgtttgttgtttcactggctggacttccttataattttgccaaaaccgttatgcccatattttgtaccccaagaattctgaattttccagtagttgacaccttccagagttgtgtcgaaaccagtcattaagactacatggccacatgtgcttgtgttttttcgatttgtttgaccatgatagattttgtcatattcaaaatttacaagatatgaaatcagttgtaatatgtttaaaaatgaattataccaactacaaataccacttacatctttacattcctttaagctttcataagtatctatcacaacaagtagagggccgtcgttgacaagttagataaactcttcttctctcacttgtttgtctctcttatataccaaatccttgattttgaatgcaggtatatcctataagaattcgtttataagtatgattagttaaaaataaatgaaatttgtaagaagacaagatttaaaaatgacacttacatagttttcggaacttttgagacagatttgtttgagttttcatgagtatggacaagtttttctagaacaagaacttgttttgtcaaaaactttttgatacttgccatagttacagatttttcatacatgttcctaatattgtttatcaaatgttgcggtgatagttcaacaactagacctataagagcaagtcatgcttcgatgtggcaccaacctagagtttataaacccctaagcaaaatgaaaaaatgtaatttataggaatgaaataaattttcaaataataacttatatctaaaatataaaaagttatgcaaaataatttataaaatagttagtcacaaaaattgtacaaaactaaaaaagtcttatgtgattaactataacctataacctattatttaggaaacaatttaaaaatcaatgatatttacttatttttgctactgaaaatgcaaacctgttattaagtaatcgtagaaaagtcaaaaggattgttattcattaactcccccaaaagccaagaagaaggagagtgagaaatggagagaaaacttcacgaccacattcacattataactcaaatgtatataaaaattatccataaatagcctagtcctcattctcatattccttttgattattagtgagaacacaacaccaacaacaaaatgggagactcacattgccgttgtcttcatggctttattttgcttgttgttctgtttctttccttcgtgtttagtttcgcttcaaagatagacgtttcttttcacggagacgagaaacgtagtctctctagctccattaattcctctcttagtgagtcagcggaatacacaatgtgcgcgactcataaagaggctaaggatggtaaaccaatcgcattggatttcgattgcgaacaaggatatgttatttcaaagatcacttacgccgactatggccaatccactggtagttgtgggaaatttaaacgcggtaattgcggtgcaagcaataccttaaatatcgtcaacaaggtatacaaaatcaatcaaaaatacaaattttctttcaaatagtgttcttattaattattatcgtttgtttgtgcagaaatgtcttaggaaagagaagtgtaagttgtttgttccagacaagatttttggtccgagccactgcaagggagcttaagtctcgttattgacgctacttgtagaaaacttagtttttttcttgttttccaagttaaagtttctttatgtaatcgacctagtcaagcttttgtttcctactttacacgtttgttacattttttctctttgttgcaaaccccaaatgtgtatgtgccatacaatatcaatcatctttgccatattttatcgaactgtttataggttactcaatatttttctcctcaaaaaatgtgaagactgacacgtaccaaatcttttaagtgagaatcacaacaaatcacataaaacaccaaccaattccattctttttcctcttttgacacactttaatccaaatctgatcaagttttggggccacattgcaaaattggggcccgttgtaagttttggtcccaatctgaaaatgcatatcccaccgactctgacaattagggcttataaataaacgagcacataagttcataacttggttacttcattattcttccatctttttcatcaaattgctaagagagtaaaatcgccccataacgaagtaaccatgtcgaagaagataatcgtgttgacaagctccgatgatgataaagggtatggcagaagacgattgtgccgataatggaatccctcttccaaacgtgacaagcaagatactcttattggtgatcgagtattgcaagaagcacgtcgttgagagcaaagaagaagatctaaagaagtgggacgctgaattcatgaagaagatggaacaatcgattctctttgatgttatgatggctgcgaattatctcaatatccaaagccttcttgatctcacattttcaaactgtcgctgatttgctctcaggcaaaactccaggcgagattcgctcatacttcaatatcgagaacgatttcacagcagagggagaagctgagatccgcaaggtgaatcaatgggcttttgaatgaaagtggatcttcaaagttctttcttctttagtgttttcggttttcttgatgcgatgttagatgattacttcgtctatttcttgtttgttctgttgtttcttttcttttggtttcttgatgcataagtaaaccaatgtttgttgtatctttaccctagagacgatctattgttggattttagtatatgctaaccaaatctgaagattgatgtttttgtttttgaagcaattcttgaatatatgtgaagtcaaatccttccttttttttttcttatggtaattgaagtttactaatccgaaactaattatatgacacttgaattttgatattctatacttgtatcataattaataatcaagcaataaatgcaaattgtcaagattgaacattctaaaatagatagtgtgaaaatttgttgttctctttgcgaaataaaaacagttgttttaatattctcgtaggaatatgataaacctaattatagaaaacttcgcagccacatccgcacacaaattcgcatctctaagaaactttaattactaatattatcatatatatcaatatcaaaacattacatatttatacttaactacacgtactaaaccatcttagcatttttcaacacccttctgatttagaagggaacgaaaaactagaataaaaatggaaactacacattctcttcatcgtcatggcttcatcgttttgcttcttcttttatccgtttcttatgtgtcttgtttttatacaaggaatatcatcaacggttcttatcgtttaaatccaagagaatatcgaccgaatcaactgccaatatgcattgatcatccggcgcctagcgtcgatctatcgcccatcttttgtggtgaaggatatgttatctctgagataaaattcgccgactatggccaacccactggtgactgtaagaataacacgcttaaacgtggaaactgcggcgcacccgctactttgaggctcgtcaaaaaggtttaactaaacgtatatatatgaattatctgtttgaaatgagtactaatacatcatatcttattattgttatctattgttattacttacgcagaattgacttggaaaagaagaatgttggtttccagtgacagacgagatgtttggtccaacccattgtaaaggaccggcacttagattcgttgtttccggtacttgtaagaaaaaagttacttaaagaattagtgattcttgtaacaaattttgtcttcttcttcttttttttttgtttatcaagtagttgttgatcatatttatgatatatttttttcttagtaaaaccttttatagagcgcatcattatgtgtgctaattaggcaatccactgaatcaggctcttgtttcctatttgcgtatttgattgaactctttttcttaccgattatatatgcataagaaagagtgttataataaaatatgctattaccaattcatctatgagaagatataccagccgacaaagaggaactcctcgtctccgatagaggttctttgcaaatgaagttcatgcgagtagcttaaaaggcttaagaaaattaacaattcattaatgcataccatcgccatacttatgtttttgaatgctaacctaattcaaatgacaatacaatgtccttagtgaaaaaataaagctccaatagtacgactttgcttaaagaagtagagattgtgaaaaagcggtcgatctaaagaatccataacctgccaacttggtaagaatccacttcagaagaaaaagttatgtttcatataagaagaaaatgagattaacaaatctctaaaaaatataaatcaaacttttgttggtattcaaaaccttaagaagaagatcaatcttcatgttcacaccaaacccaccctaacaataaagcttatgtataagaagacatatgacttgtctaattaaaaacatattcaaagtataataatacaatcaactaggggagacaaaagcctgaagatctatgggatgtgaaagccaattagactatcttttttaggaaccaattaaaatatcttctgaaaatgcaaatatgttttttagtaatcgcgaaaaagtcagaatgaatgtccttcaccaacatctccgaaagacaagaagtatggaaagtgaataaagaataaaaataaattagaacatagctaaaaggaaaaattgatagtaaacttcgtagctacatccgcacacaattcgtctctatactaatttaatctaacaagcatatattttgaaaacacacctatatatctaagttgcttagaaattttcattatccttctgatttgtaagagaacaaaaacaaaatggaaacttcacattattttcgtcgtcattgcttcatcattttgcttcttgttatgtttctttcatcggtttctaatcttgcttcaaaaatcaacaacagttcttttgatgcaagaggcactaaaatcaatagtgatccgaaacatatctccaattcaaagtccggaggatctcctcaacgggacaaagaatatcctctgtgcgggtcgaataacccgtcagaggatggtatcatatatgcacctttttgcgacaaaggatatgttttttctcgaatcaaattcgctgactatggtcagcccggtggttcatcatgtgaaacgcttaaacgtggaaactgcggtgcgccggctactttgagactcgtcaaagaggttaacaaagttactcaacattagtaatcttgtttgacgataaatcttcttatcgattactattttttgtttatgcagaattgtcttggaaaagaacggtgtaggatttatattacagacgagatgtttgggccgacgcattgtaaaggacctgttagcttcgttttttctgctatttgtaaaaaaacttgagctttcttatttcatacgttaagggaaagtaattcttataacctttttttcttccctttaatgttttgatggatcgcatcatttttgttgttaatttacgtaatccacggaatttaattatgattttgtttcctatatcaacttttttttttctgaatttattttatgagaaagagtatatagtttggagactaactaaatagctgacgatatgttttaccgcatatctgttcaactacacagatttatgtttcaaggagtgaacttgtactcgcctaaagataacaaactcaacaacgtattttctctttcaatatttcggccaaccctagcggaaattcaatttcttgtacactgatcccacttttccttgaagatcactagcaaatttcaaaaattacataaggataacgtattcactttttttttttaattcaaaagagtttctccatatttatcataacatgttaacaaagtggttttaacatataaatgaccctttaactagttatacaacggattatttttataactcagaaaaagtgacaaactgatgaatactttgaagtttgaatagataccagcggaataatttaacgttaattaacgtcaaagtgatataacacatgcatcatttctatttaacacatgcatcatttctattttacctttatagcgagcattgatgatttaatttgtcgggaacaagagcaaaaaattaagctttttataacataataaactctattagcagagggccagagacaaaactgtaataagattgacgaataattgtgaaaccaattaattaaactctcttttggaagattttttgtttttttcccactgaaaatggaaaatctattaataagtaatcgtagaaaagtcagaatgatgtccttcaccaacacctccgaattccaagaattaaaaagaaaaatcgacagaaaattttgcggacacattcgcactcgaattc

SEQ ID NO: 1080 - DNA, 92611 bp, Arabidopsis thaliana
aagcttgaagaaatcaagctcattgcgaagagtgtattttgagtgtgaggaaaatatgaatcgtatcaaaatcgttttatttatttattgaaagctcatgtacaaggagaatgagaacatgcttctacagtttttgtcagtataaattggtaattatttgagtactttgtgtatttttatggaatagctaaatactttatatgtttttatatttttttttgacatgacataagtaaatatctaacaaaaataaattctcaaatttgagtctctatataaaaataaaaccaataagcaaaaaatattaaaatctaaaaaccaatggagaattaaactgtcttctactaacaaacccttatttctttttcttcttcacttaattaaaaatagtaaatgtattattagataatcgtggaaaagtcagaaggaatgtctctcccctacacctccgaaaaccaagaaatacgagatttgaaaaatagaaatacaaattgatagaaaatgttagggccacatctactcacgaatacgcatctccaaagtagcatacttaacaatttccttatccttgattatgagaatagaaaaataatgaaaacttcacatacttttcgtcgtcgtaatggcttcgttttgcttcttgttctgattcatttttctgtgtttggtttctcttcaaatatcgatgtttcttatagagcaagaggcatcaaaatcaacggtgaccaaaaacgtgttctctcgaattccaatcaccctcgcagcgattttcggaaatctcttcaacatggaaaggaacattcagcatgtacgaatcataaatctgttcgaggtccaataacgcgtattttttgccaagacggatatgttatcaccaatatcaattttgccgactatggaaatcccactggtacatgtgaacactttagacacggcaaatgcggcgcaccagctactttgaggcttgtcaaaaaggttagcagaattaactagcgttaatatgttatgttggttttcttgtcaatgaatcttatcgtacgttggcattgtttatgcagaattgccttggaaaaccgaagtgtgtatttttagtgacggatgagatgtttggtccgagccattgcaagggacctcctacactcgcggttgacgccacttgtacaaaaacctaggtttcttattcctacttaagatttttgttatagagattgttttttttttctctttctctcgtttcaatcaagttggtgttggtcattgtatttttcaaatttcaaaacataagcaaagttagcaaaccaagcttttgcgttacatgtacaatcctatacaaactcgattgacgcttacgtaacgtttgtgcatgtatacaccataatcgtcaatgggacaaatgttttggaaaatgttagttttaccaacacaagctagaaaagttagcctgacacattccctagctaacattagaacaactagatagactaataataaaactaaggaaataattcaaaataatgaatataattgtgaaatctagttatagaggtaactggatttcaatcccaattttgaaatcatttatttcgtatatatagtacattataattatcattagttgggtgggaatgtaagaacacaaatgagctgtcatgagatacataaattaatggataatattctgacatttatacaacaataaaacacttagcagaggcataattctctaaaatttaactaacagctagagataactgtgaaacaaattaaactcatcacgtctatgaaaatagaaaatgttactaattccttctctttcactggagaattaaaactattaataaataatcgtggaaaagtcaacaggaatgcctttcaccaaactcctccgaaaaccaagagaatggaaaaatatagaactacattgagaggaaatttcgtggccacatttacaaacgaattcgcctctccaaagtttgattaatctaagtttaacgaaagcaaaagtgtaactacatccataagaagtctacttaaacaaatgtcaataccttgattttgataacataaaacaaaaacaaaaatggaaactttacaatgtcgtcatcagcatgtcttcattttgcttcttgtcctatttcattcctctctgtttggtttagcttcaaagatcgatgtttctgacgatgcacgaggcatcagaatcgacggtggccagaaacgttttctaactaattctcctcaacatggcaaggaacatgcagcgtgtacgaacgaagaacctgatctcggtccgctgacgcgtatttcttgcaatgaacctggatatgttattacaaagatcaatttcgctgattatggcaatcccactggtacatgtggacactttagacgtggcaattgcggtgcacgagctaccatgaggatcgtcaaaaaggttaaaaaaataagctaacaaaaatcaacattaacgtgtgtatagttaatactaatagatatttttatgagtcttatagttagtaatgatttgtgcagaattgtcttggaaaagagaagtgtcaccttttggttacggatgagatgtttggtccgagcaagtgcaaaggagctcctatgctcgctgttgaaaccacttgtacaatagcttaggtttcatcatatattgcctgcccctatatagagagatttcttcaagtgtattgtttttgttcatcttttctcgttttggtcaagctgttgtttagagtttctttgatgcatggatctatatgttgtcgtcttgtcgattatgtttcaagtgctttaattttacataatcaatgtagtcatgtttttgtttcaacgcagacattaatggtttactatcacttttttaaatatggaagtatatccatggtgaattttacgaatcaaactcaagattgattataagagtcagtacttcactctattttatactcaacgttagcacttggcagtgcatagatcccacatttattaagtcaattttcttattactaatctagatgggttaacatgcaattatggaaattgtcaaaaaaaattatccttagattggtttgggaaaaaagaaaaaaaaaacaattatggtaaagtaaaaaatgaagaagatattaatgacttattaagttcaattatgacttaaaagctgacgtcataaagaactggttggagttctacgaagaagtagtttcgaatccttgacgtcaacctaaagccaatacgaagaagaagaagaagaagaagaagaagaagaagaagaagaagaagaagaagatcgtgagccactatattcgcttccttcctctaatttccgattccaatggacctgaatcgcaaacacaaggtatatctcctccttcttctctcgctactgttgaacttgaaccatttcgatgctgtttctgatcatcgctttcgaattcgatgtaaaatctcttcgttgcattgaattttgttttctttttttctctctcaaaattggtggttctaaaggaacgtaatcgttttgataccttgttcgttgttaaattataacacttagggttcttaattcttatagcactcagatttgttgggatttgaagctcctcgtagtgaagaagaagcttgacatgcctcaatttgaatcctagactaataaatttttcctgaaaaatcaattcgaaattaggattgggaatcggaaattatgtttcggtttgcttcacaaaagttgatctaaggttgattacatgtcttttaaattggtgcatgacgatgcatctgtgattgttaaatgaactcttatcaggtgtctcttagaggtgccagcagtggggagatttcaagggatgctttgcttgctaaagtgtctcaagaaagggagctacgcagttatgcaagacgcgctaatgctgcatcactttttattcaagtacttcttctttctgctaactttggctgacttggaatctctcgatgttgtttttggttttacgggacttttatctaagctacatagaagaaggcataaacttaaaagtaaatttttccattacttgtagagagtttggaggtcttacattgtgagaaagaaggcagctatagagatccaagaggagtgggagaatttactgagttgccattctgttacactgaccaaaagttgggtatcaagcagagtattgagaccgtttctcttctttgtcagatctttgtctgtccaacatcaaaagatacaggcaagagaaatacactgcatgcaaacttgctttaagattctattggaaagcatcaactctaatggtatgattctttcttttttttgtcttgctttaatttgaattgtttgtcttgcaaataaggagggaataaatcttgttgtcttttgcagatcaggggtacaatttttgttcactagcagttggtacatctgaagatagtaaaacatgggcctgtcaaacacgaaggatggtttctctctgctctttccttctcacggagtgtaattattcgcaggaaaggataaaagatgttattggtgtcaatgcccttctattacgtattcttattgttttaactgatcccaaaagctggaagattattacaaatgaaaactttgaagatgcagaaacagctaaaaagataattattcagtttatagggagctgtaaaagtggatattactcagcagttcggagatatatcaagacattaaccaaacatacagacgagagactagtgattactacaagtgcagtaactttggctctacgaccattccacgtgaaacagcctgcttttgttgatgacaaccaaccggacacgaatttggctgttgaagaatatgtttctctaatactgacgattcctcggcttgtttgctacctgccaagcgctctcatacgtgcactgaagcacaagagcatactaatgccaagctttcacaccatattggtaaaactcatatcatattttcttagaccaattaatttcttcttaaagtctcaaataggatgtagagagaattggctgactagttttaaatctctgttacttttttcgacgaactagttacttatttttttcaaaaaatcgaagtgcttattaaagtgtggcaggtgacaccagcttttgaaggacaaaatcttgaacataatatcggaaatggagaattcagagaagcaaagttgtaccatggagataccttctgttggatgggttatcgggaacatcatatccctcgcaacagttagtgaaaccgattttatggatccacaagaatcaaatccagagatgttttatgtcttgtatgttcatgttattgtgactctcgccgagaatctattgtctcaggttgaaagtgttggaattcaggatattcatcttgatattgaggccacatcgaatgagacagagaaaggaaattcagttaagatttcttttgtggaaatgcttcgaccagtatgtcaacagtggcatctcgcaaaactgttggcagcttctgggaaagaaattcgtgttatagcagataaagatgcatcaacgagtagtaagaaaggatcagaaacactaggactgcttgatatagcacgattatattcatgcatgttgagaatcttctgcgtgatgaatcctgttctaggacctttgcctgtccttaacatgttatccttctgtcctggatacattgtctctttgtggaattctctagagagtgtcctactccctgaaaatggttgcactgctgacgatgcatctcatggatctgctaaaacttcatggaatacaagaagtccttctgagaagaaattgaaacatctcaagaatgacagtgtcaacaagtgggtgaatgtgctaaacaagttttctggtaaatcaccgggaccacgtgaacatgtggagtgtactagtgatcaaccaggatcaggccaggttaatgagtcaactaatgatgtatgggatgtggaaactctgaggggtggtcctgtaggtatctccaaagaagtgtcatgcctgcttcatctattttgtgcaacctatgcacatttactcgttgttcttgatgacatacagttttatgaaaagcaggtaaatatgctatatggtttcctgcagcttatatgtcattagtctgatatttactaaaggtttgttatgtcatataggtcccctttatgctagagaagcaacagagaattgcatcaatgcttaatacactcgtgtactatggattgttgcgaggcacaggtcctgagagtagacaactgatggattctgctatcagatgtttgcatttattgtatgaaagagattgcaggcaccctttttgtgcttctgccctgtggctctcacctggtagaactagtagacctccaattgcatttgctgccaggactcatgaggttttaccaaccagtgatgttcttacaactccaagcatgggttctgttataacaattactccgcatgtctttccatttgaggagaggtaatcttacgttgattacccttcatagcctttccatgtcttttatctttgtgctacaataacttctaactaactttatctgttgaatgatgttcatgttgtgctatccctgcagggtccatgtgtttagagagtttataagcaaggataaagcttcaaggaaaatggctggtgaagtggatgcacctggtgcgaggtcaatagagatagttgttcgtcgaggtcatgtggttgaagatggatttcaacaactgaattcaattggtagcaggctaaaatcatccatccatgtctcgtttgtgaatgaatctggccttcctgaggctggcctagactatggtgggctttcaaaagagtttttgactgacataacaaaagcagcttttgctactgagtaagctcttctgtatgtatgcatactttattctagtctttgttgttacttgttccagtggattaagttttatttatttattggtatgtccattatttttcttttccaaaaggtatgggttattctcgcaaacccctacttcagataggttgcttgttcctagcccatctgcacggcaccttgagaatgggattcagatgattgagtttcttggaagaattgttggaaaagctctatatgagggaatactgctggattactctttttcacacgttttcatccagaagcttttggggcgttatagctttattgatgaactatcagggcttgatccagagctctacaggaacctcatgtatgtcaaggtaaaaaccgttgcaggtgatatatctgtcgcctcatatgtcaaaattcaatcttgtaataagtatcacaggaaagggtttctgagatcaagactttgtttatatgcagcattatgatggtgatttgaaggaactctgtctggatttcacagtcactgaagagttttgtggaaaaatgagcataattgaactcaaacccggtgggaaggatacttcagtcacgaatgagaacaaaatgcaatatattcatgcaatggctgactataaacttaaccggcaggtatcgtctttttaacgttttataaataatcttaaggtcaatcatcctgcaaaacaaaagttacttcataattaatgaggtaaacatgttgtcctatgtcttgtctccaatgcagattgtgcccttttcaaatgcattttacagaggattgactgaccttatatctcctgcttggttgaaactatttaatgcccatgaatttaatcaggtgtgcggctctaatgtaatgatttctagatttttttcttttgtacaaagctattgtctcacaaagattcctttacagttactctcaggaggaaaccatgatattgatgttgatgacttaaggaggaatacaaaatacactggtggttacagtgatagcagtcgaacaatcaaaatcttctgggaggtaataactcttaatcagaagtcctgatctctacgttttctttctattctgtttgccaatttatgacatatgctgagagtttgagtgcggcttgtataatttctctctgggcatcctgtctcaggtcatgaaaggctttgaaccgagtgaacgttgcttgctcctcaaatttgtgactagttgttctcgggcaccactccttggtttcaaatacttgcagccaaccttcatcatccataaagtttgtttttgaacttaagcttagaaatgtatgtttgatattctgtttggtaattttgttttcttacttttgtgctttttcatcttctgcaggtctcttgtgatacctctctttgggctgctattggaggacaagatgtagaaagacttccatctgcttctacgtgctacaatactcttaaggtgaagtttcaatagtccaattatctttgtagtctacatgtgaatattcctatatcttttttgttcagtctttctttttggatttcttcagcttccaacgtataaacgagcaagcactatgagggaaaaactattgtatgcgattacttcaaatgcaggatttgaactctcgtagagacctctaaccaggtattcatcttgttatgcacctagaccttttatcctttattctattcaatgtatatggcttctgtcaagttaaactagtaaggctggtgtaaacagtgtgtttggtttatcttaagattatgggaacttgtttcttcttggtagttgtatatgaatatatgataatcaactaagctgaaaaaatcttcttaagctttaccaaaattcttgctgtaatcaaccttagaaatgttaaagaggtagattcggaacaaaaataaaataccaaagattgtgatcttctcaaacaaatcttggacctatagacccatcaggccatcacacagtgacacagaccagattggtagtttctacattcagtcacacacacgcacacacaatctgtctcttatttgtgagttacatatatagagagagaaagagaaagagagaagagagagagatagagagagagagacaaactttggtagctatttgtaggtatacagtttgaattcaatccaactggaatgaagctcaattcaattgattagagaaatcccttgacccagtagttgaccagccaacagctcgtttacagcctctgtgggatgaaatccatcccaaaacacatatcctgtggcatttacacacgttccgaaggatagagaattgcaaaggaacgatgtttctattgtccctgttccgcagcatgccctttttgtttcaaagaatcctagaatacatgtagtttagacatttaataagatgttaatggtatcttgttagttgctaactagattaaatatctgagttcttcttcctgtgaatagctcactctatcatggtctaaagttgaatgaggatttagattttgcaggtgtgtaccattgtcagttgggttggtgatgatgtccaggaaaggttggtagacattaaaggcgacgagtctgaggcctgagtgtctattcatcagtaaccgggttgtgttctcaagtttagtattgaacatgatagcatcattgttcagtctctcaacacaacttttgtttcctgcaccgaaaagagtgatagctgcaggcaggcaacccatcggcggtagcgatatcactccgattctccttgctcctagttcatacagattctgttacaagtgacagtatgattcttgttcacacaaaaaagggtaaataactgatacgatttttttgtgtttcttgtaaatttgcacattcatatggttgccttattatgaatatcgagttctacaagttcgttactaaacttagaagtacctggatgaattctgagaaggatctcaggagaatgtcagcgaactgatcaggtgtatttaggatgttgagtagaggattgatgtaataattctgaagaaagtcgctagatcccgcactcaaaatgtggatacctctagagaacagtatgcgcgcgttccccctcccgatcattctcgttactctattttgatacgccctgtaatagctcagctgtcgtgttaaggagatcgagccctgcaaaaggaagagtaaaaccttatggatcatttcttgggtatgtgtgtaatgatgtttgactgtgttgtctcctttacaaatggaacagatgtggcatcatagtatcctgaagaagctgatgcaaagttggcaccgatcaggatattctcgttgcttgcttcccggcttaggaatgcaggtgggtatgaagagaaaccaaggtactcggctagacacaagtaggcagattaaaaaaccaattagattaggaagagagaaaaagtatttgaaggtaatacttgatggagagatagatatatgtggttttgtgagaaagactttacctgagaaatctacagcgagttttccgttgcagaatcttccggtgggtctttggtcgatgaagtctctaccgtaaggaagaaagttggatttgacaatgctgagtaagttattgttgttgccaacgtcaacaatggagtcgccaaacatgatgagtgcaggaacaacagctcctttggatttgcagaagaaacaagaaaccaagagaagaactctaaaccccgaaactctcatcttttgcattccttttcgttcctgtctaatgcaatcaggtcgttaggacaaatagagaagagagagaagcagagagaaagaaatagagagtagtggtgagaaaatggagacttaagaagatgatgcatgttatacaaaatataatcattctccccatgcttatgtttaagataaagaaaacgcatttgctagtgcaatagagtaggtggaaattgtttatgaggtcagtctctttggtcattgatcatgggaccatgatcagtaatatctttgcatcctcgaacataaacttccgtcatatcgcgaaatttcaattcgggccacgcgtggaggctttggtttgaagggtagctctatcaataaaaatatgggtattggggaaatcatctaatcttgattgattgattgctcaatacttcaataatctaattttggtttctgttgaaccgttggaggcatgaatataaaattctgataggatacagttttcttgataagagatgatatgtttgaggaaatcaaagtgtgagctccaccaacttttagttgttgttcttgtaataatgtattgggtaatgtggcatccacctcaaagattgtggttaaaccatcatggttttttcttttcctttcttctttcttctattgtgcttaagccatcatggtttatttcctttcttgtacatagaaaagtcataagctttttaaaaaaacttatgaagaatattacaaggaaaaaacaagagtttgggccatatcaccaccatggaagtaaaaatctctacttggtacaagacccaaattagtagaaaatggcttcttttgtaacaaatttggactgttgggccatattgttttgtttatacataaattaaagcccaaaatgatttagttgggtcgtctagaataaaccgaactattaaaaaatcattggtagagtcggttatgttatttcaattgtggctagcatgaaattaagttcaattattttacatttttactattaagcttcatattcttacgtcgaaccgaattgaaattagagaaaacagaaagataaaccgaattataaacaaaaacaacatagactagagtcggtttaatcacgtgtagcttataaattaacatcagtaaatttccatttttactagcagcttgaaattaacgtcagtgatttttacaatccttgactagtagcttcaaagtaaagcagcaactcttatttatttggggttttcactttttccccaaaattgtctccgacttcaaacataacacaaatcgttcatcgtcttccttctctctctctgattctctcattcgcgaatttcaaaggttctacttctctcagaatctcagctctttcacgaatcaatggagaagttaagatgaatttgggtttctaatttgattggttttttgttggctacagctatggcggatacggtagagaaagttcccaccgttgttgagtcatcttcatcatccaccgttgaagcatctaatagcgccgagaagactgagcccacgacggagaagaaaaagtggggcgatgttgaagatgatgatgatgaagaagaagctgtatcggagcttaattcattgagcattaaggaagaagagaaacctgattctattcttgaggaacctgaagattctaacatcaaagctgtattacttcaattccctctctctctttgatcctaattacagtctagggttattagattttccagattcgtttggttgattttgaaatctggtgttttttgaaggttacttctggtgacacaccatatacatcagcaagtagatttgaagacttgaacttgtcacctgaattgatgaaaggcttgtacgttgagatgaaattcgaaaagcctagcaagatccaagctattagtttgcctatgataatgacgccgccacacaagcatctgattgcccaggctcataacggatctggaaagacgacttgtttcgttcttggaatgttgagtcgtgttgatcccacattgagagagcctcaagctctctgtatttgtcccactagagaattagctaatcaggtttgtttagttactctgattttggttatgatctgagagtaatctgattgttgacttcttttaatggttgaatgacagaatatggaagttcttcagaagatggggaagtttactgggatcactgctgagttggctgtgcctgactcaacgagaggtgcaccggcggcaacaagaggagctcctgtttctgctcatgttgtgattggcacccctggaacgcttaagaaatggatggcatttaagagactaggtctaaatcatttgaagattctggtttttgatgaggctgaccatatgcttgctacggtatgctctttcttctgttttacttggtcttgttattttctcaactgtaatgatttaacttctgtataatgtgattatattttcccttcatatgttgttgataattgttaattcattgctgttgcaggatgggtttagggatgattccttgaagataatgaaagacattgggagagttaatcccaatttccaggtctgtttaactagtgtctgatttggtcatgcttcttgaattataagtaggatgacagttgatatctagtggcatatctatcgtgatatctagggggcacaagatagtctactgagcttatagttatacttgtttcaatgttcagaagctcttagtaaatagaagcacctcagctgtgtttttttctgttgtttagagccgtcatatcttaagatgacatatatgtctgtgctaaaatgattatgaatatcttcactgcagaaagctgtactaatgactgcttgtgtttcactatatttatggctgttaatctcaattcaaaggaaactctttttctttctttctcgtgctagatttgattgtgtgcttgtgttcttgacctattttcaacaggttcttcttttctcggcaacttttaacgaaactgtcaaagattttgttgcgcggacagtcaaagatcccaaccaattgtttgtcaaaagagaggatctggctttggactcggtgaagcagtataaagttgtttgcccgaaggagcaaaacaagatcgaagtcatcaaggatcagattatggagcttggggatattgggcaaaccattatctttgtgaaaacaaaagcgtctgctcaaaaggtgcacaaagcccttgcggaaatgggatatgacgttaccagtgtccatggtaatctgactgaatcggacagggataagatagttaaagagtttaaagaatgccttactcaagtgctcattgctaccgatgtcattgcaagaggttttgaccaacagcgggtaaatattgtcctttgagccttttcctttcttctcgttttacctcaaagatgcttcgtagttaatacctcttgttggttatatacaatacttgcaggtgaatttggttgtcaattataatcttcccactaaatatgaaactggagagccagattatgaggtgtaccttcacagggttgggagagctggccggtttggtcgcaaaggtgagttttgattcttctttttttctttctcaagtgtttccataagttcttatcagtttctgaactatgtatttgtattgtaggagcggttttcaacttgctgcttgatgatggctgggataaagaggtgatggagaagatcgagaagtattttgaagcaaatgttaaggaggtattataagatttctgaaaactgctatatatctttcaagtgtttgttaaaacagtatccaacgattttaaactttgctgcagatcaagtcgtggaactcagaggaagagtataagagtgcattaaaggaagctggcctgctggacgagtgaggaagagagacagcatgtgttcaaaccatcttaaaagactatgtcgtctgttttcttgagattgttttaagaaagaaacttgtatacctctttgaggttttcttgtaatctttttatctgattgctgagagtttcagactttgtagattttttgttaagggaaaaggaaaacattttttatgtcaatgtcaatcactttagtatgaacctaaacagtaaacagcaaagcattttttttacaacaatgggtaagagtcataatacacaaccaaagtctcgaattcaatgtgtaaagctttttaatctcaaatgtttgacgttttagcggcaagatggatcaatgctcgtcgatgataggtagtacgaagcttcttgtatttctgcacaaatgctgctgtatcaatctccttctctaggaacttttcttgcagggcttcggattcttcatccacctgattcatagcctctgcaaaacaagtaaaaggtgtttagaacagtagagaaaatgagacgaggggagaatccattgcaatggtaaattgttaccttgaagtttatgaagaagagaaccaggggagtagaatttgaggatctcttctttttgcctctcaagctcattaagcttttcttgcgcagttgcgagctcagttgtacggataattctgcactgtaaaataagtaaagactggtaaatcagagatatcgaaaaggtataacatggtaaaactgaacaagaaaagttggttcttgatacacacttggtttctgagctccattatctgtggctccttctccaagttgtctcctgttacatttgatcaaatggaaagttctagatttctggattgaactaaagtttcctgtagaattacatgaaccatagagtacttactagctagctgcaatgtttctctacggagctcatctttgatctgacggacagaaacaaatcacgaaaaaattaacgtccagagactataacaaggaaccagaaagctgatgacatgatacaggctttatcaaacaatatcaatgtatagacttgaaagagcactaatgaattatatcaacacagaactaaagaagctacatattcttagagctacagataagaccctcggttatccagaaacaaccgactgttttagagactataacaaagaaccagaaagctctaattactggcaacatgtagaagatgacgccatgataaaggcttcctcaaacaatatcaatgtatatacttgaaagagcaccaatgaataatatcaacacataactaacgaagctccattcttaggactacaattaatagtaatactcttagctatccagaaacaactgactgttttagagacttacattattctggactttgacctggtcaagagagagcagaaattgctgatacgcatctttgtcagagagaagcttcctgagttcatccacgctacagaaaagtatacactattcaaaaagaagacatacaaaaaaaacgcacactcgagagaaggataacaaacaaacaaacaaaaagagcaaaccttttgtctttcaagaagacgataatgccagctgcttcacccggtgatacttgtgctgaaatctgacctgaactttgaggccgggatgagcttggcgagctaactaaagaaggcgagtaccatggcgactgtgaagaagcttcctgaggacgagattgcccttgttgttggtcttttgatccccttcacgtacacaacaaaaaaaagaaacatcatcaactaactatctcagcttccaagttaatataatacatcacctcataaacttgaaaggtgcatttatacagcacatcattgtaaacctaatatcagtaactatgaaccctaaatcagtagctgagcaaaatctacacttgtcaattcacctcaaaaacctcaaatatatcattatagctcaacaaactacacaacaacaagatttccttaatcgctaacagacctaatgtctggatcacgcaatttcatcaataacatatgaatcagatggcaaaaaattcgcaaaatcataccagaaattgaacatcgtttctagaattcgccgactaacgaaaggaattgactttttcttgttctcttgtacttcttcttcctaccagatcgacaaaatttaacaactttacagaaacagagtttacagagtttcaaagaaaattcgatcttctctgtttcgtttcagattttgctacttgcttttaaaaggcccaaatacgaggaggcccatattaagttttgattaacaaaacgtagtcgttttatgcatcgtcgtccttatccacgcgtaacggttcgcgtttctacacagagtcaaatatttctgcacggaagcttcgaaaagaggtcatcaatggagtcttcactcttttctccatcttcctcttcttactcttctctcttcactgcaaaacctacgcgtcttttatcaccaaaacccaaattcacattctccatcagatcctccattgagaaacccaaacccaaactcgagaccaattcatcgaaatcccaatcatgggtcagtcccgattggctcacaacactcactcgtaccctttcctcaggaaaaaacgacgagtcaggtataccaatcgcgaacgcgaagctcgacgatgtcgctgatctcctcggaggtgctctcttcttacctctctacaaatggatgaatgagtacggacccatttaccgtctcgctgctggtcctcgtaatttcgtaattgtgagcgacccagcgatagctaaacatgttttgaggaattatccaaagtacgctaaaggcttagtcgctgaagtctctgaatttctatttggttcgggtttcgctatcgctgaaggacctctttggacagtaatttcatctcctcctatctcaattttgaagtttttggaattgtggaagtaatgtgtgactgtcttgtatgataagtaactctaattttagggtttagattccaatcttctctattgggcttagctgaagtctgattttttacataggcgaggcgtagagcggtggttccatcgcttcacaggaggtatttgtctgtgattgtggagagagtattctgcaaatgtgcagagaggcttgttgagaagttgcagccttatgcagaagacggaagtgctgtgaatatggaagcgaagttctctcagatgacacttgatgtcattgggttgtctctttttaactacaatttcgattctttgactactgatagtcctgtcattgaagctgtttacactgctcttaaagaagctgagcttcgttctactgatcttctgccatattggaaggcaagtttcctgtgttttttctgtggtttgttgattgtgtggaacaattggattcttgttaattgagagggtttggttgtttttttcagatcgatgcattgtgtaagatagtcccgagacaggtgaaagctgaaaaggctgtaactttgataagggaaactgttgaagaccttattgctaagtgtaaagaaattgtcgaaagagaaggcgaaagaatcaatgatgaggagtatgtaaatgatgctgacccaagtatcctgcgtttcttgcttgcaagcagagaagaggtttaaacttttttccttaagtttataagcaaatttggcctttcattatcgcataatcgaagctgatgttgcattgtgagggttttcaggtatcaagtgtgcagttacgggatgatcttctctcaatgctcgtagcgggtcatgaaaccactggatctgtcctcacttggacactttatctcctaagtaaggtaccttaatgtatcttctactttgctatgctagagaatttacttggatgggagcttctctgttctcatttacctcttcaaattctctatgttcatagaactcatctgcattaaggaaagcacaagaagaagtagacagagtgttagaaggaagaaacccggctttcgaggatataaaggagttgaagtacatcactcgttgtataaacgagtcaatgcgtctctatcctcatcctcctgtaagcaatcaagctcatctctctaattattcatgaactaaattttctgattgatttgtttcctggtaggtcttgataagaagagctcaagttcctgacattcttcctgggaactataaggtcaataccggacaagacattatgatttcagtctataacatccatcgttcttccgaggtacagttctcttccttctctcgtccatagtataacataggggagcctaatccttctcttcaatgatctttgtgtggttcggatatctaaccggagtggacattcctagtattacattcatgcccacatttcttatgtgtttgttgtttgttattccaaaggtatgggaaaaagctgaggaatttctgcctgaacgattcgacatagatggcgcaatccctaacgaaacaaacactgatttcaagtaaactcagtagaacacatcttttgacacaaactactgaatcaagattagtggttttgattagggaatttaaaagatgattttcttttttcaccagattcatcccattcagtggagggcctagaaaatgtgtaggcgatcagtttgcattgatggaggcaattgtggcactcgcggtgtttcttcagcggttaaacgttgagctggttcctgatcagaccattagcatgaccacaggagcaaccatacacaccaccaatgtatgccaatgttctcacactcgagagattaatgagagtgtctgttttgtttagaatgattccaatttctctaatgctgatattttcaatttcagggattgtatatgaaggtgagccaaaggtaaaaaccagaatttatgttttcatgataattgattggtgtgaatggacttgtttcatagtactcttgagaaataaccacaaaaaaatgaattatggaaaatagttgtaccatcggaaatgtgaattttgaacagtgagatgctagtaccattaaagtttggtaattgtgttatcatttcaaatcaaactttcatacagcttgtgtttgttctccatttttcagtaattacgaaaatcaaaattttatttttttttgaatttctaaataatagactaaggtctaaaaccatcccattccatatggaccacacgtaacattaaccttaaaaaccatataaaaccatataaaaccaatactagtgggttctatagcgatgtgtagtttcactttcacgtacgaggaagattaaaaaaaatggagaacgaaagctcagagagtagaaacagagctcgtcttgccattatggagcttgctaacatgattagcgttcccatgtctctcaatgccgccgtgcgactaggcattgccgacgccatttggaacggcggagccaattctcctctctctgccgccgagatcctccctcgcctccacctaccatctcacactaccattggtggcgaccccgagaatcttcagcgtatacttcggatgctcaccagctacggtgtcttctccgaacaccttgttggatccattgagaggaaatactctcttacggacgtcggaaaaactcttgtaaccgactccggcggcctctcttacgctgcctacgtcctccaacatcaccaggtttatgactcattttcattttccaaaattggagtgatatattaaaggactaatgatggtataataaactaatgtctaaaacttgttgtgaaaatgatatatattacaggaggcgttgatgcgagcatggccactagttcacacggcagtggtggagccggagacagagccgtacgtgaaagcaaacggcgaggcggcatacgctcagtatgggaaaagtgaggagatgaatggtctaatgcaaaaggcaatgtctggcgtatctgtaccgttcatgaaagctatattagacggctacgatgggtttaaatcagtggatattttggttgacgtaggaggtagtgcaggggattgtctgcgtatgatccttcaacaatttcctaacgtccgtgaagggattaatttcgatttacctgaagttgttgccaaagcccccaatattcctggtgagattttgtatttatgatatattgtacgtacgttattttctgaaagtaaaaagctatttttagtaatgtacggagtaataatggatgatatattgtatggtttaggagtgactcacgtgggtggggatatgttccaatcagttcctagcgctgacgctatcttcatgaaggtttgttgtaacattattgtctgtcacgagaatacacctactaacatttttgctaataggacgaattctagtttctgtatatagttttaatgtttagtgatataggtataaatttataagtcgcttcggacaatatgtttggtagtatatagtcttagttatcgttagatcatgcgactggtcactttcatttatttatgatcatttaaatattgattatacatttctcaaaccaaaaacttgtgatctgttagaccatggatagggatctcatgtttgttgaaagaacaacacaaacaaatacacacattttttgcttctctggtcccaaattaatatcttgtaatattgttgtttgagtgtaaagtgggtgttaacgacatggacggatgaagaatgcaagcagataatgaagaattgctacaacgcgttaccagttggaggaaagctgattgcgtgtgagccggtcttgcctaaggaaaccgatgaaagtcaccggactcgtgccttgttagaaggtgacatctttgtcatgaccatctatagaaccaaaggtaagcatagaaccgaagaagagtttatagagcttggtctctccgcgggattccctacttttcgacctttctacattgattacttctacaccatcttagagtttcagaagtaatattcaagcatttttcttctcatatttctaaaagcttcaaaataatgaatcaaaagacctctttgttaattgagttgagatatctagtgaagacattaatattttcatcaagatgtaataatctaaagtctatattctaagtgcatccttaaaaggcattttccatatatataagtttcatctttcgagaaaaaggaaaaaagactctttaagtgatgatttcaagagtatttctaaatcactcattaggctaagagaagagttcgaaagtatacatattatgcacattatatctatatgaatttttcttctttggcaaaaagaaaaatcgtttggtgttattcttataaatcttatgtcaacttctacattcgatttttctacacgagactcaattgctccaaaacatcttggattaaaattgaaacgttaatactcgaagatcccttttcttccacagcctttttcgccattactgcaagttcttgaatacgtctccttcgtctcacgaattcattatcatcatcattttcgtctacacgttgacaatcttggtccatcaaaagctttatagctttcacaacactcggtttcttgaccaacactccaagtctctcctcgtctccccatctcaccggaatctccaccccaaccctaaccccgatgttcaaaacctccacgatgagtttctcattgagaaattgttcagcgaacaacggccatgtgatcattggtacaccaaaacatatcgcttctattgtagaattccaaccgcaatgagtcaagaacccgccggttgaaccatgtgagagtatcatagcctgaggactccaaccctttattactatccctcttcctctaactcgctcttcaaaattttcgcgttttagccattcgtctagctcaatcatgtgtttttcctcggtctttatcacccaaataaagggttttcccgattcttctaaccctaaacctagttctatcaattgattaggtattagtcgacagaggctaccaagagaaacatataagactgaccttggtctcatcgagtcaagaaactgcaagcattcggtctcgcttattgcgatgttaccattacttcctctatcgaataggtcagccatacggtcgttgcataaagaaacgggtccaacgaaccataccttcttattgatggcctcagcgtaggcctctgcatagccaggctccaattcctggaagctattaacaataaccccaaaggcttctgattcagattcacgcatcttctcgcgaacgtcatccatatttgctaacttctcaaaagcaccaggtaactgagctctagctatctcaatcctatgtggcattcctggtatagggaatggctctacggccgaagaaaccgagaggtgcgggctatgaagatggatattgtgcgaactcaaaagagagaagcaacacattccatggaacacgatcctcgggattttgaacctctttgcggttcttgacgtccaaaaaaggcatttatcggagattatgcaacttggagggatatcttgttgctcaagaaaccgttccatgggctcttggagtttatccacagcgtcatagaatcttcgtaggaggtctttggagggcaaagtgtccagagtctcacaatctttgggaagaccgaattctttgtaaggaattggaaatttaacgacattgatttcgagacccgactctaatcttgctcggtcaactgtcttcgcaaacctagaagcattttgaggggttgtaactatggtaacgatgttgccttgtcgtgcaagaatcttggagatgtcgaccatggggatcagatgcccttgagccatgagagggatcaaaacaaagtgaagtcttttggcttttgaaactatttttgattccatttttgggtttagcaaatgtttatgcatatacaaaattcgacaatgtgtatatacgtgtgtgaatgcatctggtgagagacctttaattaattgggaaagtcatcaaaagctgtatatatatactgactttgaacaagtcaccaaaaaagaactattgtttagagaaccaatcatgtaccctcattcttataaaaaaaaatcgctgacggtgatgagttacgtcattcatgacacttaatgagttacataagataaaacttcaaggaaaatatatatgtgaggaaaacttcaaggaaaattcacaaatgaaacaaaaaaaaaaatgttgagttatccagtgagatatgtaaatttaagttaaaagaatcttatcttaaatatttattagtaaaacaagttaaatattcactgacacttacgaaaagacaactatatatataaaaatatcgttatcttaatttggtttattttgtattacgacttctgtataaagaagtaccaagtaggtcaagcttggccgatggggctgttagagttccattgattatggttttgtctccacctaaagatagattatttgtttggttatcacatgatcgatcacatcgttaatctacatgagtttcatttaatttctttccggtgtgttcaaagagatcgatttgttaatgcaaatgaaatcaatttaaaattagcactcgatagaatttcaacacatttgtacaagagttcacgttgagctttaaattgaacaaaagaagaagaattaggacttctaattttatacaaaatgtgattttattttcctcataataaagagtcttttttgcgtaggtttaggttcacggagttcctgtttttctttgttccaaacattggttccaagatcgcatgaaagaaagagagaaggaaaacaaaatcaaaggcgctatctcaaagtcaagatagattgaacaagatatgatattcgatatgtaattttttaatttatatttttggaatcaaattcatctggttgtaatgaacgaatctataacttttttattttttttgggcaaacgaatctatacttttgatgcgaaatgattgagatattctataaagttattgtctatcagaatatgtatactaaaaagattattttgatgactaattaagaacaagataatgtatggaaagaaaaaaagataatgaatgacaacttggatatatttttatatattaatgtatgatctcaaccctcggttatgtaggttgcccatcgaaatatattggagattaagcctttaaaaaaaaaaaatatatacatatattggagattgggaaaaaatacttcccaagtttaattttttatcatcaaaagttcataaaatattttaagtcaaggcatttctacaaactaattaggaaactatatacctagctagctagcttttagcccaagaaaatcatatagttgtgatagttaatttaagcattcgttttgaataaacaaacaccaaacaccacggcatattttccttatctttttagagttccgtctgaaaaggacatatttttttgtctgcatgaaaaaggactctttgaaacgttcaaattgtgcgtatgtggcgaacaaaccaacgtaagaccagttcaacttttggaatattggagcattgacgtgtatcactcataccttttgggtaatcttaatttgtctctatattgatgggattttaaatatgagtccttgtcatatatttttttttttttgataagcaggaggttcggggcctagacccttaatccatgcagggtccggagaaaaccaggtgaaagtctctggccaaataaaaataactagcaatttcacgcctgaggggaatcgatccctggcctggaccaaccgggcaattcctgctcaagtggaaaccagtagactaccaccacttggtttccttgtcatatttacaacatgaatggtatacatagtattgcttttcacaagtcgtcttctactgataacaagtttcattattttttttgtaatcaaatattatttgaacatttatcttcaaatgttctcttttccgttcttgttttatgtctttgtttacaacttgtaaataaaaattctaataaacacactatcatgtatatttcatagtttcatttagagcaaaacataatattttaacacaaatgaataaaaaagaatccgctctagttgaattgtttaaaagtatatgacatagtttcactttgcaactgtgtctacgtatatatattcattttgtttgatggagcacgcctatttttgcataagaaaaatactgaaatctcttactcatgtaatgtgtatctgtcttcaattaccaatcattggtattagaagacaaccatggctttcactaactgctctgcgatcagctatgtacaagatcttcatatttgactaattatattgagacgaatcaatcaataaacttagacttttaatcaataaaactatatgagaaaagcaaagccacgtccaaatgtcaaaaatgaatcaaataaaacaacttgcaaaagaagattcaccgaaattttgaaaacaattctgcaatcttacccggcccttaaaggactgactagtatgagtatcatatattaatctaatcaaaatcgatgactggaaatatcttcttacgcaacacattaacatgaagatgatccaaagttccaaactaccgtgccaaaaaacttgatttttcaaatattttttagcagaaaactgaatagactaatattaaacgaagaaaaaacgattcaatataagtcatttgccgatgatcctctcttggtcgtctttgaaatactaatataacttattttcttcatttaatgtgacagcaacagcaacctctttatgctttttaaattttatatgtttaactcattgtatataatttgatgtttttgaatcaaaatattaaatggagatgagtttttggtaaactctagagaagatatgttacccaggcccactagacttatatatgggctctaagtttaataacaaaaacctatattttaatacatatgggtccaaaagtatgaaacaaattctgtctggatattgtggatatatacagcacaaaagcacctttgacacatgaaacattgttaatctaacatggaaaataaaacactattttataagcatatattttgtttttctctggtgccaaataccaaaatttaaaattgattttgtgattgctccataatatcttgaatgagcaatgtgatattagaatctgaagatcctcctttttccaaagccttatttgccaagtcactaagttctgtaacttttcttcttctctcttctgcttcttcactatcacccattagctcatccacagcttttctcacacattctctgctcaccatcgctcctatctcctcttcttttccatatttcatcaatttctctactcctatctttaaccctgcttttagtatctgcacaactaacttctcattcaagaattgttcagcaaacaaaggccatgtcaataatggaactcctgcagtaattccttctagtgtcgagttccatccacagtgagtcaaaaaccctccaatggatgcgtgtgagaggatgaaaacttgcggcgcccaacctttgatcaccagtcctctatctttgatccgctcttcaaatccgctttgttgcatccaatttgctaaatctccatattttccccattctcttataacccatatgaaaggtttattagatgcctcaaggcctagtcccagctctttgagctgagccaagggaagattacatagacttccaaggcaaacgtagagcactgaaccagtttcttgagagtcaagccattgaagacattggtcttgaccaatagaagccttatctcctcttttagctttgtctaaccctaacctattgcacaaggaaacaggtccaacgcaccaaacttttccagcccttgctttcctatattctcttgcataatcaacctctaactcttcaaaagtgttcacaataacaccataagagtcattatcagcttcaataatcttggccgtactctctttcatatttccttcaacaggttgcaacacagagacctgaggtttcgtgaactcaactttgtcaggcaagccgggcaaatcaaaatactcgtcgtttgattctatcattttcaagatcccgctttctcgaaccacttgtatagacatgaggctgaaacaagaaaacccatggaagataagtttggggatcttgaatttcttggcaagtcttgaagtgaaaggaaggctcatgtctccaatgatgcagcttggccgcggctgaaccatctcttccatagctttctcaacttgctcctcaagtgagttggcagcatcaaagaacttcaccatatcgcccattgaagccaacatatctaaactctcgcacccttctggcaaacccgtttgttgagacagaaacttaacttcaacgatgttgatagtcgcaaacaaagaggaaaatgagagtgaagtcttgatcttggctacattttgagtagttgtgatgatgcagacagtcacgccttggcgctgggacaagagcctagagatgtcgaccaatgggatcatatggccttgggccataaagggtattacgacgaagtgaagaggatcatgagaacacattgtagaagatcttacaaggaaaaaaaaaaaagatcttttaaggcttgaaaagcaggccactctttacaaatgatatatataatacgatgttggaaaataatttatgtgtatatagctacgataaagttttagatcacagtttgttttgacccgtctaaagagcctgcgtaagaaaattatattttactttaccaagaaaactttgaattgagttttggttctagacagctgtcccaacctatacgatgaaaacaaatccaaaatatacagacacaatatgtgataatattttctaatacatgtgaaaaatagaccataacatttagactagtgatggcttttattacttacattgactggaatcattacgttttctccccaatgctgatttggttatttcagaaccgacccaaattctcattagtaatggccatgcctctcttgggatcttgctaaccaacgctccaaacacctgaacaaacacttaaacttacaagcatgtgtctccattttatcttgaagtttagagtaaaaataacagtttataacaaaaaggttacctcaagtgattctcttagttggaacaattcacaacttctaaattccttctgcattagatttgctcattcacaaactaaagcatcactccgtaagcctcttcttgcctatatcttaaaacccagtaaaggaagaatagttcagaaacaaattcaaccaccaaatagagctgcaatactcaagatatatctcttatctcagttattatatttcttagaggatatctaaattctcaccagaggaaatcatttgtttctcgagttcctggactgcatcgaatatcccatgagcagtataggttttgatcatagtagcaaaagtgattttatcaggcttacattttctctcttccatttgtatgtataattctttcattgtagccaaatcaccagcctgaccatatgcattgattatgcaattgaagaacggtgtatccagtaccacatctgaattcacaatttgcctcaaaaccgaatctatcttaacgacaagacctgctttgctatacgcgttaacaagcgaacaataagtgattgagtttggtttcactccttgatacttcattttcctgaatacatcatccattttctcaattcttccagcttttccaaacgtctcaatcactatattgtaagtgacagtcgtcagggagaagaaccttttctccataaaatccataacagagcacatcttcttatacataccagcttttccaaatgacaggatcagtatgttaaatgtagtgatatccggttgcacccccatcagctggaaccgactataccagctctccatcttcctcatgttgcgaccatttccatatgacccaatgatcgagttaagcgtacaaacatccggaagagaatctccgtcctcgatcatatcagccagaacactttccatttcctcaaacattccagcctttccatacccatcaataatagtattgtaagtaaccgtgctgcatccaactccaagatacgacatctcaagaacgatacttttaaccagatcaaaccgacccagtttgcagcaacaactgatgagaacagtaaaggtgaacacatctggcttgcagtcactaacagatttcatatactcaagtgtagaaaacgccttgtctagaagctcgcttttgccataaacagagataagagaggtatacacatcaatggttggtttcaatccttcagataacataacttcgaaaagcaagctggcttgatcaggctgtttacaattcccaagcactttaaacagctttgtataagttttgcatcttggttcataccaatgctgcttcctaagaagattgaaaatctataaagtagagaaacaggaaagtgaattctatcgaatctatgtccaagtatctgtaagaatgaagaaggattaaagagctgtaccttgagagcagactgccatcgattctctttgatagcttcgtcaagagcttctagaacagcttttggccataaagttaagtacttttcggaattggctttcctctcaatgcccttcacagcagcatctgttctcagaatccgagacaattctttcttaggatctacttggtgtcttgttgagatcaaaccagaattcattttctctgtacgttcgttggggacctttgtcgaacacattgtgggcgttattgaaatagttggtatacaccgaaaataaacaggggaagatatatgttgctgaaccacgcttctgcaagaatgagaaacagagaaagatagatttaatataaacacaactgaagaattaaagaaacgtaaaattcaaaacagtatgattgtatgaaatatgagaatgttaccgagaaaaaccaagttgtgcgatctcattggcgtacgcggaagtagttccttgaacaggattttgtatcaatgccatcgaagaaaaatggtagaaagataaggtggagaaaaagaaactgcaaattttctgggtagaaagcagagctagaagacgacgacgataccgttgtttttccttcgtttttttcttcttctccggtttggtgtagcttctcttcggtttgtaaaatataatgaaatggttttagttttgatttggatgccggtttaatttggatttacaaaattaaaaatttagcattaatcagttttttcttgtccggtttaaaggattggattgatgaaggaagaaccaaatggagctttttccaatttaattttgaattcgaatttgttaaaacgagattgtccttggcaaggaaccggaatttggaaaatgaaaaaccaagaacacagttgaaagttatccacactagttaggacacgtggaggctaatgtatttcacgtggacacgtgctcatcactctcctctaaacgccgtcgtgaagtttaaaggtcagagacatcggccaccgaccaaatcagacaaggaaaagtcaacgatttgattggatcttcttcacttatgctttaaaaccgttcctgtaataaactgtgaagattgtaagaagattaacacgaatcaagaacatcgaactgttgactttagacagagagagacggagatggagtttagtgagttaaaggaagcaatagagaagatagagctcgttgatgctcacgcacacaacattgtctctcttgactcatcttttccgttcatcggaactttctccgaggctgccggcgacgctttaaccttcgctcctcattctctctccttcaaggtacacgacgataccaagtgtttttgctctagttagttttcgtttgaatcagattctaattaatgaaaacgttagcttaaagtttcctaattagtctcaaaagtattagttaactaaagtttcgagtgttactcaaaagatgttgacttgtttaggaatctcgtgaagttggtatgaatgtttttggttgtatgaatgaaacagaggaacttgagggagattgctcaactttatggcactgaagtatctttagaagcggttgaggaacatcgtaaaacctcgggtttggattcttttacttccaagtgttttaaagaagctcgaatctctgctctcctcattgatgatggattaaagctagacaagaaacatgatattgaatggcatagaaactttgttccattcgttggtagagtgttgcgtatcgaaactcttgccgagcaaatcctcgaagaggagtgtcctggtggttatttctatggttctgagagtactgaaccgcctgtttgggatttagattctttcaccaaaacctttgttgaaagattaaattcatatccttttatctttgcttttttaatacacgcttaatgattgtgactatactcactagtattggttaaccttgactacttcggtcacgcttgttccagagattgttgctttgaaaactattgctgcatatcgtagcggtttggatattgatacttatgtgagtaaagaagttgctgagaatggccttgttgaagtcttgcgaggtaagatggttgtgcttggtctatcaagaagtaacatagttgttgtctgatcaccttaaaatctaatattgctgcagctggaaagcctgtccgcataggaaacaagggcttgattgactacatccttaccattagtttggaggtcgctgtgcgtcgcgacttgcccttgcagattcacaccgggtatgcaagatttgatcaactatatgattgatgttagtaaagtctgatctttttatcaaacaaaccttacacagaaacagaaactcatgctcagaggtttgtagtaatgaaaattctccttttcttttgttgtttgagccagttttggtgacaaggatttggatttgaggttgtcgaatcctcttcaccttagaacccttcttgaagacaaaagatttggaaagtgtcgtatagttcttcttcatgcagcttatccattctcaaaggaagcatcctttctgtcttcagtttatcctcaggtttttcgtcatcccatttcaattatctgtaaaatcatgcctagtcattaacttattttcttgttccttaaggtttaccttgatttcggcttggcggttccaaagcttagtgtccatggtatggtttcttcagttaaagagctccttgacttagcatcaataaagaaggtaaaatttattttacttgcattatctttgttattgttcatgagtaaccataagatattattgcaggttatgttcagcactgatgggtatgcatctcctgagacctactatttaggttagctcaagtttctacctcttttctatagtttgtaacatacttatatatgttccaatcctgtttctaagctttggcacttgaaatcgtcttgcttcagtcttgaacatagctcgctgttttttgcaggtgcaaagaaagcacgtgaggttatcttcttagttctgagtgatgcttgtgccagtggtgatctctcactcatggaagctattgatgcagctaaagacatattctcacgaaattctattggattttataagcttaatatagacacagattcttctagtccacaaaatataatatctcccaaattgaagataaaggagcctgatgttcaagaagatagtagttcttttgtacgcattatttgggttgatacatctggacaacaaagatgccgtgtgagttttttttttttggtttcttctaaagaaaaaacctctgtttcccacctcaacgatttttccttagaagcacaaaaacttaactagaattctgtttattgtattgtttcaggctgttcaagcgcagcgttttaacagaagtgtgaagaagaacggcgttggtctgacctttgcatcaatggggatgacttcatttactgatggaccagcagaagagtctaaattgacaggtgtgggtgagattagacttgttccagatctatcaaccaagcagacaataccttggtactttactcgtgttcattctctttggagttaattttacagatgtttctttcttaattgtttccgtatcatattttatcattaggacgaagcaagagagcatggttttagctgatatgcaattgaagcctggtgaagcatgggggtactgtccacgagagaccttaagaagggtcgcaaaagttctcaaagatgaatttgacttggtaagaaatctccatatagccattctacgaaaacttttatttgctttttggttgcttaagctcaaatcttccttggcttttaggtaatgaacgctggttttgagaatgagttttatctcctcaagaacgttgtgcggtatgcgactatatatttcttgaataccggtttctttgttcaatccaatcattttcacaatcttaacacttgttctgtccattttttaaaagggaagggaaagaagagtatatgccttttgactttggtccttactgtgccacatcctcattcgatgctgcatctccgatcttccatgatattgtacccgcactcgagtccttgaacatcgaagttgaacaggttacaaataattcaaaaatccctcataatgatcagtctgcaacatgcttcttgacatgtatgaaattttttcatagtttcatgctgaatccgggaaaggtcagtttgaagtatctctcggtcacaccattgcatcccatgctgccgacaacttggtctacacacgtgaagttataagatcggttgcaaggaaacagggattgctcgcaacctttgttccaaagtatgtcagtctctcccaccaaattattcgttgtaactgcaaatttttaacatatgtgttttttcttcaggtatgattattgtgacattggttctggatcacatgtgcatctaagtctttggaaaaacggcgaaaatgtcttcccggcatctaataactcatcttctcatggaatctcttccgttggagaagagttcatggccggagttctatttcatcttccatcaatcttagctattatagctccactcccaaacaggtaactcgaaaaccgtacttttcgagtaatttcctcaattgttattaaaagttgtgtgtgtcacttaaatttccagctacgaccgaatccaacctaatacatggagtggagcattccaatgttggggcaaagaaaaccgcgaagcagcgttaagagcagcttctccaccaggaactcctgatggtttagttactaactttgagataaagtcttttgatggctctgcaaatcctcaccttggtttggctgttataatggctgctggtattgatggtctccggcgacatcttcaacttcctactccaataggtaactaaaaacttatgttattcattctcatgtatatgtagtgttaatatgaagcttgatcttgagttgttcggatggaacagatataaatccggcggatgtggctgctacattgaacagacttccggaaacgctctcagaagctgttgaagctctggacaaagacaaagttctccacgatttgctcggacaaaagcttttagttgccataaaaggagtccgtaaggtaacactatagtcttttagtttcccattagattctcagtggtaacaaagtacattagcactaatctattgtttttgtctttttaaatttttttgtgtaacaggctgaggtcgagtattattcgaagaatccggatgcatataagcaactcattcaccgatactaatcctttgagcatctctatgatgattgttggatcatttggttttattgtggactttgtgtcacatgaagggtcgtatttgcaaaatacttgacataaagatgtggttcagaaaattaataaactaaatttcatatttcgagacgcatgctcatgctggagtactatttgtatttcttactttttcgtcccatgctttcaaaagcctcaagaatatacagagtattttcaataatacggagtagttcttaatcatttacatttgtctatgaattgaatttgactactaatactcggaaacaaaaaaatgattgtagtattaggagcgcaaataccctttaaccattgttctttccatgttcttagtccggctattgttatctaggtaggtgcctgatccctttttttcaaatctttcttattcattactttgactaattaacctatttaatcatatttaatctccctttaatctgcaaactaaagcacatgtttttttttatgaaagaaaaggttagtatgacattcttttggtaaatctcatcatattatttatttaattttaagaaattggagtttaaagtgtaattaagttatgctacctagctaatttccttaaaatatgaacgataagtatagaaattaaagtaaagattaggtttatacggtacgcttattatgctcaaacaagtggacgaacaaaatccatctccatgtgactatggaagagaacttattaataagtccaaatttttttcttgcaaactttatgatttcattcacactagacaaattaattgttcgtaagaaggtatacgtacaacataatgagcttttactgcttccctttgcaaacgaatcagctaaaactttacagatttatatgttcaagggaaactataactaagatttgaaggaaaaatctaacctttctactacaacaataaaagtcaatgcaaggtcctttgaaaagaatcttgttgtcgcatgcatgtacgtaattttgtagtcaaatgtacgaatgatagatatatggggtcaaaacgttaaaatccagcctaagaaagacagagatttactctaaatcttccaaaccaacgttatcaattttgttgttaacattcaattgactttgctgttaattttggattgtagaatcgaattaaaatgaaaatacaaggtgaaaacgagacaatagcgtgaaactgctttgcgtatatatcaagtatcaacagttttgtttcgtttttgttggtttgcgttgggataagaaaccggcattttgtacatggttcaattttgtaatacctaaaccaatttccggtttaagtggtttattaatatgataaaataaaataaatattttttacaaaaatacatagataggaccatgggtccatgacgctttgacaagagccaataaaggatttactgtaaaatcagtaactttattgacaaacaaaaaatgcagctataagttgtccccaccgtatattacaaagattcgaatactttaataatacaagctaaagaataaagagcaagagcctttgactatttccacttataagttttcctccgagaccgagagagatcagagatggagcagattatttcaccacgctccggtcaaatatatatttcttctgttttaggcctcagcaaaaaccacctccatagttgttatgttggatactacgacaatttagtgaagaagtggtctcaatctaaattatcattctggataatgacaaattgataaaagatgcatactattacaaaagttgagaaaagaagattactttacgtaatgtaggcgttttaatgaactccttaatttcatcgttcgtggaaaataataacacaagcaaagcaatgacttttatggacactatgattggttacaatgatcttattgaacatgtgaggaggcaaagtgtatatccttatatctataatgtttttttttctttcttctccaaagatgtcgcctaacatcacgttatttaacactacatttagcttacattagtaatctaaaaacaactttaataataatccaacaatcacgccttatttaaccaatcctaatttatgaaaacatactcatgtatgattgtttgtgcgcatgtgtatatgagtatatggacacagtaggtttctttccttggttggatagatatggttacaaacttgcaatagtggcaggtagttagacctgcggttcctaaactccgaataaatacgtgcggttcaactgcaatgcagttctaataataacgaatatatatatatatatagataattttgttactattggaacatgtggttaggttacaatttcaaaccctaattattgattttggtaatttggatgtattcatattcctgttggttttggtctactcaaaatgttagtaaatctcttatgggatgtatcgaattaacttaaaactcttttttctggtccagaaacccattaatactagcattcatattgtatagcactatagctcgtggggttattataacgtcacatcacttttttgtaataaaagttgaaaaacctgacaagaattcaaatattaaagcctatccttagttaaaatctgttaaggcttatgaatatccttatcttatgtgagtaattaggttaattagatattagtacaataaaagaaaaaaggaaaaattgaagaccgtttcctcgagacaagcagattctcaatcctcgagactgtcagtggaaaacaacttcactctctctcttcaaaaagaaaaacaaaaatacaaaagccaaggaaagccattattacaaaagcaataacacactgtaaaaaagccactcacgaacactcctcagtaaccagagagagaagaagaagaacaacaagccatgtcttaactcttaactaatctcttcttctccctccatttcaccaaccaaaaaccctaaaatccttaaaatcacaagtttcttcagcaatgatgcttcaaagaagctgcattgtacttttcttctctctttttctgttggttccacaaatggttttctcgatgctcaacagaactcttcttctcataccacatcctgacccggaactagtcgcttatcaagttcagtggtacacttactacattgcctcttctggatctacatttactctcttttttcaacttctttaatgtaatttttccatctggttattacatttgacaagctattttcatgtcttcttgtgaatctgaggtttttctgttttcctctgttttgttctgttctcttaaaccggaaagactttaataatacggtttgtaactgttttgcaggaaagtaaatgcatctataacaaggcgtcaagctctagacacgacggaccaggccggttcgaccccgtgtatcaccggtaacccaatcgatgactgttggaaatgtgacccaaactggcccaataacagacaaggtctagcagattgtggtatcgggttcggacagtacgcgttgggaggcaaaggtggtcagttttactttgtcactgattcttccgacgatgatgccgtcaaccctaaaccgggcactctcaggtacctttctgttaaccgactcaaccggctttcttgtaagaaagtcttgtataacatcttgacaaatagacaaatatgtgttgtcttttattagttctagacaattatatgatctttaattatcgtgttttgaccgtagctagattttttttatgttgtttagttaacaacactaacactatatactatacttgaacattacatgtcattattgttattagctctaaaccctacctacatacacactttcataatttaaatcctataagaaaataagattctgtaagctataagttaatctattccaaatttacttttctctctctcttttgtcatctcatattcacatgtcccacaccaatctattatgtacgactttttcaataccacttgtttatatttctaaataaaccctccgttttgtggaatatttcccaacaaccctgatttagtgatttttctttaaattcttcaaaacctcctcaaaaccctctttaaacatttagagctgtataattttgataaactaaatccgttttaaaacatagaaacgtaacgtttacgatgtttacacttgatgtccctacattttaattttaacactgtacctgagaagcgaatcatataataaatctaaagaaaagacaactataataaaacaagtgtatcagtctcttgggacatgggacctcgaataattttgggggaatctttatcaatgtcaaaggaaacgggtttacaatgtgaaaattcttaaaattttggtgacagatatggggtgatacaagaagagccattgtggatagtgttcccaagcaacatgatgattaaactaaagcaagagctaatattcaatagttacaagacacttgatgggagaggagctaatgttcacattgttggtggtggctgcatcactcttcaatatgtctccaatatcatcattcacaacatccatatccaccattgttaccaatccggtaattagttttagctcttttcacactttctcttatctcaaattatgtatactccaaaaatcaattatcttttcttttttacggccaataattgttagtcttttaactttttaaccttttttttttcttgccctaataatttagtaggtcccttttgttggtgtacatattttccttctcattgattggtgttttcacacgcaaacaaagaaaacatgttttgtttgaatttatatgcatttattgatttattcataaaagtatggtaagcaagaaaaacaaagtaaaaactaaatctttcgtccttcctgaaatagcattgattgattattcataaaagtattctgaaaatatgtttgttcacgctttcgttagggaatactaacgtgcggtcaagtccaacgcactatgggttcagaacgaaatcggacggtgatggtatctctatattcggatcaaaggacatttggatcgaccattgttctctatcgagatgcaaggacggtctgatagatgcggtaatgggttccacaggaataactatatcgaacaacttcttctctcaccataatgaagtcatgcttcttggtcacagcgaccactatgaaccagacagtggcatgcaggtcaaacacacactaatccgtaatatacattttcttagtgactactttattttaaatgagcgtaatatttgaatgttagtgtgatttttcaggtaacaattgcgtttaatcactttggagagaaattgatacaaaggatgccgaggtgtcgacgtggatatatccatgtggttaataacgattttactcaatgggaaatgtatgccattggcggtagcggtaacccgactattaacagtcagggtaaccgctacaccgccccaaccaacccgtttgccaaggaggtaactaaaccctccgcatgttttctatagtcttggttcgttagtccattcttagactttgcttttggtttcatgatgttttgagctataccaactttattagggataaatatccagcttgtgaaactttcattaataagtgtaatctttaaaacattcatcttactaatggagagtgtcattgtgtaggtgacaaagagagtggaaacaccggatggtgattggaaagggtggaattggagatcggagggggacattttggtgaatggagccttcttcgtggcatccggggaaggtgcggaaatgaggtatgagaaggcatatagcgtcgagcctaaatccgcctcattcatcacccaaatcacatttcactctggtgttcttggcgttggtggcaggtttggattctacattttgtcaataaatgattcactctttgccaaatttttccctttgaaaaagaacatttcattttttaacaaatcaatactttgaaacttttattttaccaacacaaaccatattaaaaaatggtatgtctacatacccttttgttttcttctacttttggctttaactttattctttttcttttgtctaacttctttttaccccactattttcataattaacctcaaaaagtcaaaatggagctaatttagggtgtttgatttggtacaggaataacaatctggggatgtggactactactggatcggaaggtactagcggtttagattcttataatgactataccgatgaaatgtctggcgctggttcaaccaaccggttatctttttcagttcttgttttcttgctaagttcgatatcatatttggtcgtgttcacttcttcaacccaaatgtttatgttgtaacatgaattgaatttacctattttatcaaggaacaagcaaaaagttgtttccatactcattcttgtgcattcttttcttctatgatctttatgtagttttaatggacctcataatttgtagttttacaaaatgttatagttcttaataataataccacgtgtgtgtttattgtatacgtatatgcaatcgtgacgttgtaatagtcctatcctatctttaattaattacataactaatagtctaatagagattagatattaatctttagcattatattatcttcttccttgtcttttctaatatacaagagggcgttccatacatgcatctacacttcattcggatcataccaatataatctactttaggatattgtaatttagtatattgaacattaaatacttttcccttgaaaaaataaaatataaaacatttttaacaaatcatttggcacaaaagtacactaaaacaattaaaattaattcatattaaaggtgaagcccatcaaccaataatgttaacataaaaaaacttataatttttcatcattggagcatggacttctcatgtttttgttgctgtatataacaagactatacacatcaatgctatatttttacttaatttgttattatggatatgtacctttatttttattttattttattttgtttaggaaattgtttattgtgtgaagattaacaactttatctttgaccttgactaaacttgcgattcaaatttcatattgataaccgattcaaattgagttcaaattttacatatttgtgtacattaaggttgaatattggaacacttgttactttaatatagcactttcgaattcaattatccatcagttaaaaagtaaataaaccaactttagaattatgaccatagagaacatgaaaactcctcaaagtccctagtctcttgaaaccaccaagtaccaatgttaatattgttctcactgcagctattgctgctgtgatcttctgaaagatttgcttcactctggtcagtagaaatctctgatatccaatccgaaatccgattttcatacggtgatttcataacaccgaagctttctcttccaccaacaccaccgttggcttctttaccactttccatgctcacaacttcaacaaaaccatgttcttgagacgtcgtctttgtcctagtgatctctgtttccttatacttgtgcaacaattcttctcctgtatttcctctccactcaaagagctttcctgcagaaaaacacatcatttttttcaatgaatgcttatctaaaactaacatacatatgcaacaatgaaagaatatctaccatagttttgagcttcctgtttctttctataatgagttctccaatagttctttatctcgttatcagtcctaccgggtaatcttctcgcaatcttcgaccacctattgatatacaatatttgattaatcaaaccgcaaaaaacaatcatgtaagtacaagattcaagggttttttttgtctctcacttgttaccccatagagcatggagctgaaagatgattctctcttcttcttgactcatcggtccacgcttcagagtcggattcagatagttcatccaccttagcctgcaactcttaccactcctcttcaaacctatacgtatgaacacaacaaacatatatttcggacatgtaaatttctatttttggaaagtgacacaaaataaggtttcaaagtgtaccggaaactattgctaaagaatcccaacgacgttctcccaaaagactaatgaccttcactagccgttcgtcttcttcttcgagccatggccctctacgaagtgtttcttccttcttaaaatccatttttctttcttttactctgtttctttgtgttattatacttaattaaatcctttctaaaattgtgctttgaacttgtaagcatgctttggctttgcttaaatagtaaagtcatgagtttacccaaattgggaaaaatgtccaaaaagctgacgaacacaaatagtttagtggataataacatcatgcatcagttagttaggttcttgtttttccttgatctaggtcatcttttaagttatagattatagatttggattaggttccaagtatctttccttttgaatcatcatcaacttgtgattttttattatcattgtcttcagggattatggctttcatcatcttaaaatttaattaactaatctaagtatccaatcgggtttggattttggaatttcaatatcttagggacttaaaaaagaagatagaaagagatgaaaccagatcttttttccactcacttaaaagtttaagccaacgaagcactcttaagtatgattagttaagtaaatcccagtgttaagcctaatctcatttttgcaacaaagagagtttaaaatcgacgcatctaattgagccggttaatgaaatctatcaatgttgaaaatggctttggttaaaatcggtttagactattcacatttcacgtgagactcagacaacctgcacatgacagtcttatctctgtttttgtcgttttcaagaaagtcgccacaagagatcattcgaactaaaaaaagcaaaacagatctctcctgccgtctttggttacttccggcggagaacgatgtctccgataccggaaagggcaaagcttcacatagctatggtggtgtttcagacaggctacgctggtaatcacgtgatcatgagatatgctctaaacttaggagtaagcaagctcgtcttcccactttaccgcaccatcgtcgctttctctgttcttgctccctctgcttacttccttgaaaagtataattacacttctttaaaccaaactaaatcttatatcttcaattctttaattcttgatattatttgtatatttctaacagaaaagaaagaccggcgatgaaaatcagttttctgattcaattcttccttcttggactcgttgggtatgatcttgtctttatatcttggagtcaagatcaatgacaaaaaacttttgattacaatactcatttttggttatagaataacgttaaaccaaggattttacatctttggattggacaatacctcaccaacattcgcatcagcaactgaaaatgttgttcctgctgtttcattcctcatggcagcgttgctcgggtatgttcttgattctttattggagataacttgggaaacaagatgtgtatcttgcggaccaattattgtggaccctcaaagtgggctctgataccactcatatctcatttttattatgacacaccaacaattgtagaatagagaaggtggaatggaagaggaaagatggtatagccaaagtggtggggacaattgtatctgtcgcaggctctttggttataacactctataaaggaccaaccatttaccaaccgagtctgaatatagtgaaccaaactattaaacctgaagaagcagaggaagaaaacaagaactggacgttgggatgtctctgtttgatgggtcactgtttatgttggtcaagttggattgtgttacaatcaccattgcttaaaaagtacccagctcgcttctccttcgtctcctattcttgctttttcgcagtgatacagttctttggaatttcggcttatttcgagagagatctagagaggtggaagataatatcaggaggcgaattatacgcgttactctacactgtaagtgtttgtttattttcttagattaagactcttttgaatggtgtgattgattttggtgtgagtttgaatatatttcagggtttagttggttcagcaatggtgtttgcaatacaaatatatgtagtggaaagaggaggacctctgtttgtatcagcgtatttgcctcttcaaactttgattgctgctgttttagctactttagctcttggtgaacacttttaccttggagggtatgttatctatatgttttgactcattatgcgttttattttcatatcttatagttaagtttcttacacattttttaatgtttgttttggtcagattgataggtgcaatactaatcatgagtggactatacttagttgtgatgggaaagagttgggagaatcaagctctttgccaacaacaacaacacatgatttcttcagcagcatcagattttggtgatgaagaagactaccataataataaaccaagatctcctattagtcaaccattaatttcttcctaaattttgttagatcctatttatgtcttaaattcctagttcctactctcttcctcattaaaatcgaaatggacccggttgacgaaatagagataaaaataaatttggttaaaatcggtttagaattaaatcgattggtttgggtttagtgccacagtggttaggtgagtagagttgtggttcggttcaggttatgatattataacctggagggatcaaaattggcgcttttaaaaaccaaacaaacaaaaacagagaggaaacaaaaaaatgagaaagcaagaatcagagggagcgaatcttgaattcgaatccaaatcaaatgacaatggaaatgtgaaaatcgcaccaaacgaccaaagtttcctcacaattcttgacgacataaagtcttccaaatctccggttcttacacacgacaacttatacatttgtacacgtttttaagaccgaagctggttttttttcgtaatctgactgttcttcttgtttttgctttgttatattcaggctgttattaactatggagcttcttggtacaccttattctctgtttttacgattacgcttttcatgcttataaagtgttcgatgaaatgcctcaatgagaacggttttgttttgaaactttcaggtgtggagtttgtagccagattcttcctgcattccgaaagctcagcaacagtttctcgaagctcaagtttgtttatgcagatatcgacgagtgccctgaaaccactcgtcacatccgttacacacccacgtttcagttttacagagacggcgagaaagtcgatgagatgtttggagctggtgaacagaggctccatgatcgtctttggcttcactcttgaatatgttcatcaaatattaactatgaaaatctgcattccttttgtgatactttaaatgccaacacaaaaaatacttggctcttcgacaataatcccctgaataagtttggactttggtagattaatgttagggataaacttacagaaacatcaaaggttaaacagaggatggagctaacattcatgatacaactcttgacaaataaatatgaacaccgagctcctcacggcggctctttccctctcaaataatttggtttaaccgggtataatgaccttgagaaacattgaagtctctaaatcacactcttgccaatctcaaaagcaccaagcttcacctctaaacggttttgttttccaggaatgaattgggttaatgtaactttctaatttgggtcaggtttgagattggacggtcttccaccacaaaaaatatcaaccattaaaacttttattgttgcccattaagaccgaccttcttttcgtaattttttttttaaaacgtaactttgttgaatttgtaaaaaaaatctcttgtgaaattatcacaatgtttattcaaaactaaataagaacatactagaagcttttctaaattggaagatgtataaaaaaaaaatagaagaaaagaataataataatggaaaacaaatactataaaataaacgtttctttgataacaagaaacggatttgtcttctatataaataaaacacacacctgtctatttatttacacttctcgaatcttctttttcttctctgcgaagctctctctctctctctactcgattatcaaacatggcgaatcaagctgaatcatctgattcgtaagtacttgttaattactgagtaactctttaaggttttgttagtcttcgtgttggggtttttctaattctatttttttttctctgaatatctcaggaaggggacgaagaaggattttagcaccgcgattctggagaaaaagaaggcagcgaatcgtttggttgtggatgaagccattaacgatgataactccgtcgtttctcttcaccctgataccatggagaagctacagctttttcgtggtgatactatcttaatcaaggtttgatttttgaattttaaggctcttcttctcttgtttcctttactgaattagggtttataaggttttgtgattgttcattggtttgctgctagggtttatcagaagggttgttttttgaattaggtctttcaattttcatgcttttgttttgggatagtttctttgagttgtgtgtatttacatctttgttttctctctttttgttttgggaatctgtggttgcagggaaagaagaggaaggatactgtgtgtattgctttagctgatgagacatgtgatgaaccaaaaattagaatgaacaaggttgttaggtctaatctcagagttaggcttggggatgttatttctgttcatcaatgtcctgatgtcaagtatgggaaccgtgttcacatcttacctttagatgataccattgaaggagtaagtggcaatatatttgatgcataccttaaacgtaagcgttttctcttccctgtttttgtcatttaagttgtgctctgcttatatgcttcttgatgtgttctgtttttatcacagtagtttaatgtctgttttttttattttttattgccagcttatttcttagaggcatatcgtccggtgaggaagggcgatcttttcctagttagaggagggatgagaagtattgagtttaaggttattgaaactgatcctgctgagtactgtgtggttgctccagatacagaaattttctgtgaaggtgaaccgataaagagagaggatgaggagaggttggatgaagttgggtatgatgatgttggtggtgtcaggaaacaaatggctcagattcgtgaacttgttgagctcccattgaggcatccacagctcttcaagtctattggtgtgaaacctcccaaaggaatcttgctctatggccctcctggttctgggaagacacttattgcccgtgctgttgctaatgagactggtgcatttttcttctgtatcaatggtcccgagatcatgtcgaagctagctggtgagagtgaaagtaacctcaggaaagcgtttgaggaagctgagaagaatgccccttcgatcatattcattgatgagatcgattcgattgctccaaaaagagagaagactcacggagaagttgaaagacggattgtatcccagctcttgacacttatggatggtcttaaatccagagcccatgtgattgttatgggagctaccaaccgtcccaacagcattgaccctgctttgagaagatttggacgttttgatagagaaattgatattggtgttcctgatgagattggtcgtcttgaagttctcaggattcacaccaagaacatgaagcttgcggaagatgtaatgttctgttacatataattattttcttcttttcttttacctttttctatttgtttagatctgacattattttctcttattcaggttgatttggaaagagtatctaaagacacccatgggtatgttggtgctgatcttgcagcattatgcactgaagctgctctccaatgcattagggagaagatggatgtaattgacctagatgacgaggagatagatgctgaaattctcaattctatggctgtcagtaatgatcatttccagactgcccttggtaacagcaatccttcagctctacgtgagactgtcgttgaggtgcctaatgtgtcttgggaggacattggtggtcttgagaatgtcaagagggagctccaagagactgttcaatatccagtggagcatcctgagaaattcgagaagtttgggatgtcaccgtctaaaggagtcctattctatggcccccctggttgtggaaagaccctcttggctaaggctattgcgaacgagtgtcaagccaacttcattagtatcaagggtcctgagctcctcacaatgtggtttggagagagtgaagccaatgtgagagagatattcgacaaggcacgacagtctgccccttgtgttcttttctttgatgagctggactccatcgccactcaggtattgtacttggtttcttaatctctctacttaggcaacttatgccctttacctttatctcagaaaaattaatgaacatctcttataataacagagagggaacagtgttggagatgctggtggtgcagcagatagagtattgaaccagcttcttacggagatggatggaatgaatgctaagaagacggtcttcatcatcggagctacaaacagaccagacattattgatcctgcacttctgcgtcctggtcgtctcgatcagctcatctacattcctcttcctgatgaggagtctcgttaccagatctttaagtcttgcttgaggaaatcacctgtggcgaaagatgttgacctgagggctcttgctaagtacacccaaggcttcagtggtgcggacatcacagagatttgccagcgttcttgcaagtatgcgatcagagaaaacatcgagaaggatattgagaaggagaggaagagagcagagtcgccagaagcaatggaagaggatgaggaggagattgcagagattaaagctggtcactttgaggaatccatgaaatacgctaggagatcagtgagtgatgcagacattcgcaagtatcaggcttttgctcagactctccagcaatcacgtgggtttggaagcgagttcaggtttccagatgcgccgacagggactactggagctttccctggagctgctgccacagttgggggagtcgacccgtttgccacatccggaggagcagcggatgatgatgatctctacagttgaaaggtctgatcagaccctgtgactactctctttagtctttaactttgttctgcttgaaaaactttcgatggtctttgttgtgttttatttataagtcttttgtatataatcgttgagactctagaacaatgatggtgtcatgatgaaataaatctagagaaatgagaacactgcattcatcccaaaggaaaccggatatacatacacagattttgcgagtacacagattctacaccctaactagaaagaatcatcaaactgatgtaattgttgaaatatcttctttatataaaatagaagtgcacagttgagatctcacgagtctctctctctttatttattctggaagcggaaccagacttggaacgtaaacaaagttaacacaatagttaagttcatcttcaccgctaaagggttgtcctgtctcaacttgttttctgatctcatccagaccaccaatttggtacaagctggttcaagcataatcctctcctgcaactttattgcagcataaggcctgtatctgttatgtatcaagattataacaaaaataaagacgatgtcaaattttgttcaaaaagagtccaactaaaaattcctcaaatttttcactcatttacattgtttacttttgcaagttatgaaaatcgctctataaaacctttttgcacttagtagaagtccttttacaaaaaaaaaagttaaaaactttgtgttttttttctttcttttgggtgacattgtgggtaatttacttttcgagtttgttgtgctcatctctcaaacatatctcatttggactcttttgattattgcaaatattaattataaagtcttcatgataaatcttatgaattttgttatacagatagaatcatttgtgtaacctgagagaaggttgagaatatacacttcttttctcattcttcgtgattgtatcacatataacagttttgtaattgtaagattatatacaaacatacacacataaatactttatttgtttgttaataaaagattgatgttttggacttttttaattaaccatgcgtgatctcgtgcatctagattcttttccgcaagataagtcatcctcacagtaaagtatgtatatcagtatatacagttatgcaccactactacacaagaaacaaacttatgatgagtgagacgatcgcacaatcacgatccttgtcagaaggaccatcatagctagcgtctaatattgtcatcatatacagtacggaactacaactaggcctaaaatcgacgcaataaattaccttttaaagtaaaaaaatgcatgatcatttcatcatctataacgattgttcttaacgctcaaacgaccacgtcacggtaatccaaaatcttgttttctattcaaattaaaaacttatactaaagcataagtctctgtacaaaatcaagttagcttgcacgttacgatatattggcatattggttttgactggagaaacatagcagaatttttttcaaaatggaaaatttttagtcaccttgaaaatcttataagatttatactttaatttatagagaaaaatatgcatgtgacacacgaaagaggacggtcttggggttggacttggcccgctctcttggataaaatctacacaagccgcacgtgggaagtctacaaagactgctacaaaagacaccacctcgtggggggtctagctcataaactgatcacacgcgagcacaaaacctttttatgtttattattatctttttggatgtttattgttagaaaacctaattatgtcatctaaatggatgagtaattagttgtaaaaaaaaaatggatgagtaattcactaatagatacaaattatacataacttaattaacggaatgcaatatattatacaacaatggtcaatgaaagttcaaggagtgaagatattggcattatactgtattgatactattgaatatgataaattgatggaaatagatggaaattgatggaaatagtcatgagattacaaaaatcataaattcgaaagaagaaaatggaggcaagtgtttgggtttcaacgtatgtcagagagatgcacgtgttctctcttcttttccaaccccaacgggtcccaaatcccttttcttagctttttccttgtttgagtccaatcggcttttgcaatccaatgaataatgatctttctcttttattattttaaattttgtaattaaggctagaagtctaaattagtcccaaacattacccatgtgactaatgtggcaatgtcttacttaagatatttctattgttatctgtttttttttctaatgttatatgttagtaatgtgaatatgacaatatgtgatatgaattgcaaaacaccacactgatctgacgtatatatcttcctcttttctccctattttcgtagtaacgtccaaaggaataagaagcaaaacaacaaaactctccaccgattcacagttagtggaatacaacacaataaaatagtagagttaaggaattccttaaaatctgttcgggacaataattatgagaccaaccatgttttcccccatctctttcgtcaatgatgctgacttctacttatacaaatcaagtttcctttctgaaaaaagttgaaagtcacgtttctcaattatcccatcatcataaataaataaatacacttaaaaagaaaaagaaaagagattgagaaaataatgttctgagttctgtagtaataaatcaaacagtagtgggaaaacgatgaataatagtaacgaggagggaccgcacgagtgcatctgcacacctttttcgcctcgacgattcccattgtcggctcatagttttttttacctacatttggttttcaacatatgtactatatatattcacgatccaaatattcaaatcggacatagatattaagattcagtataacgctcaaatcctacgagtatctgacaagtatctataattactttaatgattaaatgttttgaaaataataatctaaatttaatcagcggttgcggcgtgtcggaaaagttcgagacttggaggaagagcatgcacgtgatgttgaacgtttaagtttgtttgttttcttggcttcggattcgttttaagtactatatagttttataagtgtagttgggtcgtatttttgaagatatcatgaatctaataaattagtggtaacactgactgcattggtcaaaacatagttgtacgttacaaaattttctttacgtaacgtaactaaatatcctattacatatatgcttaacataatatattgcatttggaccctttagaccatcgcaatttctataatctacatttcaaaagtgaacaatatcaaaagagttaataacttattcattttcgactttataagtatctaatggaagaaaaaccaaggcgatagtatcaaatggaattattatgcatgtactaatatatatttttcctatgaactaaaatgtattatttaatatgaagaagagaatgcttttaggattactattattttcacttattttcttcatggtacggacattgaattccagcagtattccacaatctattatccttttgcttttccttttaatatatatatgcatttgaatatttaatgaatcgaatggaaaatgatgttggtttctcgtcttcatattcaaattttaatctactacccaattaaacatatcgccctccctaaaccgacaaaatagaaaagaaaatagtgcatagtttcgatttgcattattagtatgaattggactcgatcgagtcacatctcacatgcatggactctcaggccgtagactttgtcataattacattctatcttctccaccttttcctctcattttttcgctggtatcgttacactaatttaatgaaggatattactctcaaaaacgagacttttgttgtctattgacatctatcgtgtttaaaaaaaataaaaaatatctgaaatctaaacttatactaattaaggtttatagcaagctgaatttgttttgtcacttaaaactgtgcagtgcctaacatgaaagtacagtggatgagatttgacctctgacctcaatatctataatgttttcaagatataaattacatgatatctgtactgtatatatgtaactgggaaacagatgttgccaaataaaagaactagtaaacaaattattcatcagcaaagttagttttcgaagtttttgtgattattcgattctttaaatatctaaattattcatatgattaatgataacgagcatttgaaggattaatgcatgtctgagtaattctgaatttacaattaattttgaataacctatgtattccaagtaaaattgacgatatttccagggccagtggtttacaaaaagaagaggttagtacttgacaactaaaacatgtttttaagaaagaccattctaagctttcaaaagagagagataaatcttaaattaactaagcatttcaagaatgcattcacatcaatatcatatattcatgtgtatataacttaaatatcaaccctagttcaaaagtttgatactagagggaaaaatgaaaaacggcgacccaacccaaaaagttggaaaaatacaagaagagaaaacaaaacataaggtaaagatctaaatcaatatacggtcacgctcgcggtcacggccacgcccgcagactaacatggcaagacaacggccaaggatgtaaaacttggctcgctgtttcctcaccatgtggctacacttcgccttgaatgtcttggacggcttgcatgtcccgctcgtgctgttctcttctcccattaattacttgatgattccaccactacaaggacaaaatttgatattctttgttgaaaaatggagagctttgttgtggaaatgtgagaagacggagaaagagagggagagtttattaatggagacatattgcgacatagaaagagtcaatatatggagagagctaagcctatgaattagaacgagggtcacttgctttggtacaataaatgattgatatgtgacatattttctttttttttctatgaaataggtaacactaatactgtatatatgtaaccttacgcattctagaagaatattaatgtgatatatgttctgtggttctgttttagggtgtagtgtttttaagtttttttcaagagatcttgtagattaagtgaaactgtacttaaataaaatagtgtggtatgtgtatgtggtttgctatttagaaataatgtaataatagagtgtatatagagtatatagtgtgggtatgtttaagaacctatttggctacttcagtaaggtttttattttttaaattgattctttttttcttaagatttctaaagctcagacgcttaatctaaaattagttataacttataaggttagtagtttattaaaatttaacgtgaattatgattaaacacacaaaggaacttatatatgttgtcgttgaaatacatagcggattgaaatacataaacgaactatagttttgatttgatttataaacgtgtaaattggataaggctaatatttcatacaaatatctggaaaccataaccaaattttgagctgtaaacataaatatagcataatcaattcgaagcatactagaaacttgcatgtgtgtaatttctaagagatgtgaccacaaatacagagtggactaggacccgatgttctatattaaatgtctttctttattcttagtcaaacatttaatttaattttgatgtactcattggtagatctttggtgaacatctgaaatgtgaatggtcggtctacgtagaacgaaccccacagacggtaatttcctgtcgtcgtggcagctcattaggttcgtacgacatataccacactttttgaagtttacgtatcaaaattgattgcactcttccttcatacaaacatgacccttttgaagtaacaagtaacaactcttagaattcttgttccatctttttctttgtgttgtttattttgttaactgtctgtaatcccacttgaccacgctgaatcgaaatgctccatttggtcaaaaacattgtcttgaccgctagttattagttgaaacgaatgagcagattaaacatttatagctctgcggtttaaatgtgctgtgtataaataatttgagtcacaagaggagagaaaattacaagatatatagttcaaatcattgatcagatgcttggaaaacaaataacaaacacacgtgaaataaaatttaattttttggccggtgtgttgccgggaagtaattgtgtgggcatgatcttcttaagtggatacctcaattctgaaaatgatctacagaagtataacaaatggatgaaagatgtcgacgaactaaattgctttgattttggattattttttgttttctgcataaaatattttttttataaattaataatttcgaaaccgtgaaattctattaatttatcgataaataaatatatattatcagtttgttattgtaaaactaaattagtacaaagaaatgattatttttaagaacatctataacaagctaagcattcaaaccttcaaatttgaaggtttttttaactccaacaaactctcaaacccttattttttgaggatgtgaataatgaagtttcaaatttcagggtgcatactattcacacattcaaaatctcttctaaattttattttagtccttatacttaatatatcttacaaataattctattacatttaattatgacaaatatatgcatataaattcaaatatattaaaatattaaaaaaataaattaataaatttatacaacaataatattacattgagcatatatgaaagcattatagacataattacattgaatatttttgtaattttacatgtaattttataaatcattttaatgttttatgttatgtttcttttctaatttatatttaattttatataaaaaattaaaatattatttaacataattattttgataatatatgttttatatttatttatgaaacttttatcattatcagtgattattgttactattaaagactataatgtaaataaagaaataaaaaataaatttgagggagtatcatcggtggagatcaccctcaaaccttaattttaagggtttattaccttcgtagataacgtttttttattttgtttttttcatctattgccttgttggtatgaaaggacctggtttaattgatgtcaagaaaagaacccggtttaatttaatttcggtcagattcaccaatctcgaatccattctctcgccgtctttcaattctccgccatcgaacgaaacacagaatcttcaggatgtgacaacactggattcctccgccgtcttctccttcggtggagaagcgattcgaattggaagaatcggttggcttgacattgattcaacgatgaggctccttcaagctagtcccggtaatgaaaaagtccttattgctgcatttgcataataaattgttgcctgatatttcttggagatttggttacttgctttagctttttgatgcaatgatctatagtagttagtgggaatttggtgaaagaatgtatctttcttttacttgcttggttagttcaggggatacatacaactaatcttgaagtagctattgtagtactttaaggaagaagctttactggtaatccaaagcatggcgaaaactaactgtaaagtactaattttaactacacctaatttccatactttctgtttatgaactcactcttatgagtgttaaataccattcattcatcacatgtgcacacctcaagtcttatcaaaaacatatatatacttaggattacatcacaaaagcagaaaacataggcttaatatccgcttcatcacatcacagtctttacatatactgatatacacacatatacacgtcttaggagctcctttgtcccaagtcatatcttttttctcgtgttgctgattctaacctgttccatcttctccaccaccaccacctcctcctccgtttgcaccccaattgtcaaagttttgtcttggaatgttatggtggttgtctactcctcttgttgatggaatggcggatctgtccttctgaacatggtgaagcctctgatcttttgtgtatatccctctccctcctccctccacagttaaagagctcataaccaccattattaccagcaccactaccaccacgacatgccttgtctgaatttgcatttttgttttgtcttgtttcatgcaatagctttcctttttatagaattgagaagtaaggtttaggtatgggaaatcttgcaactgttttctgtgtgttccactaggaaaagacaaaacaaaagattgattgattagcctttaattgatgtgtttgtttgttattgttgtgacttgtgacgatgatacaaaaatcaaaagaaataataatcactcatccaaataggaaagttccaccgttaaagtggtgaagacgacataagaatcaatgagaagaattggttagttgcccgaataggaaatttccaccatttctagtggatcacctttcttttaatcatagacttttatatttgtttgtgtaattaaaagtcaatgggatggtaacaacttacataaagtaaaatttcaagcaatttacataattttcattcaatgatttcattcttctttctaatagcatgcgttgatagccgaacaagttgatgacaagtgtcttttaatctaacccacaaagctaccatctgaattatctatggttaaatgatcagttacaaataattcacttcgctaattacatcaaaagatttggtagagacaaatcattcagagaaagtaaccatcatgatcatgcattgggtctttgttgggctgcttaaagctcgtaatgaagctctgtcaattgctcttggggcttaattttattttggaaacggcttagtattatagtgaagaaaatttatatggaatgtaatgtatttttcaactccttaatatgaggataaccatgtgagtttcttcgtctatctgaacactttttaagcatagtttgcagagtttttaatgtttatgtttatatttaaattgatacccattgattaattacaggtcatctatttctactgctgtgacactcttttgacttcatcttcgtcttagcacattgcatcacatgccttgatgtctaaactataaaatgactttgaatcatcattacatttgatatttgcacttaatgtcttcctcgaagttaatggactttggcctaacatggattataatgatgatgatattgttacagggatgtagaagctgcattgaaagtgaaaggcagggtttgttggagatcaaggcttatattatctcggttattactgatccacatttagacattcgtcgaggatggatgagtagtgatcggtcttgttgccattggagaagaatcaagtgcgacatcaccagcaaacgcgtgatcggaatctccctatctttagaatccatacgtcccccagatcctcttccccaattgaacctaacttttttctatccctttgaagagcttcagagtctcaacttgtcgtcggggtacttcaaaggctggttcgacgaaagaaaaggtttgtacattcgttttcgtttttgttcttgtattcaagtcccctaacaatgtaaaatactttactgcttatataggtggtaagggcctgggaagtttaagaaatcttgagactctggatctcggtgtcaacttttacgataccagtgtcttgccatacttgaatgaggctgtgtcgctcaagactttgattctccatgacaacttatttaagggtggctttcctgttcaaggtaggtactccagaacaaatcaaactatatatatgtcactgacattgaaagtctttttcactttgtttctgatatctcttactttggcacagaactaataaatctgacaagtttggaagtactagatctgaaattcaacaagttcagtggccagttaccaacacaaggtatatttaactatgatcctgcgttaacactgataaaatcaatgcgacgttgacgttgtaacataatctataatttttttgttgcaatttgagtgtctctacgtcaatcttgatacacataataatcaagttgagtgttcatttatttataagccatgttgcatctttttcaattgtggcagagctcactaatctgcgaaacctcagagccttggatctaagcaataataaattctctggttcattgcaaaaacaaggcaagttatgactaatagtccttttttagtagaggaactcgtctcagcttcgattgtatatgccttgacgtttctctgtgcatccatcactgcaggaatttgtagattagagcagttgcaagagcttcgtcttagtcgaaacagatttgagggtgaaatcccactctgtttttcgagattctccaaactccgagttcttgatctatcatcaaatcacctaagtgggaagattccatatttcatcagtgacttcaaatccatggaatacttatcacttctcgataatgactttgaaggcttgttctcgttgggtttgatcactgaattaacagagctcaaggtttttaaactctcttccaggtctggtatgctgcaaatagtagagactaacgtttccggtggtctgcaatcgcagctaagtagtattatgttgtcacactgcaaccttggaaaaatccctggttttctttggtatcagcaggaattgcgggtcatcgatctctccaacaatatattatccggagtgttccccacttggctgctggaaaataacacagagcttcaggccctgttgttacagaacaactcattcaaaacacttacacttccaagaaccatgcgcaggctgcagattttggatctttcggtgaataatttcaacaatcaactccctaaggatgtcggtttgatacttgcgagcttgagacatttgaatctctcaaacaatgagtttctagggaacatgccctcctctatggccaggatggaaaatattgaatttatggacctatcttacaacaacttctcagggaaattgccaaggaatcttttcacaggttgctactcattgagttggcttaagctctcgcacaacagattcagtggcccgattattcggaaatcgagtgatgagacctctttgattacgctgatcatggacaataacatgtttacagggaagatccctcgtactctactcaacttaaggatgttgagtgtgatcgacttatcaaacaacttactcactggtacaattccaaggtggttaggcaatttctttttggaagttctgaggatctccaacaaccgtctacaaggtgccataccaccgtctttgttcaacattccttacctctggctcttggacctttctggaaacttcttgtcgggtagcttacccctgcggtccagctcagattacggttatatattggacttgcacaacaacaatctcactggatctattccagacacgttgtggtacgggctacggttgcttgatctgagaaacaacaaactgtctggaaacattccactgttcaggagcaccccgagcatcagtgttgttctgttgagagagaataacttgacaggaaagattcctgttgagctgtgcggtttaagcaacgtaaggatgttggattttgctcacaatcgattgaatgaatccataccttcgtgtgtcaccaatctatcatttggctcaggaggacatagtaatgctgattcagattggtatccggcgagcttgctctcaaactttatggagatatacaccgaagtatattacgagtctttgattgtgtcagatcggttttctctagactactcggtagattttaatgtccaagttgaatttgcggtgaaacagagatatgacttgtacatgagaggaactcttaaccagatgtttggcctggatctgtcgagcaacgagttaagtggtaatatcccagaagagctaggagatcttaagagagtacgctcgctgaatctctcacgcaattcattatcgggttctatacctggaagcttctccaacctaagaagcatagagagcttggatctttctttcaacaagttgcatggaaccattccctcacaactcacattgttgcaatctcttgtcgtctttaacgtgtcatacaacaatctctcaggtgtgattccgcaaggaaaacagttcaacacctttggtgagaagagttacttaggtaattttcttctctgtggatcacccaccaaaagaagctgtggtggtaccacaatcagctcaggaaaagaatatgaagatgacgatgaaagtggattactcgatattgtggtattgtggtggagcctcgggacgacctacgtaacggttatgatggggtttttggtgtttctctgctttgattctccatggcgccgagcatggttctgccttgttgatacttttatcgaccgcgtaaaagatgtactgggagttatctagagagggttcgtggacgtggaggatgaaacaataaaatgtaatagttgaatcttgcaaatattttgatcatattgtcaaatttctccatcgtataaaactttcgtgaagattaacatatcaaatattttgatcataagctttcaatattaagagaagctgaaacctttagtaagaaaaatgattacaggaatctacaataataattgaaaacgaatatttatctttttgtttcgaattaacgcaaatatttggtttatggacaaacgaattataaattgaaaccgagagtaataatatcttgaattctcaaactcattattttaaaactataatggtccgaccagcgagttcaccgtctatacttcctacatataaataaataattattagaaccatgcatgagaaaaagaatgtgactactgcctcccaaaatgaagcatgggcgagacttaactagagttagttggactatggaatgttgtacaattttaaactatatctgttttatttgatgtcttaaataaaaagatctgttcttttttaaaagggatatcgtaattcgtaaactactattttttttgttttgtttgtaaaataacaaaaatatttttatcaggaaggttcttaaactttttgagaacgaccttctaaacacttttgtggtatatttgaaatgatttaaaagttatcgagtattacggtctctgatatctatatatacatttttgcagccattttgtgaaataaatcctgtagttaagacttatttacaatggctgctactggattttaatgtttgtttttgataattagaaaaaaatcttcgaattaaatatttgatatttaacaatcttccctaaatctcttcacattaactacacgattagttactaaaataaaacttccaaaatatttaatatcatttaattactacaaaattatcatttttgatattgcttttctccatgactataacaattcgattataatcatcaaaccgcagagatatttgtatcaaaccgcagagatatttgatagcatttaattattacaaaattacaaaatatttagacaataattcataaacatatcataaataagatcaacattaataaaataaatagttttattacggtacgggttggcgggacgggtttggcaggacgttacttaataacaattgtaaactatgaaataaaatattttatagatagatacaatttgcaaacttttatgtatactaactttacaaactaaattgttcccgcggtgtaccgcgggttaaaatctagttcatatatatactttgaacaaaattaaactagtctgatattcatactctttgaacaacttagtttaaatctaactatctaagtattcctcgtattttggccgaaatcaccgaatctctagagtctagaccttttaagtcaaaatgattattacaaagtgtcttgttatcctttttcaaacctaaatgttttttttttatagtgtaaatcactatttcttatactgaggttccaatttttttattttttggcactcaatactgatataataatgaaaaaagaatgacagctactaatctgtggaaagacacatgggaaagtcaaatcaaataattgtgggtgtaataagggtatggctacctcatctaggcccttcttttttctattttctttcaaaataatcaaagtcaaaatagggtttgatcccaagagtcgctaatcgatcgatgatccgagtatgaaataagtacattactccatcgtgacccgatcttatgatgtaatgtttaagtacacgttcattacaagtttataacaaaaaaaagttacaacaccgtttccttactaactaaaatatctattgaacatatcgataactcaactactcattattttttgataaaccaaaaatattgaagaatatacgagcaactgagttcataagcccatagacaagggcaaacgaaagcattagtgctcgtgaaaattagatttgttatattttgactagtatttgttatgtttgacgtttatgaaagaaaacctactccaaagggctggctggctataaaattcatttcacaattaaaatttagggtattgttgatcctaaatcaaaggttggtaatttcgttaattaaagtttaaataattcctggttatcgaatgaggttatttgtaagaattatgagactcaaaagacaaacatcataaaagcctcacgttcccacaataaatttcatgcagacgaagccagcctacttttttagaaatggccctccttcttatctcaaaccagcttgaccgtcccgggtctgatgatacatcagttctgtctggtccaaaggctagtttaaaacttttaatagattcaaatttttattttgttaacaaaaagtataaaaaaagagttataaaaacaaatatatattaaaaaaatttgaagctgatgattatatgtttagtttgtcaggctcaaattttgattgaaatagtttcgaaatcaaaatcatgacaaaacattagaaaatgattataaacaaacaaaataatacagatggtaaaaaaacttagagaataaatctgaaagactaaaaccaaataaccgcataacatgaagcataatcgtttgtattagtgtcattgatgtgtcaccatccaaattcaattctgtacaatgcatgttgttaacaaaacaaaaaaatctgaaaccaaatagaaaatgtctcccaaaagataatctgatttccaaatccaatcccacataacccaaaaaagataaaaccatattatattttcactaaaaccagctcaaactttcttttgttctacattaaacaagcttaattttagattaggtcctagttgacacctattgggatgaaaaaaacagaacataccataggctcatctgcataagtaatgtgtaagaaagaatgattgctcttctcatactcagctatttcggggggatgaatctgaatcctaatgaatagttgatctgctctgttctgtgctgcttcccaatcatattggaccctgcaaaagctgacacttctttatcagtctacacttgcaatccatgcataaagaaaaatcacaaaacaaaataaaaagcagacctatttagatatattattatcatatatctattcatagaaccattagacaagaatgatcctaatcaatcttcacatgctaatcagcttgagatttttttttttttttaaatgaacattggatttttatagacaaattaggctaattcaagaagtcacttcaactaaagccttgatcttcaagaaatcaccaaaagaaaagagagtacattttagaatcataaaatccatgaatcataaatcgagatcacactttgtccaagaagatttaaaacccatcactcttcttcatttcccttatcttctctctatctctcaattctttcttttgtggggtcttacaagtcttagctcccatgatttcagttacagtcgagaagatgaaaataacatttcttatttgcaattgtaataatgcaatgcatgttcgtacagtttcagttttatgagggaaaataacggaaccgcacgagtgaaaaaaaaatggcaaacaattctcataatttaaagccctcgtgatgtatcttaccatttatataaaaaaatcttgcccatctcatactcaaaaaaacattacatttaatatcactatggacctaagatttttttcatttctatctaagctctgtaaatcaatcatctatatatatacatgtacttcaccattgtacttctcatcacaaaaccatctctatctctcttttattcatcattcatattcgaaacctctcattctatactcaaaatgaagaacaagttcataaaatcatgcgaaaacaaattcagaatcatgaagagcaaatccatagttctaccttgttgtacatcttcatgcgagagttgctgcgacaaggtttcttggggattcaagaaggaaaatgaagcaatacctaaagatgttccgagaggacatttggtagtgtatgttggtgatgattacaagaggtttgtgataaagatgagtttgcttactcatccaatctttaaagcattgcttgatcaagcgcaagatgcttataattcatcaagactatggattccatgtgatgagaacacttttctcgatgttgttcgttgcagtggcgctcctcagcatcagagaaactgcattggcatgtaatgttaagaagggagggattcaaaagacatattcatttggttttgattcatcatccggttctatgtttctagagagaattaatgttgaggattgatttagataatcttgtacactaattaagtaagagttttcgtaatataagtaatcatctatcgtattatataagtgagtgttcactaaacatgttacattttcaaatgtttccaaataaactgaaacattaagactatgacaaatatctgaagacaaatagcaaaacttccaacattatctgatcatgcttctgttctgtgtcatagaaaaaaacttgaacttctctgatgtagatattgtcagaaaatcaaacaactttcagtttctagcaattgtcttgactagccaaagggaatgagtttgcagctatcttattcgagtttagagcaaacttgaactcttttctgatgcagatattgtcagagaacagacacaacttccagtttctatcaattgtatctgtattattctacatcattaaaatggatgaatgtcaagaagtaagatttttttgttactcgcaaatgaaagattatgacaaagaagatataatgtgtttgttattgcacgataggctccaagaaatggccatgagatgcataggatagatattagtctaatatctaaaaagagaaactcacataaaaggattcgaaatgtttagagaaaggccagaaacatacatttgaagccaaacacaaataaatcataaagtcttttgtcaacggtgtcaaatccacatttaccaacataaaaagtaacaagttaacaacgagttttacacgtaagtttttatatcatatatatcatacaaggtgtgacaccattcacattacaatcaaaaactcaattcaaacattaacacagcaaaattaaaattgaaacaaaacacaaaaacacagaacagaaacagaggaatgctctcttagcaaatcggaatcggagctccgttccattccttgagacaatccatcaacggatcaataagtttaccttcacacatagcagtgaagaccttatcaaactcctctcccggagacacaaccttttctccagtcaacaacttcgttccaagctcttccctcacgaacctatacaacggatacgacctacattccttaatccggttaggaatcggcgcagttccattcccataagccgctctagccgcttcaacttcctttggaagcacagccttaagctcctcttcaaaagctccaatcttttgaaagatcgaagtcactgcattcttctcagtctcaccgttggacaaagcgtgatcaacaataacttgtcttagtctctgcatcaacgggtacgtagcgctacaaggatcatccacatacgtgaacacttgctcacgatcaacaaccttaagcaagtccttctcgcaaaaccttgacggatgtaactcaccgttgattccagtggttaacactttcttagcaacttgagaaactgtgttcttcacagtttgtctcagattctcctccaaatgtctcaaatcaacagcttgacatatccccacaaggaacgttgttgacattagcttaagaatatccacagcttcagatgttttacgagacgagatcaaaccaagagagttcacatcttgattatgttgctcagctgattgaacatggcttgtgactggattagccaagtattgaagctcagaacaataagaagccatagcaatctctgctcctttgaatccataatccaaacttggattactcgaagcagttagattcgaaggaagtccattgttgtagaaatcattaacaagctcagagaattgagcaaacattagcttcccaatcgcagcaatcgccaatctcgtgttatccatagaaactccgattggtgttccttggaagttaccaccgtgaatcgccttgttcctcgaaacatcgatcaacggattatcgttaacggagttgatttcacgctctatcgatttcgtagcttgacggattacttcaatttgaggacctagccattgaggagatgtacgaagagcgtaacgatcttgttttggtttctgcaatggatccatctcgtgaaccttttgagctaatttcatgtatgagcttccgtcgagtatgtgctccattatcgccgccgcttcgatttgtccgggatgatgttttaaacgatgagtcagatgatcggtaaactcaggtttcccgctcataacctccgcgaagatcgctgataaaacctccgctaacaccgcttggacattcgcttcgaatagaaccatcgacgccattccagatccaaccgccgtgccattaacgagagctaaaccttccttaggttgtaaatcgaagaatccagtactgattccggctttctcaaaagcttctttcgcggttagcgattcaccgtcgggaccggtggctttggaattaggacggccggtgagaagtccggcgatgtaagagagaggaacgagatcgccggaggcggtaatggttccacggagaggtagtgacggagagatgttgtggttgaggagacttgtaatcgcttcgaggatctcgaatcggatcccggagtatccttggagaagagtgttgactctgacgagcatggcggctcttgtggcggattgcggcagtgtgtgacatgtctccttcgtgtttccgaatattccggcgttcaaaaatctgaaatcggaaataaactttaattaattaaaatagacccgacccgaccggtatcaccgacccggtatatctcccatgcaaattgtatactcgtgagtatgcgttatccacttaagccactaatttatttatttctctgatcacattcctaatgagttctctaattattaattagttatataatataaggtataggatttaattaattacctaatgagttctgtttgtaatgcggtgccgtttttggttctccggtgagaagtagcaccaaagccggtggtgactccgtaactgtcagtacctttgttcatgctctccataacccaatcactgctagctttcacaccggctcttgaagtctccgctaactcaaccttaacgctgcctcctacggtggagatggcagcaacttgtccgatcgtcagtgtttctccgccaagattcacgactggtctacgatactcttcgaccatcttcttcacttcatctaaatgacttcctttcatttgatccgctgctaaaccccaattcaatggatctgccaaagtcttcgtagtaaccgccacttttgtcttctctcctccgccgcacaacattgcttcgatttgatccattggttttcaagaagttgtgtttaggtgaatgagatcagatctcttgtattgtttggtgaaaggagaaagagagagtttgaattgttggtggtttttggttttctgaggaggaagaagagagaagagacgtttaaataagaaggacaatgttagtgttgttgttaggtaaggacaagagaagagagaagagagaacacaagttttgattttttggagaaaaaaagtgaagtatgaggggtgggtgagagtttaatgatgaccgttggatgaagattggtgatctaatggtggataatggaaaacgtgaatttggtttgagtcgcaaaaagagtttgtcaattagtttttagatttaaaacgcgtttggttttggtttggtttggttaaatttgtgtgttccgtcaaatatcaacctcaagcatcgaaaaggtagtcgtggctggtggctgaggaattgagaaggtaataactaataagcgttttgcggttggtgagactttttggagacaaaaatgtttatacgagtgattgattatggtttgggaatgaaatgggagtagttgtggaacgtaggaatgtagttcagtcaattcaaggtcgtccccactaatttcgttttcaaaaaattattttagttgctatttgtagtttggttttattgtgaatatttgtttatatgtatcaaaaacaaaagttgctaaaaaaatgtattaaaaaaatatattcttatacaactaactagttgaagtcgaaccaaaccagcatgaattgtttatcttattatatttttcttatctatacttgaaatttgttttggtgagaaagacctgtccttttatttgaaattttattaaccaataatttttttcagtttcaacactaaaccgaacatttgacctcaaaacatatatttaattagtttgctattatgttaatgatattacaagatttgtataattttggtgactccaattaaacaaattatatacgtttccaaatatgcttctctatcaagtgtaaaggttttttttcataataattcagtacatcacaaaatataaggaataatttgttagaggaaatgaaatagaacaaaaagaagcaagtaaatgtatacacaatgagctagtgacatggatgaagacatatttagaaaatataagtttttgtttttcttgtaacatatatatagtcatatatataccatcggtccatgaagaatggaacataaatttattattgtaaagaaccatttctatctaagtaacattgaaccctctgtgacaatttttttctttggtttgctatctttggactatagatgtagaataacatgcaaattaacgtcaagaccatgtcactttaacataaaaggtgacaataagcttgtcaatcatcgatggtagatgtgaacgtaattagtttcaaaatgttttaccccgatttggtcagatcctaaagtacttgaaactttcgagggtcatttatttatgtagaatattgtcatctcattaactagctcagaaaaactcttgttataatatagatagatattcaaaaaaatagggtacgtagtatacttgagaccttgagctacctaaaaaattaggaaatttcaataagaatttaaatttgtggtggagaatatatcattacgtagacaggaggaaggtaaaccgatattaatgcgacgcaatatacaccaactagaagctaagtaaagaaacacacaccgtttgcatgacaaacgaaatggcatgtacgcaatatttacgaacatactaaaatgttttgctggtctaaattgaaacgatcaactaattacaaggagccaaggagcatgacattaggtgtttaaaataaaataaaattgagttaggtgcttaaatgatcttttactttcaaatgggaaacagaaagaggggaaaaaaaacagggaaatttaaattagacaaacaaacatgaattattgctttgtaaagccagatttgtattacgttgaaaggtaaaagattcaatatgatttcgatcatagtctattttgttgtaggttgtaataacataacgtgaaatcgtctaacttgtatattagatgatcggaccaatttttttgtttttgtttggttttatatagaaaatatctaaaggagagttcgatggtgatatcgaaccactcttttaacttgattgctgctaataaatagccaaaaaacaatatctaacataatttaagacaaatcaatgcgtaaacaaataaagctgagacggaaatgtaaagggtctccgaaccaaacaattatggctcaaagaagtagtgggttggtaagatgggttcattgaaaaacacttgcatgtgtgtatggctctttaccacatcttctatttcttactaaacattcttcatttttttgtccgcagatattgtttgacttgtcggtaacagtttttttttattagtgaaaggtgtatctgtttttgtttttaacaggaccccattgatgatatttttaggccttattttatacaaatacaaagactaattgagagaccattttaagataacaccatgtatcacgaggcagattattaaaccatcaatcaactgatgttttcttcctacatcatcacttaagtttaatattttcttcaatattttttcaaaaaaaattataaatacggctgaataacttgtttatttttctcaacatacaaaccttaaaaatcaatccaacaacaatttttttggggttaattgatgagttgtggacggagctcatacatctttccggtgcaataaaaacccctcgaaaagaaaaaattgaacctatgttttggaacgcaaaccccttacacacttggtgacaacaaacttaccaactagatgttccgaacttgccaactatttctttttataattttttttttttgaaaaataatagatgcctaaggaatttttaattctttataataaattcttttgttaatatataaaaaaacaaatattataaagaatcaaaaaataactatcccttatgcatataatatctgttatccactcttcaagactcttaacgcattagcttcgtcgaacctaaaatgctgactaagccaagaaaaataaaaaagcactcaagtatatatgaaattacgtgagccgtgaaaaaatagctagaggaccaccaaccacagtggcaaagatcgatcaggcaccactcgtctcaccaacccctttagtatcctttcacatgtcccacattatctcaaattttacaatcatcaaacgtcatttgtccaaatcagccacatatataaaacttcctcttctttataatacagtactagtagataaatgcatacctccgaatctccaatagctttatgacgtctttgaaaacaacatcaagttcttgatagttttagcacaacaccatttgctaatcaatatcttttgtgtgtcaacaattataatcagtgatttttctttgtgttatatgataaatatagcaggtctataaaatatatgtaagctcgtaaaaaactcactaatcttgatggatgtcttaagattatcaaatcacatatactctgagaatatgacaaactacataatttccaatcgtaagaaaaaccgtaattaaaattttcttaatctccttgttagatacagaatttactaaccaatatattctcctaatcaaacatgctctcttgattttgtgagagtgtgtgtgtagctctctcctacaaacctgactctgatatcgatcagtgattgcaatggcaacactagctttgagaaagtaagcgatcaagctcatcaaacccatcatcttcatcatgttccacatttgtcaactgttttggtgtcgtagtaaaaccatcaagcttggtttgttcataaaagtaaagtctttgtgaatcccattcctctttcaatttctccattctctctcccatcaactctttctcttctgatatatgctttatgtcatcaatctccattatttctcctgcaccttataagattaagaaaacaagggataaacatgattataccacaccaaacattactacacacatgcttaaaatctcacagagctcaaaatcaaataaactttgtaattttgctctttcagagatgggatgggagggaaacagcaccaatagtaaaacttagagaaataaaaaaaattgcgcctaaacagttcatataaagtagcataccttcgactgcacgcttcttggcctctgcatattctatagacattttatctagggaattcagatcaacttccttaccctgataagcacaaaagcagcagcaagaatggtgcaatataagatactttagtaaagaataaaatcaaaactgttggacatatatatcctttatcttggggaaagagccctagagatatacaattatgcaaatcctgggaatgtaaatacttcaatatctcgttcttaccatatccaaatgaataaattggttaatactagtgtcacagattaacctggcaagtcaagatgaaaatcatatcactaaaaatgttatttcaaaatttagtcctccgaaaaactcaagggtcaaaatcacatacttctcataggcaaaccgcacacgtgcgttctgtagctcggttaattgatgaattgtcttggttgcagatgtctcatccacagctccaaatattaacatgttctcatcaagcattttttttgccacagcagcagctatctctacacctttatcttttgcctcaactacaagatccctaaatttcccaagctcttctgcaagatgagaactgtacaagtttagtatgatactcaagatacggagagcttcaaacgaatagaaaaaaaaaatagttgaaatcagcaaaaacccaaagaatgagtcacatcacagcagctttcacgtttcaggcttgaaaaaacaaatagtgacaaatgatagatagatcaaacttgtgacatatacattataaaaaggttacaacaaccacgacaaaaggtgaaacacttacgaagtgagatatagattctgaacttgggtttaaagggttggatctcatgaaggcaatagagacagtaaagacctccaagtctccgtgaaaaagaatcaatactaaccatgtgacctgtagaacataaggttggcttgtgtgtttagctaggaacaagtacaaagtgaatgcaaacagcaacggaaatccaacaaaacaggaattagacctcaacgtaccaatggtatgaacatatagtgactgcatgaaaaaggctaggttgctgttaggactagcttcatatatatgagaaaactttctagatagccagacactcttcatatcagcaaaggttgtcaaatcatcctgaaattaaaaccagaagagattcaagattcaacaaattgggagatggaagagaagtgaaattcaaaattttccttaagctataacaaagattgaggaaaaaaaaaaaaaaaatacctccacaaactcgtctatcagctcatcgatatctctcttgaacggagaaagattcattcctgagtcctgacatacacaatgaaacatggagacaaagatttagtaccaagaacagaaaaaattggctctattcagaatttatccgctgcaacttttaaacgattttgtcacaccccttggatacaaaacatgctaagtaagctactcataagtcataacacaaaattttcgataatctaacatgaacccaccaacatacgtataagaaaacaccaacccagatcgttaattagagacaaacatgaacacacatcacctttagggattagggacgaacacgaacacaactaatcgtcttcctgaattgtttttccaggtctcttccagacgaacacgaacccagatatagagagagcactgagcaattgacaaagagattgaagtcgatttcttgactctcctctcctcactttatttgacaaagaaaggaacaagactgaaactcacattcttgataaaccagttgaggtttcaaacaagaaaccatcttttaagggaccaaatcctgcagcctttccattttcgattacattttccaacaagcaatcagaattgactgaaactctactatttagaatcacaagcaatacatatttctctgaaactaaacacaaaatcaaagagttttgtggacagaattcatttaggcatatcatcgaacacttggtatgcaatatataataagctttatatcttgagtcaaaagctaatgaatccaccattgactatactacaaaagctaatgaattgataaaaagcagtttctaaattccaacttctacaatttcaacattgtttgtaaacgaaaattacataactttacctattagagaataaaatgcttcgaaattgagaagatgatgatgttggagacgattacggagagagacgacggtagtggcctcaaaacaacgccggtaactatgagatcgatgaagaaacgatgctcgtgagagagagaccacagaggggaataatgttttttgcgtttcataaatgaagaaggaaagaaaaacccatatattatatgcacatatatttaatatgtatgtataagtataacctaacatgtaaagtctaatacttcttgactttttagtcgatcagattttgacacattttttgaagaaaagtctatacaatctctcaagtcccaaaagtcaagaccgaaacttttgagacaactacacgttacgagtttttttttttttttggtaaaatataaagtatttatatcattttcaaagtttcgacaaaaattacaaagagtacaagtagcgaaaaaataccagaaatctacagaaagaacatacaatgacaatcgttggtgtcagttttgtcttccgttgttgcttgtttgtggctcctcatcaggttcccttttctctgttacagtggttcgatgttggtgttttgattttgtctttcagtttttggaggtgcatgtcttgtctgagcggagatttcttgagaagaatagaggcggcgttttggtctatgtggcattgcttatccgtgagagctggtttttatcgtttttataagaatggcgaccggaggtggtttctctagttttccgtagatgctcttataaccatcggatttgtgattaagtccattgttgtcatcgcgtttttgcgttagtttgcggagaagctgtatgctcttgatccggagattttgtggacgggcctctagttgggtttgctcgtgacaactaggatgggactccagctcctttgaattgtggaaatcacgcaaattttcgagtttggcatttcggaatcgctgtttcttcttttgtttccgctctgcacgttacgagttatctctctgaaattttacacattgcaagagaacttgcgactttctaataaaaataaatcgataatcgcttataaagtcaatatataatttttgaactgaagtacgagatcctaaaattttcatagattcgtaaagaaacaattgaattgatattgtttatataacgcagacctcgtcacgtacaattttttcgcgacgttgtttgaccaacgactccgtatatatggggtaaacctcctcatagttccgtacaaatgcatcctttttaaaacgtttaataattgataaaatcaaaaactaattaaattagtatcaatatcgcattgaaaaaaatgaaccgtaggttacaaaaagtgataaattggatcaatttggaatttaagaggactatcaaagtagctgtctggtggttgagcttcgttaatggagtaatagatagcaataatacaacgagtttctatcaaaataacataaaataaaataaaataatggaacgagtcttgtaatgattttttttaaggttaattttctcatccatcaatttcagataacgatcgaatattcatatacagtacatcatagagaactatccaaatatagttgtactccacaaataactgttaaccgtttatatgttgtgcaacaaaaaaacagtaacaaaaaatgtacgcaaccgtctataaatagaatgataaacgataatcattggcaactacttttgtatatatagtttctgcaaaataaaaatactatggtagtatatgttttcatgatgataatctacatttcggctaggttttcttatacataaccaaatcatgtcccttgtcaaaactacatttaggagattagatttaactacaatatggtttggttggattttcatttgattagatatatatatatatatatatatatatatatatatatatgtctatgtaattttatatattagaaaataaatctgctatattgatttaaaaacaattatgccccaagtacaataaagttagatttgtattaaaatcagatatttgttttaaatttttttttctttcaataatatccatttaatcagattggatttccgaaaatagtaacataacaataacgttaactcaaattattaaaatatgattttgtttggctaagaaagtatgctttgtttttagtttggatttgttgagtatctcgattttagtcgtcccgccagaattgttccaacaggataaaatgtgctgcacttcattgggtctataaatgttgaagattgaaatttaagacttttaccaattacaatacatttgaaaaaaaaaaaaaaaacgtttgcgtttctcacaccatcaaccttacatatggctgttatatgagcctcgagagacttggctttcttcaaacacaataaatagatctgaacgaaaaaaaaaaagatgtgaacgagttaactttattgattcaaaataatattcagagtcggctaaaaggctttagataatgacaacttcttcttctaccacattcttctagctaggtattaataatattattccaataataagtgagaagttttgttggtgaaaaaaagagaagagtaaaataaaaagaaactttgaagggaaactttgatttggtcaaaagccaacgacatgcattggctctatatatatgtgtctttaagaactcatttattactcttcacttcaatcaaagacaagaagaaagttagccagaaaaaaaaacagataagaaaatgtctatctttctttgtttcctcttacttcttccactctctttaatcttcttgaaaaagctcttaccgtcgaaagggaagcttcctccgggacctaagggtcttccgatcatcggtaacttgcaccagtttggaagatttcttcacaaatctcttcacaaaatctcccaagaatatggaccggtgatgcttctccatttcggggtggtccctgtgataattgtctcttccaaagaaggagctgaggaagtgctcaagactcacgatcttgagacttgtagccgacctaagacggtggggagcgggttgtttacttacaactttaaagatattggttttgctccgtatggtgagaattggcgagagatgaggaaaattgcggtttccgagctctttagccagaagaagctcaaatctttcaggtatattagagaggacgagagccaattgttggtccggaaggtatcaaaatctgctcttgagacaccaacttcatcagttaatttgaggaaggtcatttttaccttcgcggcaagtatcatttgtagactttcttttggacaaaatttttgcgattttgtcgatatggagacagtggaagagttggtgcttgaatcggagaccaacctcggctccctggcgtttgctgacttcttacctgcagggtggatcatagatcggatctccggtcagcattccacggtgatgaaagccttttccaaactcaccaatttctttgaacttgtgattgatgatcatttgaagagtgggaaaatcgaagatcactcagacatcatcagtgtcatgttggatatgatcaacaaacccaccgaagttggttcttataaagtcaccgatgatcatctcaaaggacttatgtcggtgagtataaataatacctttagtaaaatcttcaaagttctacattagaggtaacttgagggacaatattatagcttggaaagcaagttaacttataagtataggcaaatataccgttttgttcttatttttctgacttggttcataatgctccctagatttatattgatgtcctattttaaaaccaaaatcatgaattattttccatgtcattggatcaggatgtgtttttggctggagtgaacgcgggttccatcacaatgatatggacgatgacagagttaagtagacatccgagagtgatgagaaaacttcaagaagagattcgagcagcgctcggacccaacaaagagaaaatcacagaagaagacctcgagaaagttgagtacttgaagatggtgatcgaggaagcattcagattacacccaccggctcctctcttactcccaagactaacaatgtccgacatcaatattcaaggctacagcattccaaagaacaccatgatccaaatcaacacgtacacaattggacgtgaccccaaaaactggacaaaacccgacgagttcatccccgagaggtttgtcgataaccctatcgaatacaagggtcaacattttgagctattgccgtttggagccggacgtagggtctgtcccgggatggccacggggatcaccatcgtcgagcttgggcttcttagccttctttacttcttcgattggagtttgcccaatggaatgaccactaaagatattgacatggaagaagacggagcttttgtcatcgccaagaaagtctctcttgagctcgtaccaactcttcatcgctggtgaagcatgcaactataactatgttaaataatgacaagaattctatatttatgtccactttactaccggtttggattttgctttgttcatgtaatccgcatgtttcatgttatctttcaagttctgtttttatgttattgtcaaaaaaaaaaaaaaaaaaaactgtttttaagttgacaaaagaaaaaaaaaaaaggttgacattacattacattaaagtatttgactcccgaagatccagggtttgttatgataaataattggttttcaaaagtatgaaggctactttaagttacttgtagaagaccaatactacgtagtcaaaactgctctaatgcttttcattcaatgattgaaccgtgttattaattagttaattagatgtatccaaaacagtttaattgaaaaaacatataatagtaaaactttaaaatttggagttcttttcttctaaaacatatagttattggagtaaacatccaaaatattatgacttttcatattctgttattagtaaattttgttttataattattcttttagaacttggagacataatataaataaacaaacctgacatttcgttgataatttttttttttttttaaaccctagttgaagataaacgacgtcagtaatcctctgcgttttactctgtttttgagcttgtctttgttccagttctctgtttcgatgttcttttatctttatttatcatcatcagctaaagaagttctcaagactcatgacctagagacatgcactcgacctaagatggtcacgaccggtttgttttcttacaacttcaaagacattggtttcactcaatatggagaggaatggggagagatgaaaaagcttatagggcttgagctctttagtccaaaaacgcaaaagtcttttaggtatatcagagaggaagagagtgacttgctggtcaagaaaatttcaaaatctgctcaaacacaaaccctagtggatttgggaaaaccccttttctccttcactgccggtattatatttagacttgcgtttggacagaacttccgtaagtgcgattttatcgatagggagagagtcgaagagctggtggtagagtcagagaccaacgtaggcaccttggcattttctgacttcttccccacgggtctcggatggcttatagaccggctctctggtcaaagttcgaggatgaacaaagtcttttccaaactcaccaatttatttgaacatgtgattgatgatcatttaaagactgaacaacatcaagatcactcaaacctcatcagtgccatgttgaatatgatcaataaacccaccaatataggctctttcaagatcacttccgatcatctcaaaggagtcatgtcggttagtgtgtatgatttcttaactggtactctggtaggatactggaggggatttgaatagcaatctttatagcttgcggagcaactaaaaatttagcttctacatttcatttcaaaccacaatcatgaattcttacgtatgttatttattcaggatgtgtttttagcgggagtgaacgcgggagtgatcacaatgatatggacgatgacagagctaaccagacatccaagagtgatgaagaaacttcaaaaaaaagattcgagcaacactcggttccaacaaagagagaatcacagaagaagatctagagaaagttgagtacctaaagatggtgatcgaggaaacattcagactacacccacctgctccactcttgctcccaagattaacaatgtccgacgtcacaattcaaggctacaacattcccaaaaacaccatgattgagatcaacacttataccataggtcgtgatccaaaatgttggactaaccctgaagaattcattcctgagaggttttccaacacctctataaactacaagggtcagcatttcgagctcttgccctttggagctggtcgtaggagctgtcccggaatgtccttgggaatcaccattcttgagctaggccttcttaaccttctttatttctttgattggcgtttgcccaatggaatgaccattgctgacattgacatggaagaagttggagctttaaacatagctaagaaagtacctcttgagctcgtaccaactcttcatcattcgtgaacaaatgcattaatatataagatcaaaatttgtaggtttgccctcatatatatagtttaatcagtttggtttttcattacattttggctttccttttatcctgtctggcttatgtattgtgaatcaagtatattcatgtttttatcttcaatagaaatattaatctatgtatgttttttttccaatgaagtggtctttaaataaactaaaccatgtttcaagttgacataacattaaaagtaaatcgttaagaggcattgaatcaaaaacttcttacaaaattcaatataattcctaagtttaattcaatcactaatcctgtttacgatcaaataaggtttgacgatcgcttcaatctagccttaagccacgtggaaccttacttttttttttttttccaaaacctaagtggccaaattagctcagaatttgtagaccgtagtgagtttatctcattagccctaaactcaatggccaatactagggtaccaccacatgcgggcatagttattttttcttcctatctgcatatttcatatttcccaatatattataactaacattatcaaacctaattagtttgtggtcacaggaatcagttccataaaacatggttagatatgttgattggcaccgtattgttgtcggtttggtttagagggagagagctttatatttaacgtgtctttttttagtggtattctccttctccatcaattaaacacagaaaatgatgtgcctcgacagagttgccttaattaattcaaattctctgatatattacacaaaaactttgatttattacaagaacctaaccacaagcataatgcctatatatatcctctctcgagaacaaaacgctcttcactctcctcatacaaagaaaaagaaagagttagcaacaaaaaaaaaacaataattatgtctatgttcctaggtttgctcttcctcttccctctctttttcatcctatttaaaaaccttttacctccgagaaagaagcttcctccgggaccaacgggtcttccgctaataggaaacttgcaccagcttggaagattgcttcacagttctcttcacaagctctctttagaacatggaccagtgatgcttgtccgttggggggtcgtccctatggccgtgttctcttccaacgaagcagctaaagaagttctcaagactcatgacttagagacttgtaaccgtcctaagctggtcgccaacgggttgtttactcacggctataaagacattggtttcactcagtatggtgaggaatggcgagagatgaaaaagttcgtggggcttgagctctttagtccaaaaaaacataagtctttcaggtatatcagagaggaagaaggtgacttgttggtcaagaaaatatcaaattatgctcaaacacaaaccttggtggatttgagaaaatccttgttctcctacaccgccagtatcatatttagagaagcctttggacagaacttccgcgagtgcgattacatcaatatggacaaacttgaagagctggtgcaagagacagaaaccaacgtatgcagcttggcattcactgacttcttccccagaggtctcgggtggcttgtagaccggatctccggtcagcattcgaggatgaacatagccttttccaaactcaccactttctttgaagatgtgatcgatgagcttttgaagactaaacaacttgatgatcactcagacctcgtcactgccatgttggatgtgatcaatagacccagaaaattcggttctttaaagatcacttacgatcatctcatagcaatgatgtcggtgagtgtgaataatcacttaattagtaccaatatctctaaattttaatgttggatataatgatattatagtgtgggaagcaagttaggtcgcattttgttttgatggtccatttatacaatttttcccctataattaaattttggttattaattttttttttttttttaaaccttaactatatatattttattacatatgtcatttaatcaggatgtggttttggcgggagtaaacgctggaacagtaacaatgatatggacgatgacagagcttacaagacatcctagagtgatgaagaaacttcaagaagaaattcgagcaacactcggaccaaacaaagagagaatcacagaagaagatctagagaaagttgagtacttgaatctggtgatcaaagaatcattcagactacatccaccagctcctctcttgctcccaagagaaacaatgtccgacatcgagattcaaggctaccacattcccaagaacgcccatgtaaagatcaacacttatgcgataggacgtgatcctaaacgttggactaaccctgaagaattcaatcctgagaggtttttgaatacctcaatcaactacaagggtcagcattacgagctcttgccctttggagccggtcgtaggaactgtccaggtatgaccttgggaatcaccattcttgagctaggtcttcttaacattctctactacttcgattggagtttacccagtggaatgaccattaaagacattgacatggaagaagacggcgctttgaacatcgccaagaaagtccctctgcagctcgtaccaactcttccataatcactcgtgaataatagtattaaataagatgatcaagatttgtatgtttgcctctatcatactacatttggtttttctttcctttttttcgtgttgccatattaatatatatccatgttttataatgtttcttatcttcaataaaaaaaaagtcatattattaagatttcaaagttctttcaaattttcattgaagtggtctttatcaaggaaaacggcagcgttttgtatagtcactactatgattgtgacctaggcactatgatccgattgatgaaatctccaagtaagtaagtactagtagtataatcctgacctgtcatcgtctactagagactggatcatacagttcttcatagactctgctttagcactgtttgcatcaaaagcaaaccacttctttttttttccacaagcaaaccacttcacaaggaagaaataaacttaataatttttcactccccccaaactttcattattggtataaaaagattattttgtttgttttttcgtgatgatacacagaagggccagacccaaacaataggtgaatactgaaaaataaagaaacttgaaaaagcccaaactccatgaagggggaaaccaggcccaatacgagcaaaacagaggcaaaacaatccgatgtccaagatcgtcgaatccgggcccatatccggaaatccccacaacagttgaccaaataaccaagtcaccttgaagaagcgccggagttatcaacaagttcgttcatgaattcatacctgagttcacagttttctgatattggaaggtaaaattaaagtcattaaaccaaatgattcatgttttttatttctttttttgttaaatgaatgagttccacaaaaaatgtttagatttttagattaccaaattagttatggttacacgaatcagttccacaaaaatatgtttagatttgtaaacaaccacattatgttgcagcttggttagagagaccactaaatctaatcttatgtttttttggggcttctctccattaaacaccttaactaaatcaatcctctgcaaaagcaaaccatttactacaaaagcctaaccacatgcattgcgcgcctatatatcgtctccggtctctcgagaacaaaacgctcttcactccaaatacaaagaaaaaaacaaaaccaagctaaggcaaaataaaagacaagaataatgtctatcttcctcctatgtatcctcttccttttccctctctttcagatcatttttaaaaagcttttaccttcgaaaagtaagcttcctccgggacctacaggtcttccgatcataggaaacttgcaccagcttggaagatcgcttcacagtgtttttcacaagctctctttataatatggaccagtgatgcttctccgttttggagttgtccctgtggtcgtgttctcttccaaggaagcagctaaagaagttctcaaaactcatgacttagatacttgcacccgacctaagctagtcgcgaatgggttgttttctcgcaacttcaaagacattggtttcactcagtacggtgaagactggcgagagatgaaaaagctggtggggcttgagctctttagtccgaaaaagcataagtctttcaggtatatcagagaggaagaaggtgacttgctggtcaagaaaatatcaaattccgctcaaacacagaccctaatagatttgagaaaagcctctttctccttcaccgccggtacaatcttcagactagcctttggacagaacttccaccagtgcgatttcatggatatggacagacttgaagagctggtgctagaggcggaaaccaacggatgcatcttggcactcacagacttcttacccacgggtcttggttggcttgtagaccggatatctggtcggcattcgaggatgaataaagccttttcaaaactcaccaatttatttcaacatgtgatccatgagcaattaaagattggacaactccaagatcattccaacctcgttagtgccatgttggatatgatcattaggccctctaaattcagttctttcaatatcacttccaaccatctcatagcaatgatgtcggtaagtgctaaatagtaacttaattattaataccaatctttaaaattttatgttacgaagctaatgttatagcttggagagcaagttaactcgtgataggcaaacatttcctttttatggtccattcttctttgttattctgtctgaaaatcaaaatcctaaactattacgtatgttataattattcaatcaggatgtggttttggcgggagtgaatgcgggaacaatcacaatggtatggatagtgacagaactaattagacatcctagggttatgagaaaactccaagaagagattcgagcaacacttggatccaacaaagagagaatcacataagaagatctacaaaaagtcgagtacttgaatatggtgatcaaagaaacattcagattacatccaccatctcccctcttgctaccaagagaaacaatgtccgatatcgagattcaaggctaccacattcccaagaacgcccttatcaggatcaacacttacactataggacgtgatctgaaatgttggtctaaccctgagaggtttttgaatacctcaatcaactacaaaggtcaggattacaagctcttgcccttcggagcaggccgtagaagctgtcctggtatgaacttgggaatcaccattcttgagctaggccttcttaacattctttacttctttgattggagttttcccaatggaatgaccattgaagacattgacatggaggaaaacggagctttaaacaaaacccttgagctcataccaactcttccatcagcactggtcaacaaaagtattagataagctcaagatttgtatgtttgcctcttttgtaatctgtttggtatgttttgtgtttttttcttacgtttatcctggttggtttgtactgtgatatgatttaggccttgtttgtttgatcagtcagatggatcatctggatggagatgagttttgatgttcgtttggtgccaaaaacggttcattcagatgatccatccaaatgaatcatctggatgagtttgaaaatttaggctaaattttcaaactcatttggctgaactaaattggatcatttggatggagatgattcagtcaaaaataacaaatgacaaaaatatcctaattattccaattgattatttagatgtatttttagatacaaaaacaaatagactaaaccttattttacaattatttttttaaaaatagaaaaattaaatttttctctaaaactgtaaaattaaatttttccgcaaaaaccgtaaaattacgttttcccgccaaaaccacaaaaatcatatttcccgcaaaaaccgtaaaatcgtgttttcccgtcaaaaccgcataatcacgttttcccgccaaaaccgcaaaatcacgttttaccgtcaaaaccgcaaaatcacgtttttccgccaaaaccgcaaaaatcacgttttcccgtcaaaaacgtaaaattttgttttccgccaaaaccgcaaaattctgttttcccgccaaaaccgtaaaattatgttttcccgccaaaaccgcaaaataacgttttctcgtcaaaacctcaaaatcacgttttcccgccaaaaccgcaaaaatcacgttttcccgctaaaaacgtaaaattttgttttccgccaaaaccgtaaaatcgagttttcttgtcaaaaccgtaaaatcacgtttttccgctaaacccgtaaaataaatttataaatgtaaagaactattatttgaaattcatttacttttaaatatattttagattaagaattaaaattaatatgtttacaagtaataataaaaatataattagatgaaagcatgagtattttaggtatttgtattattacaaatcatttggatggagattagagataagcaaacgaacaacatctcattcggatgatccagtcaaatgaaccgactaaaaatgaaacaaacaagagtcggatgaatcatctagatagacatgttgaatcgatcagttggatgaatctgtcaaatggagaaatgaacaggccttataatgtttctatcctcaataaaatttatgttaattataatctttttgtctttccaatttttcattgaagtggtctttattatgaaaacggtagatcaaagactctggagggcgagaatcttttgtataagagatcgtggccgttaaaaggcaataagcactaggatccaatggatgaaatctcgaagtataagtactatgtagtatatcgtgtagccctgacctgtaaaaaacatgcctttttcttgttctgtttggtgtttgagtgtttgactctgcaatactatccaatttcaatgggttctcacaattaaaagcatattataaaaagccatagatgcattttataactagcatatcaaatataacaagaaacagcaataagttcataagttttcttggggatgaagaaggtactactaagataaagcctaagaagaaacataagaacactcctaaacaaacaaaagccataataagaagtcatgtcaaagtactgatgataatgataatagtgatcgcgatgatgagaacggcgatagtgatagactgagagtgatggtggtggtggtgaatggtgagaggatcaagcatctctacgcaagacatggactcggatggaatgaaccatcttctggtcatcatgaagaagctcgcattcgacagtatcttggtgctttttgagcctgttccttctgcaaatcctgtcccatcctttgaagcaaaccctcttatcagcccattttcctcttagccctactaaggttccttctccatcgatgtacttgatggatgaaccaaattcaaggttattatccttcaccacattggctgggatcaactacacacaaaacaaaatcaccgcaacatgttaaagccatactgaaagtaaaacagagatagtaactgaatctgaagtcttatattcgtcacttttaccagttcataaatcctgttcttgagcgtagtcggaaagtgtggattagttaaagcttccacgtccaagttcccttcaaaaactgaaacaaaacaatctttagtatattagattgtgtttttggattaacaatgtttatgtacttttgaaaaaagactatcaaacctgcagcatcggttgcagtctcttcgtcaatcggataaagactctggctgatttcttcatcttcatcaaagctaccatcatcatcttcatcttcatcttcatcttcatcatcatcatcttcaacaacatcagttgagtctttttcgtcttccacaacagaatcagaatcagaatcagaaagtggtatggcttgtatttcagctctgacctctttgctaccccaacgatcaaagacactcacttcaaaggtacgatgaccatcatacacaaatgtcatgaactctccgttcttcagctcatgttcctctgcgaattttggccatcctctagtaagatacgcagctccgcttattttcttcaagctcacagtccaaagttttcctccaagaccttggagcttcactgtctttggcaatggatcagcaagaaatgccataaaaggcaacggaatcatctgatgaaccaaacacaaatgtcaaacatcagattacttgttacaacttaaaacaaaactcaactcaactccacaagtaaaatgtcatcaaagtcatagagtctctctgtttcaagctaagcagtcacagttttgacctatgctttattgaacgagatacaaagacacagatccagagtttttcatcacttccaatttcacagctcgttttctcatttccgtttagaagcagaagaaagattgaaaacccgtaaacccaaccccaactgctaaactagctaaagattatatctttctcataaagccataactttcatactaatacttgagattcaaagtctgaaacttttcctactacagaaacaaggaagaagaaagaaagagagagagaggttcttaccaacgattcagaagccgattcaacgaggaacactttgaagaaacgaggatacaattcgctatcgtcagccatggaatgatgttggaaacgagagagagagagagaatcgaaatgggtttcttagctagtgagaggaagataacgttgaaggttcagagtttaaaggagaaagagagagagaaatgagtcaaagaagacctctgctgcgttcttgtacaaaacagagtactgtactatctcaaagctt

SEQ ID NO: 1081 - DNA, 144628 bp, Arabidopsis thaliana
gaattcattcctgagaggttttccaacacctctataaactacaagggtcagcatttcgagctcttgccctttggagctggtcgtaggagctgtcccggaatgtccttgggaatcaccattcttgagctaggccttcttaaccttctttatttctttgattggcgtttgcccaatggaatgaccattgctgacattgacatggaagaagttggagctttaaacatagctaagaaagtacctcttgagctcgtaccaactcttcatcattcgtgaacaaatgcattaatatataagatcaaaatttgtaggtttgccctcatatatatagtttaatcagtttggtttttcattacattttggctttccttttatcctgtctggcttatgtattgtgaatcaagtatattcatgtttttatcttcaatagaaatattaatctatgtatgttttttttccaatgaagtggtctttaaataaactaaaccatgtttcaagttgacataacattaaaagtaaatcgttaagaggcattgaatcaaaaacttcttacaaaattcaatataattcctaagtttaattcaatcactaatcctgtttacgatcaaataaggtttgacgatcgcttcaatctagccttaagccacgtggaaccttacttttttttttttttccaaaacctaagtggccaaattagctcagaatttgtagaccgtagtgagtttatctcattagccctaaactcaatggccaatactagggtaccaccacatgcgggcatagttattttttcttcctatctgcatatttcatatttcccaatatattataactaacattatcaaacctaattagtttgtggtcacaggaatcagttccataaaacatggttagatatgttgattggcaccgtattgttgtcggtttggtttagagggagagagctttatatttaacgtgtctttttttagtggtattctccttctccatcaattaaacacagaaaatgatgtgcctcgacagagttgccttaattaattcaaattctctgatatattacacaaaaactttgatttattacaagaacctaaccacaagcataatgcctatatatatcctctctcgagaacaaaacgctcttcactctcctcatacaaagaaaaagaaagagttagcaacaaaaaaaaaacaataattatgtctatgttcctaggtttgctcttcctcttccctctctttttcatcctatttaaaaaccttttacctccgagaaagaagcttcctccgggaccaacgggtcttccgctaataggaaacttgcaccagcttggaagattgcttcacagttctcttcacaagctctctttagaacatggaccagtgatgcttgtccgttggggggtcgtccctatggccgtgttctcttccaacgaagcagctaaagaagttctcaagactcatgacttagagacttgtaaccgtcctaagctggtcgccaacgggttgtttactcacggctataaagacattggtttcactcagtatggtgaggaatggcgagagatgaaaaagttcgtggggcttgagctctttagtccaaaaaaacataagtctttcaggtatatcagagaggaagaaggtgacttgttggtcaagaaaatatcaaattatgctcaaacacaaaccttggtggatttgagaaaatccttgttctcctacaccgccagtatcatatttagagaagcctttggacagaacttccgcgagtgcgattacatcaatatggacaaacttgaagagctggtgcaagagacagaaaccaacgtatgcagcttggcattcactgacttcttccccagaggtctcgggtggcttgtagaccggatctccggtcagcattcgaggatgaacatagccttttccaaactcaccactttctttgaagatgtgatcgatgagcttttgaagactaaacaacttgatgatcactcagacctcgtcactgccatgttggatgtgatcaatagacccagaaaattcggttctttaaagatcacttacgatcatctcatagcaatgatgtcggtgagtgtgaataatcacttaattagtaccaatatctctaaattttaatgttggatataatgatattatagtgtgggaagcaagttaggtcgcattttgttttgatggtccatttatacaatttttcccctataattaaattttggttattaattttttttttttttttaaaccttaactatatatattttattacatatgtcatttaatcaggatgtggttttggcgggagtaaacgctggaacagtaacaatgatatggacgatgacagagcttacaagacatcctagagtgatgaagaaacttcaagaagaaattcgagcaacactcggaccaaacaaagagagaatcacagaagaagatctagagaaagttgagtacttgaatctggtgatcaaagaatcattcagactacatccaccagctcctctcttgctcccaagagaaacaatgtccgacatcgagattcaaggctaccacattcccaagaacgcccatgtaaagatcaacacttatgcgataggacgtgatcctaaacgttggactaaccctgaagaattcaatcctgagaggtttttgaatacctcaatcaactacaagggtcagcattacgagctcttgccctttggagccggtcgtaggaactgtccaggtatgaccttgggaatcaccattcttgagctaggtcttcttaacattctctactacttcgattggagtttacccagtggaatgaccattaaagacattgacatggaagaagacggcgctttgaacatcgccaagaaagtccctctgcagctcgtaccaactcttccataatcactcgtgaataatagtattaaataagatgatcaagatttgtatgtttgcctctatcatactacatttggtttttctttcctttttttcgtgttgccatattaatatatatccatgttttataatgtttcttatcttcaataaaaaaaaagtcatattattaagatttcaaagttctttcaaattttcattgaagtggtctttatcaaggaaaacggcagcgttttgtatagtcactactatgattgtgacctaggcactatgatccgattgatgaaatctccaagtaagtaagtactagtagtataatcctgacctgtcatcgtctactagagactggatcatacagttcttcatagactctgctttagcactgtttgcatcaaaagcaaaccacttctttttttttccacaagcaaaccacttcacaaggaagaaataaacttaataatttttcactccccccaaactttcattattggtataaaaagattattttgtttgttttttcgtgatgatacacagaagggccagacccaaacaataggtgaatactgaaaaataaagaaacttgaaaaagcccaaactccatgaagggggaaaccaggcccaatacgagcaaaacagaggcaaaacaatccgatgtccaagatcgtcgaatccgggcccatatccggaaatccccacaacagttgaccaaataaccaagtcaccttgaagaagcgccggagttatcaacaagttcgttcatgaattcatacctgagttcacagttttctgatattggaaggtaaaattaaagtcattaaaccaaatgattcatgttttttatttctttttttgttaaatgaatgagttccacaaaaaatgtttagatttttagattaccaaattagttatggttacacgaatcagttccacaaaaatatgtttagatttgtaaacaaccacattatgttgcagcttggttagagagaccactaaatctaatcttatgtttttttggggcttctctccattaaacaccttaactaaatcaatcctctgcaaaagcaaaccatttactacaaaagcctaaccacatgcattgcgcgcctatatatcgtctccggtctctcgagaacaaaacgctcttcactccaaatacaaagaaaaaaacaaaaccaagctaaggcaaaataaaagacaagaataatgtctatcttcctcctatgtatcctcttccttttccctctctttcagatcatttttaaaaagcttttaccttcgaaaagtaagcttcctccgggacctacaggtcttccgatcataggaaacttgcaccagcttggaagatcgcttcacagtgtttttcacaagctctctttataatatggaccagtgatgcttctccgttttggagttgtccctgtggtcgtgttctcttccaaggaagcagctaaagaagttctcaaaactcatgacttagatacttgcacccgacctaagctagtcgcgaatgggttgttttctcgcaacttcaaagacattggtttcactcagtacggtgaagactggcgagagatgaaaaagctggtggggcttgagctctttagtccgaaaaagcataagtctttcaggtatatcagagaggaagaaggtgacttgctggtcaagaaaatatcaaattccgctcaaacacagaccctaatagatttgagaaaagcctctttctccttcaccgccggtacaatcttcagactagcctttggacagaacttccaccagtgcgatttcatggatatggacagacttgaagagctggtgctagaggcggaaaccaacggatgcatcttggcactcacagacttcttacccacgggtcttggttggcttgtagaccggatatctggtcggcattcgaggatgaataaagccttttcaaaactcaccaatttatttcaacatgtgatccatgagcaattaaagattggacaactccaagatcattccaacctcgttagtgccatgttggatatgatcattaggccctctaaattcagttctttcaatatcacttccaaccatctcatagcaatgatgtcggtaagtgctaaatagtaacttaattattaataccaatctttaaaattttatgttacgaagctaatgttatagcttggagagcaagttaactcgtgataggcaaacatttcctttttatggtccattcttctttgttattctgtctgaaaatcaaaatcctaaactattacgtatgttataattattcaatcaggatgtggttttggcgggagtgaatgcgggaacaatcacaatggtatggatagtgacagaactaattagacatcctagggttatgagaaaactccaagaagagattcgagcaacacttggatccaacaaagagagaatcacataagaagatctacaaaaagtcgagtacttgaatatggtgatcaaagaaacattcagattacatccaccatctcccctcttgctaccaagagaaacaatgtccgatatcgagattcaaggctaccacattcccaagaacgcccttatcaggatcaacacttacactataggacgtgatctgaaatgttggtctaaccctgagaggtttttgaatacctcaatcaactacaaaggtcaggattacaagctcttgcccttcggagcaggccgtagaagctgtcctggtatgaacttgggaatcaccattcttgagctaggccttcttaacattctttacttctttgattggagttttcccaatggaatgaccattgaagacattgacatggaggaaaacggagctttaaacaaaacccttgagctcataccaactcttccatcagcactggtcaacaaaagtattagataagctcaagatttgtatgtttgcctcttttgtaatctgtttggtatgttttgtgtttttttcttacgtttatcctggttggtttgtactgtgatatgatttaggccttgtttgtttgatcagtcagatggatcatctggatggagatgagttttgatgttcgtttggtgccaaaaacggttcattcagatgatccatccaaatgaatcatctggatgagtttgaaaatttaggctaaattttcaaactcatttggctgaactaaattggatcatttggatggagatgattcagtcaaaaataacaaatgacaaaaatatcctaattattccaattgattatttagatgtatttttagatacaaaaacaaatagactaaaccttattttacaattatttttttaaaaatagaaaaattaaatttttctctaaaactgtaaaattaaatttttccgcaaaaaccgtaaaattacgttttcccgccaaaaccacaaaaatcatatttcccgcaaaaaccgtaaaatcgtgttttcccgtcaaaaccgcataatcacgttttcccgccaaaaccgcaaaatcacgttttaccgtcaaaaccgcaaaatcacgtttttccgccaaaaccgcaaaaatcacgttttcccgtcaaaaacgtaaaattttgttttccgccaaaaccgcaaaattctgttttcccgccaaaaccgtaaaattatgttttcccgccaaaaccgcaaaataacgttttctcgtcaaaacctcaaaatcacgttttcccgccaaaaccgcaaaaatcacgttttcccgctaaaaacgtaaaattttgttttccgccaaaaccgtaaaatcgagttttcttgtcaaaaccgtaaaatcacgtttttccgctaaacccgtaaaataaatttataaatgtaaagaactattatttgaaattcatttacttttaaatatattttagattaagaattaaaattaatatgtttacaagtaataataaaaatataattagatgaaagcatgagtattttaggtatttgtattattacaaatcatttggatggagattagagataagcaaacgaacaacatctcattcggatgatccagtcaaatgaaccgactaaaaatgaaacaaacaagagtcggatgaatcatctagatagacatgttgaatcgatcagttggatgaatctgtcaaatggagaaatgaacaggccttataatgtttctatcctcaataaaatttatgttaattataatctttttgtctttccaatttttcattgaagtggtctttattatgaaaacggtagatcaaagactctggagggcgagaatcttttgtataagagatcgtggccgttaaaaggcaataagcactaggatccaatggatgaaatctcgaagtataagtactatgtagtatatcgtgtagccctgacctgtaaaaaacatgcctttttcttgttctgtttggtgtttgagtgtttgactctgcaatactatccaatttcaatgggttctcacaattaaaagcatattataaaaagccatagatgcattttataactagcatatcaaatataacaagaaacagcaataagttcataagttttcttggggatgaagaaggtactactaagataaagcctaagaagaaacataagaacactcctaaacaaacaaaagccataataagaagtcatgtcaaagtactgatgataatgataatagtgatcgcgatgatgagaacggcgatagtgatagactgagagtgatggtggtggtggtgaatggtgagaggatcaagcatctctacgcaagacatggactcggatggaatgaaccatcttctggtcatcatgaagaagctcgcattcgacagtatcttggtgctttttgagcctgttccttctgcaaatcctgtcccatcctttgaagcaaaccctcttatcagcccattttcctcttagccctactaaggttccttctccatcgatgtacttgatggatgaaccaaattcaaggttattatccttcaccacattggctgggatcaactacacacaaaacaaaatcaccgcaacatgttaaagccatactgaaagtaaaacagagatagtaactgaatctgaagtcttatattcgtcacttttaccagttcataaatcctgttcttgagcgtagtcggaaagtgtggattagttaaagcttccacgtccaagttcccttcaaaaactgaaacaaaacaatctttagtatattagattgtgtttttggattaacaatgtttatgtacttttgaaaaaagactatcaaacctgcagcatcggttgcagtctcttcgtcaatcggataaagactctggctgatttcttcatcttcatcaaagctaccatcatcatcttcatcttcatcttcatcttcatcatcatcatcttcaacaacatcagttgagtctttttcgtcttccacaacagaatcagaatcagaatcagaaagtggtatggcttgtatttcagctctgacctctttgctaccccaacgatcaaagacactcacttcaaaggtacgatgaccatcatacacaaatgtcatgaactctccgttcttcagctcatgttcctctgcgaattttggccatcctctagtaagatacgcagctccgcttattttcttcaagctcacagtccaaagttttcctccaagaccttggagcttcactgtctttggcaatggatcagcaagaaatgccataaaaggcaacggaatcatctgatgaaccaaacacaaatgtcaaacatcagattacttgttacaacttaaaacaaaactcaactcaactccacaagtaaaatgtcatcaaagtcatagagtctctctgtttcaagctaagcagtcacagttttgacctatgctttattgaacgagatacaaagacacagatccagagtttttcatcacttccaatttcacagctcgttttctcatttccgtttagaagcagaagaaagattgaaaacccgtaaacccaaccccaactgctaaactagctaaagattatatctttctcataaagccataactttcatactaatacttgagattcaaagtctgaaacttttcctactacagaaacaaggaagaagaaagaaagagagagagaggttcttaccaacgattcagaagccgattcaacgaggaacactttgaagaaacgaggatacaattcgctatcgtcagccatggaatgatgttggaaacgagagagagagagagaatcgaaatgggtttcttagctagtgagaggaagataacgttgaaggttcagagtttaaaggagaaagagagagagaaatgagtcaaagaagacctctgctgcgttcttgtacaaaacagagtactgtactatctcaaagctttatgatttttgcagtttaacccataaattctagtaaaaaagaaaagagaagctgatttctaattggtgcttgacttctgaaacttgttttcgatcggtacttacgaatcagagactatttccatctctttcctctgttttttgttttttcatttcttttttttcttcctcattttcatcttcgtttaacaaaaataactcttatcgttgttaaattgacaaaaaacaataaaccaaaatgttattcaagacctctttaagtttttaaagtgaagctaatattttcaaacgtttacaaatgctttttagataaataattatttatctaacaaacacacaaatactcttgcatctatacaaatgacacagaaaatgcatgcatgtgaggaattcaatattctaatacagtaaataagagaaataattatcaaaaagaaaaacgaagtttgcgtgttcttctgtttatagatttgaatgaaacatcattctctgcaagccagggattggttctgttttctatggtgagattgtagcccactctatccactgttgcgttcatatatctttcacttcatgttcttattatatacttcattggactgttttgttttcagatttaaaccatttacatttcgattagaaagagtatcttataaaccagattaattcgtaaaatttcataatacaagaactcgttagattaaagattctttacgcacaaatttataatgtgcttcctttttctggaggatgggatacataagaatctaacatgcagagaaattcctatttgtaaaaaagaaagctccattgcatggagaaaactattgataacttcaagcatctcattctcatcatccctcaagttgatcttctgcatcgattttggaatacaatttgttcggcagtttaggagacgagacagagacaacctttgaacttgccttactttttgaattcgtcgactcttgtattggagacctcgcaggttgagtctttcctccagacttcttactggcagatgaagatgatccatgtcttgcctgtttaacaaagagagaaagaaatagagacatcatttacttgatcagattccagacagaaacagatcttgtgccagttggttccaatctcaaggaacaacaattgcatatttggtctctagtttgttcatgaattttggggacttactccatcaaagaagccgatttttggtgatggcacacggagacctgatggttttgcggaagctgaaggaaccaaaccaccgttgatagctgaaactcgttttgtgccttccttagcatcagcttggacaacagatgtatctttggagttcttgagaggtttcacagtttgtactgtattatcatttgcaggaaccttttcacgagagactgttttctggttaccattagccattttactagtttcagaagctcgtgatgactctgatgaatagtcactgatcgaaccagcagttggtacactggaggaaagcttgggcttggatgtcttattggtttgttggggtgggattcttggctggcccataatacctctagatgtagatcgatttgccaatggctgggaagataatctggaacttgaatcattcttcttctttatcgaatctatagaaggtttgtgagaagcgctagatgaagcactggcacagctctctagtgaagaacatgaagaggtcatttcattctttgaggcatctgaagaacgtgaagaagacttaaaaggcacaccaggttttggtaagacgggtttagcacgtcgcgacatggatattcttggacccagaggctctttacctgtactattcaaggtcatacaatatatttcaattttaaaaaaacaagtgtaaacttctttaagaacaagttctgactaacccgcaggtaatttggaattcttttcttgttgcgttttgcttatatctaatgatgacctgttcgtcgatgttgttgacaagggcctgactttgctgagtccgttgggtggcttggaaatggatgtactgagacctcttgtagcaacaggctgcagaaaatattttatttttttacaatatccaatatattcattatgtggttcactatagggtaagctattaaaagtgatgacacgcttctgattcatagattcaacagagccaattcaattttattagtccagctcattaccaatggaaacctaggaaaaaaccattattctagttatgaaagactaagaaacaagcccatttaataaatatgcacctgagaaactgaatgaagatactatacctgtttggttgccttccctggtccttgtactctactcggatttctgggactgcctttagatttagtctgggaaataaaaaaattaaagagaaaattagccaaggagagagtaaaaagagatatccacagggtgcatttgttagtacttatcggatttacctttccctgagtggcagtgacgtccactgtacttgaagctggagttagacaaagaatgcataagatggtcaacttggaaacaaatcacaagaattaactattgctgcaaatgtgtatggtctagtgagaacagcttgaaacagttcttccaatgccacaaaattaaaacacagtggcgggacactcttcatgaaatatgatagaaaactctacgattagctcacattagaatactagctctttcagaagccataaaaagaaaaaggcacaggaacagcttcattatttaacggttaagtaaagcacaacacacaaaactaaaaaaagtaaatccttaatccttattagagagacattcaaagatacacatgccaaggtgtggtaaaggcatataacgatagaaagaataaagaagactcacttgggctaattgctacgtctgttgctctcaacacattacttttcccgggtgttgcaacatcagatgttttagcagacctttgaatagatgctctaacatcctcaaacaaaacaaactcctgactgttctccacagtgcagtcactttgaaatgtagaaatggattctgtagatctattaatatcctctagaatggtcggtaaagctttcttcccactcttatgattgctttccatcatgctggacagttcttccggttccaaaacacctgatgtttaacaatatatctcagcaaaagtaaagtaatacatacaaatcgaggtacttcgttcgaaatgaacttaccagcgctagtgaagaactcattgtcccaagcaagacttttacgcaaattatactttcctttcttcataactttctcaggctcaggcgactcgtgaggttgaagcacctcttccttctcttcaacagaagaagcaagtatctcatcatcacaatactgtgtatccctcatgaagtttagatctttatcctccttcaaacatttatcatccttatctgtctctgaaatgtaatacaaaaggcaaacaaattccaactttaaactcaattacaatggatctaagttcaagtatcaatcaaatgaagcaaaatcaaaatcctctactaatcaagtagattcagagaaattaacaaaaatacccagaacccataaatccaaaattgaaggagaataagcagagatattgtaattcaccggaaaactcggagaagagaaggctatcgtcttcaacagcgacatcaatcaaaccaaggccatcgacctcaacttcgcttttcttgctctctttatcttccattgaacagagagatcgaaatgttgagtttgctcaaagatcccaaagactgaggaagaagataaaattttgaattgaagattagattcgatttgttcccactctttgagaaatcaagggtttttgagttagtgagcgcggttgttcactaatgaatcgtgtaatgtctttgatcgactctcgaccgttggatttgttccatttttatttttgtttcttacttttaaaaactaatctcgttgaagcctaataaagcccataaaaaaaaaagcaaacttgacctcatatgggccttaatgcgtaaaacccaatatccaaacatatagccgtcgaccgaaatacgatgaactaactaatagagaattctaagattttgtaattgtataaaataaaacaagataagatttttcattacattaggaaaaaagttttgaattttatttgtatataaagaaaaagaggataaattaaacgaaatcctaagaagacaaggattatgatttgggatggttaatctctatataaacagagcaaatacgtgacttatttttcacaaacacattcataaactctactccaaatacttttcctgatccaacgagtttagagatctcatcatctttcttttttttcttcttcttatacgatcaaaacatgatcacaaagaagatctttggctttgtgctcgcgatcacgattctcttgagttgctgctcggcgaaaatctacaaagttggaggttctagagggtggagtgggaagacgaactcttgggctgagcgtaaggaattccacgtcggggattctttgatcttccaataccatcagaacgttaacgacgtcactcaactctccgatgctttaaagtacgagtcatgcaactcctcttctcctaaagccgtttacaatacaggacatgatgtcgtaaccctcaaggaaccaggaattcactacttcatcagctcaaatcatattcaatgcgtcaatggactggaactagacgtttttgtcgtccatgaaaagtcacgtccgatccctccaccaccacgaagcaagacccatgaacggtcacgacccattagccattactccttcaccaccaccaccaagcaagacccatgaacggtcacgacccattactccttcaccaccaccaccaagcaagacccatgaaccgtcacgtccgaatactcctccaccaccaccaccaccgagcaagacccatgaaccctcacgtcgcattactccttcaccaccaccaccgagcaagatccttccttttggtaagatctacagagttggtgactacggaggatggagcgtttattacagttactactattacaagtggagtgagggtaaacagtttcatgttgaagatactctctttttccaatacaacaaggaactcaacgacgttagggaaatcaccgatgaacttgagttcagatcttgcgaatcgacttctactgtagctgtgtacaaaacgggacacgatctcattaagctcactaaaccaggagtgcattattttgtaagcttaaagaccggtctttgtcaggctgggattaagcttcgagtcacggtgcaaccatcaaccgaagctgttactttcccgaatgttcccaagaagaagttgtcacctaccgtcaacagatggtagttaccctttcagacctcatcactaagcattgagtttagttcaagagttttaggttttggttttgctcttttaaagagtttttggtctttttattcttactattgtttcatttagattctgttattcagtttttcttaaatttcaaagtttttatttttgtttgatcaagattaggcccataaacatgaacatgttccatatgacattcacatgtcccatgtgttagattctgagcagtaacagaaagccttatcaatatacaccaacagataaacggagtgttatcacaaacttagatcgtgaattttaccacaccacaacgattcaatatcaagtttcgtttctttttatcaatggatgatgtcaaatgaaactcgaatttaggaccaaaaaatcaaagagataattataaatcatgatgttgttttataaaagttacgggctcacttgcatgaaagaatcaacaggccaatgaagtggtgataaatagcttctgcttaagaccaaaacctaagaaacataacagtcaaaagaaaaaaaaggtgcttttcaattcttatcataagcaaaccaaactcttctccctacaacacaatcatatacaaatcttctctctcccaaaaactgagataccacaatccatatctatggaaagtggatcactcagattctcagacacaacaggcatagtcgagtctcggaagattgtgatgaatagtgtcctagtactactctgtgcccggcatttgaaccatcatattcgaaccctacattcacaaacgagtttaatcaattatctgcatattgatagattacaaataccattaacacttcaagatgctcgatgctattgccgaacctcagagactggaacatatgagaacctatgtctagatttcaaaaagtggataatgcatatatgacggttttatcgagtctattaaagtccttaaatcctttaattgttaataatattctctctttataccccggctctgctctatgtagagaatgaattcatttataagtatcaacatttcttttgtcggaaaacacttacttgagagtttccataaggaccctgtgagaatgagccttgttgaggaacctgcgagaactgttcagaaagtaaagacagggaaacaataaattagctggagaagctaatgcttaggtaaacgaccatatcaactggagaagaccgagtcattacctgagacacttggcttggttgaccatctctctttgcactcgattccccgccttttcctgatcctttagtgtcaccctatcagacagataacaatagcaaagggtagcagacaatcctaattagatacaatcatacaccatataccccataaaaggatccacgtacaaaattcgactatcagaaagataaatgaaagaggagaaccacgaacctccatctgcaaaattccaatccaaatagcatagacaaggaaatgagaaggaaaaacagagagtcagtgaatgtatagcagaatgtaaactgactaatctgaagtggaacatacctctctatatcgcatcaggtaaaccttgaggggatcgatgtaatcttcgaatcctaaagtggccatagcccaaagcaaatcatctccattgatggtcttccttttctctctttggcacttatcactagccctaaaaggcaaaacaatattccaaaatcgacatagtgactttgcttaacaacccaatgaatataacatcaatctaacttaacaaagaagagggctttacacgctataaccaccaaagcaacaaaaaggtaacatttttgagaaagtagagaaagaaattactcgctggtgacgaagctgatgaattcagagacacattcctgcatagtctctttagcatctttagcgattttgccatttagaggtaaacctctcttcatgatacggcttatgttagcaatcggaagaaacctgtcctgctcacgaacattcaaagacctcgggctctgatcaccgccactctcatggcttccaccaccaccaccaccggtttgcgattcggccatctcagaaaccctagataatcaggtagagattgggaaatcgggagaatcgaggaaccaaacccagaaagcgcgaagaagtgattagaatacctgaagaagaaggagaattcgaaaaagagcgggagacggagagagaaatgatgattggaggaggagacggagatggagagagagatttgatctgatctgatccgacgctggagaagataggagcttgtatgcgattcaacgatttagggcttttttatttttttatcgacaccgttcattttttttttgttaatttgacaaaaccaaacaaacaaaaaaaactcttttgttttttcctcaacaatgtttctttgttctgctttttttagtaattaggtgaaataaaatatataagatttatttcaatgtagtgaatttttttcttctatcatgtaaactatagtaaaaaaacatgatttcttttttatatacattgtatttatgtaagtggatttaatttatctaaatagttgttatgataagtggtttttctcagtgacatgtaatttctacttatttaattgtctaatttaattatttaagtggtttactgtttttcttgttatctttattgttttattcagtttttattctgtcatttaagcaaatatatatttgtttggaatcaaaatagtattagttttgtaataaaacctagtatcttatataataaagtaaggtttcctcaaacttgtgctctaaaaatcttacaagtggcgctttattcattcgacatgtgtcattcttcttaaatttaaatatactattttccatattctttgagtttaattaatattctatttaatgacacatgtgatatcacgttttcttttatttattatgtctaactattgctgttttttttttagtcaactaaactgttctatttcataaatcaaagcagttacgttacactaacataattatcatttatgtaattatgaccatgatttcaatatttagtatcatatttaatatcatttttagtgtaacccttcaccttataaaatgcaagacgctgcatgtcagttttttttaagttggtttctctgcatttgttaacgcttgaggttgaagcttcattctttctatacgaagataataaaaacgtgcatggtaagtttcgggaattacttcgagaggttgcctgtgaagcttcctaataaccgccatgtggagaaggagaagaagaaggaggtgaaagaagaggaggtggagaattgggggcttagagagttgatcgatggtggtgacgttgctcctggtaggattcttcataggaacaacattaacatcggttcctcaaggtttgtttcttacaactccttttaaacttctatcattctgtgttgctttcgggattgtttaaacatcgaaataatattttgtggtctgctaagtctttccacataattaaattgaaagtaaagagaaaaaaagacaaagcacgaaccatatgagtatgacggattggagaaaccaaagaatggtaatctcaaaggtttgcttcgtcctctgtattacgttgttttttatttttctcattttcactaaagaaatgaactaaaatcaagtttctctctctcatttttataattttaatatttgttttgtgtagcttttgtatcgtccaaatgtggtgatactgattcacactttgttacttctcttctttataacatgtttcatgtgtttttgctaatacatccttttataggtgcaatggtagatacaaagtggcttaaaaattattacactaagaatttcttagcaatcattacactgagaatttctgttcatgatgaaggtaataggtaagcaaatcatatatgtcttgctcgatgctcatctgtgatgtatattttatttaattattaatgtcatggttctaattttttctccagctatttgtgttttaactattcgagtcacaaccatagtcaaagtttcaaagtttagtaaatggtgtcaaaggcctttagcttcactttagtggttcgacatgggaacccggtgtcttcaacctgctattttatgaacatgtccgatattttaatagaggatataaacatagtattaatggatatacatatatatatatatatatatatatatatatatttaactaaatatctttaaaaacaaaattttatgtgactttcgtaggttttgaaataaagaggttgagtcaaattttagagtatatgcataagtgaatatgtgaaaggtggatttcctttagaaatgacttgatgaaaaatgtctaaggtaccttctcacttttacatgagaaacaaggtatcttttaccttcattttctacttattcttcatgttttgaagttgaccaatgttgtttataaaatatttaagtcaagttgctaaaattcatattaatctttaaaattattttagtttttcaatgaaaaataccaacagtgagtactcaaccaaatgataaacatatatagccaaatgtttattggatccatatgatatttcttggttggtcctgcttaatatattcactttttattttaatgtgtggctacttctttaattttcgtctctttcatttagtttatagtttaatatacaaacattattcctatttgtacacatttgatttattattaatcttatgtactaaacagtaacttataactcattttactaatcatagtaattgaaagaatgtttatcttttacttatcatgctaaatttacactatatttcgtttcttaagttttatagtgaccataataattcgtcttttgatgcatttgttggcaaatgaggtaatatagaaataaattacatggataaagataatatataacctacgagatttgatgaatgatgaaactatacaaaatatataatcttcattgatatcattggtgggaagttctgttaatttaaattattttgtatgttgttacttgttacattgcactttaaattttaaatttatttagttttcaaccgaattatggtatattttcttcaatatttgattatgtgcatcgaaataactttaaacttctttattgaaaatcatgtgtaaatagtaaatcattagtaaataaattcaatactttcttaccatattgttcaaagatggaagaaatagtaaataatttgaatattaattgtataaagtatttagagttcttttgatatcaattagtattaatatatcaatattcatatatgttaatcttactcattaatcaagactttatcaatctcacaacttcaaatctattaactactttacaatttacacacatactataatcaatatgatatatacttatgaaatcttttactcagagaaatattgcatatcattttcatatatttaaataaaacacaaggcttatcttgtatatcaatattataatttttcttttttgatcaattcgataatttttaatttataaatacccaaaataattttagattataattcataaactaaatgtttagtttaaaactaaaatatcataatcacaatatttatgatattttttattgaatgtattataaaataattaatattatattaatatatattagttatagacatatatttcactacattcatttcacccacgcatcgcgtgggacattttctagtagttaattaattattgtcactgatatctaaaaactaggtagaatgggttagtctctgccaaaaaaaaaaaagtcaaatgttttcatgaagtggatttggttgtcattaccaaagacaatctagtgggccgtctcagcgtttagtgcgcaacaaaaaggaaaatagacagaagaaaatgtcaaaaggaagatccaagacttgagaggtattcatgtggcttcttaattagagtttcacattctattacaaacttttactttacactcttgactcttctatacatgtaaagtgtaaaccaatgtacaggaccaaactaaatttgctactagcagctcacactcagacaagtaaggtataatttttcaagtattgaattcaaacaacatttcacaatacaaatttcatcaacaaatgtggcaacgtttcaacaaaaaaattaaacttagacaaatcgaaattttataaatttacatacaacaataatgccatttttattaaatcaagtaaaaagaatcagtattattattacttatggtttttcttgagtaacacaccaaacttcttcaacattttgctagtctcaatagaatctgttctttcctcatcattgttcagtatagaagctgccgtctcagcagctttcctccattgctcacattgaatcttcactcttttaagctcagcttccatggcttccgtgtttgcggtttccactttcttctccattgcactccttagaatctgcaactccatctctttatccattaaactccctctcacttccatcaaatccgattctagcttcttcaaatcgcccgtagattcgtcttctttcaccttctccattaactctttgcgcaaaccttcgatttcatctttggttctgttcaattcttccgttaactctgcttctctctgtgaatatcttgatttaaccgcctctgtttgttcgtatgcgcttcttatctgcaatgtgctctgtatatactcttcttgataccttgtctctgctgcttcaactgcagatttcaattgtgttatctcttgccttgaaagattcattgcttctttcagctcttccacttccattgatgatgaagagtctctactgtttactctttcttcctcgagctgtctgacgagtttctctaaagaccttacctcatacttagactgctctaactcagactcggactcaaagagcttcgatttcagtttctgaacttcgttaatggcagaagacagagcggtagaatccattccgtgttgtctctgcatagcttcaagttcagactgccatgtcttgtctcgctcctgcgagagtttacgcagctcctcaattcttgaatcttccgaggcattgatatccattaactgatgcttggcatcttcagcttcttcttgagcttctcttttcaatgcttctgatctgtttagctcttcttttgccttcttaagctcttcttgaagctgagatatcgtagattccagttccggtatccttcccgtccgcttcttctgaatcttgaaaagaacataatcaagaatcaccatatataaaacttgcatacaccaaaccaaaccaacaatttttaactgcaaaagtacctcattgagagggattcttgcagagcgacgatcagctactactttcgggatttgagttttcgatattgtcttggtttttggatcggattctgctccgcttggtttgagtctcctaacaactttgggagctggtaaaggagacttcttttgtggcagctccaatgatcctggcctatcacacacaatcacaatcactttgaaacagatcaataactccaacaacattcacaacaagaacacaaagttagagttgtgatcatcaccttgattttggagtctgcatttttggagtttaaaaaccttttcttttggggatataatcaattgcgttatgattgcttctttgaagaatctgacaaatagtacatgaagaccaatggaaagtgtgagaaagaagcaacagagggaaaaaaaaaacttatcataagcatatagacaaccaaactcagggaagaaagaaagcttaagcaagtgtacgaaaaaaacataagaataatatttacacatttagcttcaaagagactcctattaccaccaaacgaaagcaaagagacaacaaatgaatattgtaatgatttggaacaattccaaatatataaaatatttagaagtgtaattagaaaagaagttgccgtcaatgtgattcatcaaatcaccaaagataaaccctattacaagcaaagaaagcaccaatatcttacacataatctttctggttgttaagtcacccagttattttattttattttttactaaatcaaagttttggaattattgggaagaagagacaatttcttgtcattttgtaatgtgagatttggtttcattgggtggatcttcccaaaaaagaaacacagatccaaaaacagaacacccagcaaaaaaatcgtttttacataaagcctaaaactagagaatcttttaacattctctgcaaaaaggtgttttattacagaaacacttttgctttttgcaggaaaacaaagattaaagttttttttgactgaatctttaagctaccaaaccaaaataaaagttagctgatttgagtagatgtaagcaaatttataccttaaaccaaccaaagattaacactttcttcagcaaattagtagaaaaaacaaactagtagtaaatatctacctaacaagattgataaacttctgagaaaaaaaaggaaaaaatcgcactaaaattaggaataaatcaatgtgaaaggaagagaagtttctgagtgtttgaaaaagtcgtgaagaagtattcacctataccgtcgattcagcttctttttttgttggattaaaatggagaactgcagaatcaaggcaccagcacttagatgatttgatctttcctctttctcgtcggattgttattctttttttctcactggactcgcgagtcgttttttcccactgaagaaacatttattttcaactaaactgcaatatttatcaaaagtaacccctgaagtaatgattgtgctgtttccacctcaattttcagtacttagttatttttataatccttttacgttggattccttttggttattccgaaaaattaaaattaaaattttggataatcaaaaaaacttgtggggttggtaatgaaatagatcaataaatatcaggggctattttgaaattaattgatagaatggaccgaaagtagaagaacgtggagggggcgtttttttaactacgcgccttgtagacgcgcccgagtcacgtgctattgtttggcctcatattgctacttatgaacaacgaacggtcacgcaaccataagtcactcacacacaaaggacactaacctagcatatctatatactttataaatggaaaattttcataaaattgtcacaatttttcacaaaaacacattaaccttccgtgttcaatctacatacatttgaaagtgctatatattgaagcatgtaacgtttcactttcacaccacctcatagaaaaccgatgcatgataaatacgacatacacatctcctaaaagaaacaatgcaaaatcaatcatcactatcttcatttatcatacacgcttgctaatttacttaacatattatttccacacaactttaactatatatttgggcggaaaacaaaaattgggagaaaatatcgttgaaatttatgctaacgatcgattagcttgattacattaatggtttgtaaaaacattatattcactagtactagattattagagtattaactagtgacttctgaactactaatcaaatttttcttttgacgaataaaaagaaagtatttcaacaataaattcactacactgtctggctagtaattaaataattaaacaccaccatgcgatgatgattatgcaaaaatgttagaaattattataaaccattgatcataaaacattttgaaattagctagtgttgtttctttttttaattttcagtgaccgagagtgagtgatcgactgatgatgggttggttatgtacaaaaagtcaaaaactaatttcatccgcctcccaatttccggttttatccggttctggcggacaacgatttcatttttcgatcaaattttcggttcgatctaattcgcgtcggttgaaccatacttgaaaccgtaactcgtatccatatgtatcgttcaaaactcgacgtaaatttcaccacaccactaaaaagtctaaaaccataacgcggttctttcttcgtccttgtccctcaatttgaatcattgaaattggagccagattccaccattctcatttactcagacattgtcggaaaaataatcaaaatcttacgtcaaaggtttctgtttttctttgttttacattgtgcacaccacctgctcgataaaatgtctgtgaaactaaccactttgttgctaaagcatttatgctgtgaaattaactggcttgatcctgagttttaatataatttgaatgatgtatatatatacaaggtatttgattacttttttttgtctccccttgaaacaggcccgtcctgatatccaacttgttcatctacatatgagtttgcacaagaatattcagttgtatctgttttgaagaagtttgatataatggattatattgccttcattctcgacgaagataaagaattctttgtttggttagttggatgcttcgtttagtgacatgtctttctcgctgaaccttcttttgctaggaagaactcgtttggattaaaaaaggttaactgaaatggcgacaatgttacggttgggagctagagtttccgtcagcaacagtcagatactggcaacatcaagtgttgtatcaaccatcaagaccgaagaattaatgaatgatcacattaattccctatgtaaaagtaatttctaccgggaagcattggaagcgtttgattttgcgcagaagaactcaagcttcaagataaggttaagaacctacatctctttaatttgtgcttgctcttcatcgagatctctagcacaaggcagaaagatacatgatcacattttgaattccaactgcaagtatgatactattcttaataatcacattctaagtatgtatggaaaatgtggctcgctgagggatgccagagaggtttttgattttatgcctgaaaggaatttggtctcttacacatctgtcattactggctattcacagaacggtcagggagccgaggctatcagattatacttgaaaatgcttcaggaagatttagttcctgaccagtttgcatttggaagcattatcaaagcatgtgccagtagtagtgatgttgggttagggaagcaactgcatgctcaagtcattaagttggaatccagttctcatcttattgctcaaaatgctctgattgctatgtatgttcgcttcaatcaaatgtcagatgctagcagagtgttttatggtatcccaatgaaggatctaatttcgtggagttcaatcattgcagggttctcgcaacttgggtttgagtttgaagccctgagccacctaaaagaaatgttgtcttttggtgttttccatccaaatgaatatatatttggtagttctttaaaagcttgtagcagtctccttagaccagattatggaagccaaatacatgggttatgcattaagtcggagttagctggaaacgcaattgcaggctgttcgctctgtgacatgtatgctagatgcggtttcctgaattctgcaaggagagtgtttgatcagatagaaagacccgatacagcatcatggaatgtgatcattgctggacttgcaaataatggttacgctgatgaggctgtatcagttttctctcagatgaggagttctggttttattcctgatgccatctccttgcgttctttgctttgtgctcagacaaaaccaatggctttgtctcaaggaatgcaaattcactcttacattatcaagtggggtttcctggcagatcttacggtttgcaactctctgcttaccatgtacaccttctgctcagacttgtattgttgttttaatttatttgaagatttcagaaacaacgcagattctgtttcttggaatactattctgacggcttgtttgcaacacgaacagccagtagagatgttgagattgtttaagctgatgcttgtgtctgaatgtgagccagatcacataactatgggtaatctgttgcggggttgtgtggaaatctcatctctaaagttgggaagccaagtccattgctatagtttgaaaaccgggttggcgcctgagcaatttataaaaaatggactgattgatatgtatgccaagtgtggatcactggggcaagcgagaaggatttttgattcaatggataacagagatgtagtttcgtggagcaccttgatagttggatatgcacagtctggatttggagaggaagctctcatattgttcaaggaaatgaaaagtgcgggcatagagccaaatcatgtaacttttgtcggtgttcttactgcctgtagtcatgttgggctggtggaagaaggcttgaaactgtatgcgaccatgcaaactgaacacgggatttcaccaacaaaagagcactgctcttgcgtggtggacttactggctcgtgctggccgtttaaatgaagctgagagattcatcgatgaaatgaagttggaacctgatgttgtcgtgtggaagactctactgtctgcatgtaaaacccaaggaaatgttcatctcgcccaaaaagctgctgaaaatattctgaaaatcgatcctttcaactctacagctcatgtattgctctgcagcatgcatgcttcttctggaaattgggaaaatgctgcattgttgaggagctcaatgaaaaagcatgatgttaaaaaaattccaggacagagctggatcgaaattgaggacaaaattcatatattctttgctgaggatatttttcatccagagagggacgatatatatacagtcctgcacaacatctggtcgcagatgctagatgagtgtaatccgcaacacaagaaaagactccagtttatccatgaaaccggataaacaagcatttaagttccatctgagagaagcacagaaaaatgccattgtggctactctgtaagttgcatcttcttccttcttgatcttgatatcgtgtttcatcttgtttgcttgcttagataaatgctgtcaatagatatcttgccttttccttttctgcagtctgttgtcatgagattgacgcagcgtacatagttgccagcgtgtctattaaataaggcatttgatgaggtattatttcacttgattgtaacaaaatcttgttctgtttaatatttttggttacctattgagtaatactgaaggacggtttacttattgctgcagaaatgatgacaaatttcaagaatctcaatgtttttttctctcttgctattttcaaattggaactgtaggatgaactggttaccacattgggttgctacagacaagcgggatgggcaacaaatgcagtgctatacaaactacgaaaagaggatacatctcaacttatctgatgagtacaacaaatttgagttaagatgatttgaagaaggccatgaagcaaaactatctgctgggtatgtcttgaatcgcttcccctaaactgtaatcttatcaaaccgctgaaattgtgatgttttaggttgctaaacagtattgtagggatgagttgattcaatttccttgagattggctgttttgagatgttggattccttgttgattttccaggtatgaacatgtaaaagctccagactccttgagtctcgtagaagtgacgacgcaacttctttcttcttatatgtctagaaatggatcaaacactggactaagaatccggaaatcgtatcgcaaaacgaatcaaaacgatgaaagttttagtctcttatacatctgtgattattgagctaataaaacaacttgatacgaaacaatcatgggacgtcaatgatagtttagttgatggatctgtttgtaaaaatcaaatattgactctctttgcgtcttgattctgtgaatatacacatcttgtctctatagctattcggtttagcaaaagcaggattggtagcgccgtaacaatggaaccaagtaacatctaaatagtaaataagttaaatgatattgaagatgagaatttgtagcaaagatgatgtgagagactctacagtagcaaccaaatgtgtgtatgaaggaaaaacaagtcagaccaaaacaatagtctacactctccatgtgaaatcatacaggactcaagataatcctcatgacagaagtaaaggaagaaaaaacccgcaagggtgaaatttggtaaccgaacaaaaaccgctttgaaggaggcacaagtgaaggaagcttaagctggcttttattctccagggacagggactccttgctttagcttctcccgcttgagcttctttttggaaacgggcttcttcttccttggaggtaggttcttctgagcataaacgtaaagcacgtagttggcgattaggaacacaagaagcggacctccaacaacaagcagcacgattaatcccgggttcaatcccttggcttcagcagccgcctatgaaattcagaccaatgtatgcataaatgataccaaacatagaaaacaacaatctaggaccaagcaaacatgtatactgaatgagattattgcaaagcgtgcaatgttgtccagcaatgcatgcaaatgattatttttttctattcctctaaaaagctaagacatcacataatttccttagatcattaacaaaatagcccacaaatcacgaatccaacccttaagaaatcgattgcacattccgggatcgcagaagaggagctattatggtaaaatcatctcgatttcaacggagataccgttaaattctacaaaaggtgaaagtatagagaagattgacggtacctttccggcaaaatcttcgccgtccatgattacgatccaaaatatacgtgagatcagctccagtaacgtactaatggtaggaagagaggaggaaaggaaacgaggatctgttttcgacacagagattaataagacgcaaacaaactcacacagagataatatacacacgtgttttatccactacatcgccactttcactaatccataaatattattttggaccccttactttttaggtatttcgatttcaatccgtatcttttgttttgctaggttaggcccgtattatatctaccaaaactaaggttgtttgatctggttttagttcagcttgggtatggattggtttgtcccgatgttttaatggctttctaagaaaccaattttgtgttcttatcttacatacattgaaataacaaaaatgaattgaatattacaaaaatcaaataatcaaacacacaaaacacatctgtttggttcaactccaatatatctataccaaatggtcatcgtcgcttcgaatgataacgttatgttcgggcaccgaccacgaagacgatcgactagagttcaaagccacggtattacaatcagagagagtatcttgcaaactcagcaacaaatgcgaagtgctaaaactcatggtgggtctagacttaggcacaaccggtacatcagcctcaccaatcagcatttgcaccactgacctcatagtgggcctaaatgctggatccggatgcgaacaagccaagcccacaaccaagacccgccacatctcaccttcatcaaacttaccttcaagcctagaatcagcagctgcagaaactttcccttctttatacaaaccccacacccattctactaaattcggattcaccccaacattatgtctttgcacatttaagtccttctcaatcggtcttcttccactaaccacttccaaaaccaccgctccgtaactaaacacatccgtcttctccgaagcacgacccgtcagaagatactccggcgctaaatatcccatcgtcccggcggcaacagttgcttccggcgacttatcatgctcaatctgtctcgccaatccgaaatctccaagcttggcattaaaactctcatctaacattatattactactcttaacatctctatgaatcacctgattctcacactctctatgtaaataagctaaagcagatgcaacaccaagcaagatctttttccgatgatcccacggtaacgtgaatcgtgactcaaacaaagctttatcaagcgaaccattaggcattagatcgtagactaacaaaatctcacctttctcgtgacaccatccttgtaatctcacgaggtttctgtgtcttaagcttccgattattgatagttcagataaaaactcgttctttttgtcttgtgagctatggctgcatcgtttgacggcgacgatgtctccggtctccggtaatattcctctgtatacgactccgaaggctccatgtccgatgatacgactctcgttgaagttctttgtgccggctttgagttctttatagctgaactctttcggagctttgatgatttcagatgcgaatgaatcagatctctcgacacgtttgaactttttggagtaaacccagaataaagctccggcgaatagtgctaagaagaaagctccggcggttactactccggcgattgttccgggattctctttgcagaaacggctgtggcaagacgacgacgacgaagtttttaattgagtgttgcttgagatcggaatcgctgaagacgacggttgtgacgccaacggcggcggagatttcaccgaattagctttcggattcatcaaattagcccgaggaggaggtgacccggatccggatccgagactcgacccgaatgatgaactgaagctccaccattcgatactgtgaatctctgtacttccctgagttgacccggagaatccaacgaacatgaaatcgttcacgtatcgatctaaatcgagagggaaagacaaaattggaactttcggtttcagatttgagtaagagactgatacgttgaagacccgagtcaatccgtcgtattcgatccatgaattgatggtgttgccgctcttgagatcgatgtttacggtgccaagatcaccggaaacagaggaaactacgccatttacgtcgaatccaacatggttactgttaatgtccttgaaatctacatccattaaagtatcgaattcgacggcgacaaattttgaaccggaaccgtttggaccggttagaccaagagagccaccagcgatgccgattgagtttgcgtcgggagagatgacgaaagcgagaccaccgccgatggaagaagggttgacattggttatagagaaggagaaaaaagaagagaagcttgtcggaaagtgagttccaggttgtcggaatctgattgggttagagtataagacttttccggcgccggaattaggtacagagaggtcacgtgtgaggccaacgattccattgcttaaacgtgcatcaccgaggagtttgaggttgcttatggctagcgtggagaaatcaaactgtgtcgtcgtagctccattgaagaaacagagcaagattgaaatgaagaaggagagaaagagagacattaatgatcagttgaagaaatgttttttcagagaagggccattggagaagaagaagaaagaatcttaatttgagagattgagaaagagagatttgatgaaagtcacgggtagtgtattggggcaatactttgcttggagtaaagtaaagcagaggaagagacaaagaataatatggagagagcaaaagagaatccaaagcgacaacgaatgaagtcagacaagtggatagagagatgtgtaacgccacgtgggtttttccaacggctatatgtctttttgtctgaaagttttttttttctatggagaaaatgttatgatgtatcgaagtgacttttgttgttctgattttctcacgtctaacaaataactacatgcatgtaacggtcgtagcacttatcatctttctttatttattcttgtcgtggtcgtggtcgttggttgaaaggtaaaagacgcaccagaaaaaagtatccaaaactttttggctaattgtcgtaccaagaacattaacacaaatcatcgtcactggattctctagagtttccaagacatcaattaggggtgagaataaaacctcatcaaatcaaattatggatgggatggggttcgaattaaaactgatgttaaccaaacaaaactgaatttcttctaagtgaactataccaagttttattttaactaaaacggtaataactcgtctgttttttttctttttcttttcgaccggtaataactcgtcttctagaatcaaatcacattaaagaaaatacatttatgtcatgtacactgaaccaaaaccaattccatatttggataatttgatttaaggcctgctttcacaaaaataatccaaaaaaaaacttgaatgctaggcctattatgaagaaaactactttagtttctaagctgaaaggccgttacttcattggtcatcaattgatacataatgggcttgaaagtgggcctgaattggtctatgacgtcaacccacgtgatctatgcgtgtatcttgattattaaaaaacccgaaaccgaaataaccaacccgacccatctgatcaccatccgttaaaatctttcttacgagaatcttcaccgttgattgcaatgactttttaaaagcttccgagtcaaagctttgataatcataatatgttgcgagaaacaagtagttgcatcataataaccccttttgattcggtaagccattagagacctcagaagaagagaagtttttgattcttcgtcgagactttactcgattttgcatcgaagaagagaggaagaagaagaagaaaaagtgaaaaatttctgggtttcgattttgggtgagagataacaaaccctaggtgttgtgtaaatcgtgatcacatatatgctttttgagtcgacgattagagaagacgaagaagagtagcaagcaaacactatgatgaacacttctaatggaatgatatcagcgccatcttcgtcgtcttcaccggcggcgaatcctcagtcgccgggaattaagacttatttcaagacgcctgaagggaagtataagcttcactacgagaaaacgcattcctctggtctccttcattacgcacatggcaaaactgttactcaggtaaagatcaaatttttatatttgggtttaatagtttgattcgtcattaggatttctaatcattcaaatcggcaatttcagagaattagtatcgatggttaaatttttgttagtgaaattttgcattttgatgcactagttggttagctgatcaatcgatttgaatagcattgctttccaatgatggaatttggaaattttcgttttcaggtaactatagctcagcttaaggaaagagctgctccttcgactccaactggtacttcgtcgggttatagtgctagtagcgggtttcgttcagcaacagcgaggttgctaggaactggaaatgggagccgtgcgcttagttttgttggaggtaatggtggcggtaaaagtgtgagtacaagttcaagaattagtggctccttcgctgcttctaattctaatacttcgatgacaaatacgaattttgatgggaaaggaacttacttggtcttcaatgtgagtgatgctatttttatctgtgacttgaactcacaagaaaaggtaatttcttcttttctttgttttccttttagtgatttggctgtaatgttctgttttttgttttgttttggaagtaatggtttaggaaacttctttgatgtaggatccagtaaagtctatccatttcagtaattcaaaccctatgtgtcatgcttttgatccggatgctaaggatgggcatgacttacttattgggctgaattctggggatggtaatgtagaaatttgagcttaccgttttcaccgctgatctagatgccttgtctcatggatttattttgttatgatgtgttattgtagtgtacacagtatcactgagacagcagttacaggacgtctctaagaagctagttggtgctctgcattataacaaggacggttctgtgaataacaggcaagagtttatctttttccgtgtatctttaattttccttccatctttttcctttactattatttgttagtgaaacttgaagaattgattccactggttcaagtgattccgctttcatgtcttggattgagctagtgaaacttgaagaattgattccactggttcacaatacttcacatttactttgtctaaggatctctatgtgttcttcgtttgtgcttgtgctagtatttatgtcagcgtaacaaatttatataagtttctgtcattgtaatagattgtgttctaggaaactctcagtgacagtagattagttaaattataacagaacagtatgtttccttagaggagttcgtttttaagtaggttaagttgaaacatgaatcaattttggcgtcatgactcttgccttctctaagtttaaaataaagtttgttgctttgtaacagtcgttgcactagtatttcttgggtgcctggaggtgatggagcatttgtcgttgctcatgccgatggcaatttgtatgtgtatgagaaggcaagctcagatatcagaatttgttttcttgcatatgacttttaagttgcctgattttgtctaatccctgatcctgattaatttaacttaatagaacaaagatggtgccactgaatcaacatttcctgctataagagatcctacacaattttcagttgacaaggcaaaatatagcaaggtatgtgagtatgcaaccatttcaattgatccttatataggtgcgggaagcacatggtacatgcatatcctctactagtatcatcatttgctagtggttataagaaattattgtattacatactttcttttctatctttgagcatattttgatgtactattgtttattcatatgagtattcatgcagagtaatcctgttgcgagatggcatatatgtcaaggttcaattaacagcattgcattctcaaatgatggggcacacttggcaactgttggaagagatggtaagatgcgtctattatgtcgtgtgttctttttctttctctatgtatttctttactaagcagtaaacttttttaccattcacaggctatcttcgcatttttgacttcttaacccagaagctagtatgtggtggaaaaagttattatggtgctctgctgtgctgttcttggaggtgatgggttataattcctttggcaacttttcttataattgaatttacaaaagttgtcttaaatagataccagtgttgtgagcatatcacccccgtatgatactgtttattgacattgtgattgtattgacactgacagtatggatggaaagtacattttgactggaggtgaagatgatttagttcaagtgtggagtatggaggatcggaaagttgtggcgtggggtgagggacataattcgtgggtaaggttcttgatgtcaataagatttcttttatttaacttacacagcacttgactcatgtcggaatggttgctctcaggtaagtggagtagcgtttgattccaattggtcgtcaccaaactcggatgggtcaggagagcatgtcatgtaccgttttggatcagttggtcaggtatttcttcataccttgacccattttgctggtagtcctttgcattaccaaagaactgaaatgtgtttaaactacgggagttgtgcgtagcgtatctatattgcttgattggctttatcattcaaccagtgatctcattttcttatcattttaatgatgaggaaaaggaaaaagacaatattttataggagataggttcttaggatgatcagaaaataaggggaaatcgtagtagtgtagtttcatatggtctgataaagattcgttagcatatcaaattgtagataacgattttgttggtctgctagttagaaactttgttagaaagtgaagtgtttcgtagtatgaagcagccttaattaggatgctaatgagatcatttccacaaacatgttttctgaaagtcttctttttgagaacttaatttgctattaaaaaccatagactcctacgatttcagtctcttgattctcctatatatgatctgcaagtgtcttgcctcatacacactgctgctttcttctgctgaatccccaggacacacagttacttctctgggaccttgagatggacgagatcgtagttccacttaggcgagctccaggaggatctccaacttacagcacaggaagctcagctcactgggacaatgtcataccaatgggaactcttcaaccggctccttgcaaacgcgatgttccaaagctgtcaccgatcatagcacaccgagttcacacagagcccctctctggcttgatgttcacacaagaatcagtcgttacggcttgtcgagaaggccatataaagatctggacacggcccagtgaatcagaaacccaaactaacagctcagaagcaaatcctacaactgccctcttgagcacaagcttcacgaaagacaacaaagcttcactgagcagcaagatcatcagtggctctactttcaagcaatgacagagagatgctacttgtctgaaaatcaatcaggtgctattatttagtcatgtttctccttctaaagtgaaagaaaatctttaaagaaaagccctgtgaataaaattcgactgggttttgtttttgtttttaatattttaaaagaaggatcaaaatctgaattctgactgtaaattggaggctgacaaattaagtttgtgagagggggggggggcatagaagagaaaatatgggagaattttcggatgtaattataagaaagaaaacaaaatctgtttacataataagagtctcatcatccaataatgcaacttttgtgcttcagaataagaatgacactctttattttcccaaataaacgattcctgctctatttattttatttggtttctcaaacttaatattcttttcatcaaggatatgttatgtatactacacaacaccaaaagaaacaaagagtttagttgttgatcgatcttccaaaagatagtctttaacaaatgtcacagtaaaaatcagcgaacccatattccaaagtcacattgcaatatgattttgtctgagaggcatattttcttatttgtttagttacaaactagtaattttatgtttaccttgtactctgcgtagctttacacgagattgttttaacaattatagacattctagtcaatgatattcgagtccactgttaacccggtcagtgtatgtagaaagaagaaccgtgacacgaccgacaagagataaaatcaagggaattatttggcatattcataattcattgctttgtccattcctctctcttaaatcttaatcataccttttttttttcttataacgtggcgacattaatgatactattacttttacttacttagatacttgacaattaccgtaaaaacatcatctagtatatactttgtcgctgtctcacgtgtatatgcgtcagaaaaaaccttattatgtgtggttaaaatgggaggatttgcttattgagagaaaaaatgattctaaaaggaccattcgagaatctctagtttcttactacatccttaagtgaaatttgtatgagtttacttctctccaatttaaacatttgatgtggtgtaggcaccactcgagattcaagacagctggaacaaagccgataaatgttagaaatattctttccaataattttattttacacacacgaaaatggaatcggatggcgttgatatcttgaagcgtcggtggattggattcactctccgaaccctaaactatactctttaatgagcatgtacattctaataaatcgcttgatattattattaggacataaatgtgaatatacaattattggtccatttctcgactggttattaaatcctttacatgcaggttgaaaatctctacttttaagtttttttgtttgtgtatacaaaattgtaaaacagacatcaattatttcttaggattagtcttaattagtaatttttacggtcttaaaatatataattaggaaaactaattcgattataaaattattggtccattgggatttgtaaaaaaacactttaccgtatcttatcatatcaaacttgttgattactcaacgcaggcttcggaactaaccacgtgtcatgatgacgtcatcacttctctaactctcttcctccgttcctcgtcccttcgcagttgtcactttattattacttcacttgagcttctctcaagatcacagatctctcgttccttctgctcccaactctctacccagattccacctttaccttacgaaaccctaatccccaaaatcagcttaaagtttcaatctttgttgagaagaagagagttcgtcgtcttagtatgtagctagatctcaaggaaaatacgaatggttcgatcaattgggtagacaacaaaaaaatggatcttttgatgatacagagacgtgaatcgagaagggtctggttaggtgtacaaaattcaatagttctcctcgtgggtggcaaccatacctcctccaggttttgcactcgctaaatctctcttcttcttctgcctagaaatcttctcttgaaatcaaactcttcagttcttgttttaactactatgggctttgaggtgttgaagctgaaattgatgcctagttcattccgtcggcgcgtcatcttacgcgccctcgtgatcgtctgcgctttctctgttgtatctgttttgcgaaacctcgccggagcttacgaaggagagactattaataatactcagccgtgtaaggttgatgaatgcgccgtgaatttcgcgtttctaggtccgtttcttttctcaggtaacggattgttgttctccaatagattcttgaaacctgtttggaactatttggaatctgacaaatgtaaggacaacatttatttgactactcaagttgtcagagagcttactggtatgaatctgctgagtaatgattcaaaagctctctgtattggtcggagatcggtttcagctgttcttgcgatgaatcgacaagggatctctgatgttagtgtggcttatatgccacctgttttcgctttcaagcataggaagttcacaagtgagctacattatgaggatgcttcttttggttttgtgttttctatggatcttgagtcagttgctgtccctgcttcacttgtttatgagatcgagcgtatacttaagcccggtggaactggggctatgcttgtcggtactactagtgggtctgactctaacgagttggttagatccgtttcgcctgtttcttcattgctgaagaactcaagtgttgttcatgttgcttcattgggtaaacaggttttggttgtattcaaaagagatggagaagatagtttccgcttggatcaaactcatcatgactttcctgctgattgctcgtctgttctcaacaaccggccatacattggattattggagcctcttctggatgaaaaacgttcggatttcgagagacggattcattacttgcctgagttcattgatctctcttctaggaagaggctggtttatattgatatcggggcagtggatcatgtgaaagcaagatcgaactggttcttcccatcgtacccgattgataggaaagcttttaatagctactttgtgcatcacaacacatctatcttgacttcttatgtcaaaagccctggtgtaaccttcatctatcatccaggactcgcagcaactaaaactacaatagccaataccggagatcacgaagaaccttttgtggaagatgatagctttgattttctagcatggttcaaggaaactgctagcttcgctgattttgtggttctgaagatgaacacaagcgatactgagctgaagtttctctcagagctgataaagacaggagctatctgctcagttgatgaactgtttcttcactgcacaggctacagcgactgcaccggtatcattaaaagcctcagaaacagtggcgtctttgtccatcaatggtgggaagactaataagcttaacaaatgaagctttataaactaaaactatgttgtttggtaagttggtgttgttttgttttccaatctttgctcatgtatagagcaaagccacagaagtttgctccagcgacccagcacttctgtggttctacctaaataagctgtcgtcgttatgaactttgttttgtgtgtttgttcaatgaagtttgctatgttgtgtgtttctactggttttcatgctctgtttcacaaacgcttatagtaccaaagtagcctgacgatttaccaaaatactggaccacaaccatgcaggcatgccaacaaaatattagatgatgttttatggtaatttatcaaatagtatcatttatgttgtcacgtcttaaaaaaaagtatgattaagagaggagtggacaaagcaatgaatttgccaaaaatctcttgaagtacctattcccattcacccacaggacctacttcacgactcgccttgtatgtattcacccttatgatctttctctaaaaagtatgagttatctgatggtttggtgttcagactgtggatggatcatcttctgatctgatgatgcatctgttttcactgccacaggatacacatgtgtctcacttacctcgaccaaatctgcctctgatagagaggagaaatcaaattcagttccacaagcctgcttgaatctctctgcccaaccttttggaaaactaagttgagtggatggggaaacagatcctcctttgtcacaataaagtcacagccttggcctttgatcagatcatattgtaacacatatcctgccactggcaagattagccttcccagttttctttgcggaccagtagtaaatgctttatctagacggttttggttgttaataaaaatgaagaactttttgagactttaaccaatcaaatagcataaacgagggatgatttgatacgaggagtgtgtgacatttgtcacttcatccctcgtgtctactatccgattggctatactctctaaaagtgctgctgctggtactgcaaaagttgttcacttcattaacaacgaagaccgctagacaaagtagcatgatgatttacaaaacacttggaagtaaaacccggaatttaagtgtcatttggcatatgtaagttagtaacttgagttctaatgcctgcatatataccgataccacaaacaagaacattgggaagcagtctttatataaaaacaggagaagagtaacgtagcaaggctcactagttcctgtcgttgttgttcactgttatctccaaaagcctatccaccggttgtctacagatggggcagaggtttgtctgaaacctcaaaagctttgcacaaccgctacacatacactacgaatcacaaaaacaaatatcaaagttagctatcaatcaagaaaaaagccgtcttctttctcaaactctctcttaaggatatttatctgcttaccatgtgcctgcaagggagaacagtggtatcccgtggctcagataagcagatgacgcattcttttcctctttcattcgcatcttctccattatcatcaactgtattaccaatcccataaatctcttgaagaacatacctattcccattcacccacaggatctgcttcaccactctcgccttgtactcacccttatgatctttctctaaaaccacatgagttatctgtctgtttggtgtcccagactcaggatgatcatcttctgatactacctctgctttcactgccacatgatacacatctgtctcgtttgcctcaaccaaatctgcctctgacatatctgagaaatcaatccctgtcccacaagcctgcttgaatctctgttccagaccttttgcaaaactaacttgagtggatggaaaaagatcctcctttgtcgcaataaggttacagtctttgccttctttagcaaagaacattacagtgatgctgttgaatcaaaaaccataagaactgagcatcgatcaaaccttcaacatctagcaatcacacagtgaaaagatgtcgagctgtataaaacattgatcattaccttccaggaacagaggcgtcaaaagtgaaggagagcaaaaacttgccagggttctgttcatcaggctcaagtctcaaagtttctttcttcagattgatgtcgttccttatagtcactgcttcctgatgctctacgtattgcactggagacgccatctctccatacggatacctagcacaatcttggtacggcgacggataattgccttggtactgagcattagggtttggatacggcggcgaagtacggtcccgatgattttccgggcggcttccaccgcttatgacattgcccatgatccaactttgcgaaattgaaattgcaaatcgattacaaaaagatgaaagagagtgggaggaagatgatcagaaaagcaggtcaactaactttgtgggctaagatacagggccacacgtatcggcccatataaaataccagttttaccctatatttatttcaactcaaaacgattacttgcgctcgaagattctgttgatctcctctctccgctgatagctccatctttctctaaagcttctctcttgtgttacaggttcgataataaacaaggtcggatttacctgatcaaacgtttgtaatgtgggacaaacgtcggaggggagacacaacttttcaggcatgtccatttcctccaaaatttccagcacggtggctctggccagaagacttacgagaaggtgtgttttgtcctctcactcacaggtgaaataatttaccagcacaacaagtttttctccttcttctttttgtttcccacacagatgcaacgggttcaggaaggtctcgtctacggttaatgaacagaggaagcttcgggagacgtgtattagatggggtgaatatgccttttcttgtacattatgcgatgttgtttgccaaatctttgaattgtccgccaagcatctccagagtaaacaacataaatcgttcgtaagcatcccagcctattgtatcactacattcgtcattttcttactactgtatgaggtccctttagaaactttctcgatatcaaatctgatctactgggtttgtgacactcagctcttcccgagaggttcaaaactccatcaattctttgaatggtgcagtagtatcatcatttctcttcttcgcataacaatttattcgattagtacttcttacagtaaatgatcaaacatctaacacatgttttactttcgtaattaaaggatttggatggtaggcagtctcagaggctgaggctaggccaccaagaggccaattttgagcggccacacctcttcacgttctcataaaaaatgcagattctgaagggtaagactctcaatcctcagccaagttcgagcatttcctatatgattcataattgtcaagtaacaaacgactaagtatgttgaatcttgaatgtaacagtttctgtgagcctttgaggcatatggggttaatggacaatggcggtttcagagagtaactaaaacttactgctggtgcacgctaggctttatccgcctgagatgtatgaagacataaaggaatggtcttttctagaaagataatgattgcgttaaagcagagacatgtgtttctccaaaatcctgcttattcactgagcatcttgaggaggacgtaaacaagaccaagaacatggccccatggtgttgttattctctaaggaaactaactttagtactagtattaatgtaaacacaacgcataagaacctctttgatttcattgattataattccaatcactcgtttaaaagcgaaagaaaaaacaattacaccgaaggaaaattcacaaaagagcaagtggaaaacacaaatataagaaagggaaatgaaaactgcaagtgactgatttagatttgtacagagagatcacaacttcatttattcttgagaaatctggtttgatgtgtttagacgttggcagcacttctgaatgatccaagagacttagaacctgaagctctcagaacgaattggtggtagaatgcagctatcgcagctccaatgaatggtccaacccaaaatatccactgtttgtaatcaccaaaatttcaaaacattattcccttgtaaaaatgaaaaatatagttgaatgtaatggagaaacgttgaggtcttacgtggtcatcccatggcttgctcttgttgtagattacggcagctccgaaactccttgccgggttaattccggttccggtaatgggaatggtagccaaatgtaccatgaacacggcaaatccgattggaagtggcgccaacaccttttatttcatcaaaattcaaatttattagtatgattgaaatcaaatgttggtttggtttgctttggttccggttttgagtcggttaaccatattgaagattaatagcactacatatgtgactcaccggaacgtgggagtctctggcactacgtttggggtcagtggcagagaagacggtgtagacaagaacgaaagtaccaatgatctctgcggctagaccggtccctgtgctgtagccatcggctagagagttggctccacctccgtaacgggtgtagtaagagctttggaaggctttgacaaaaccaactccacaaatcgcacccaaacactgagcgattatgtacaatagggccctaggtaacgacactttacgtgccaagaatagcccaaatgtcaccgctgggttaatgtgaccacctaaggaaacaaaaagagttgacaatgttaccagtacttgagaattaaggtacaacaagcaattaattaaccggtttcaattctggttaagacagggttagtcagttgcttaaaataattactaggcttagattagatatatatcattcggataagaaccgatttgatcatgacccttattaaatgttttataaacaaatcattttcgtcttttaaacctaagattttaaaccgattaaatagtaatgtcaaccaagcaatatttttccttgcaaaataattaatttcgaataaacaaaccaaaaccataccatataatttttacttgtctaaattttgagtttgcaagttgtacttacataagtaaaacttattcagcttattcggtttaattgtaattctaatactcaaaaagtgtataatcttaatctaaaccaaaccaaaatcaagattaaagaaggatcataccagagataccggcggtgcagtagacgaggatgaagatcataccaccaaaggcccaagcgataccgaggattccaactccgccgcaatctacgccaccggcatcagtatcggactgaatcttgtaaccgatgactgtcaaaacggtgatgtataagaagaggagagtggctacgaactctgcgataactgctctgtagaaagaccacttctttagctccgctccatcaataaacggagctggtggcggatcttgatagtctcttgtctgaaatccttctccgggaacggcttccacatcctttgccatagttaacttcttcttctttcaaacaatagcttttttttcttttgcttctctgttggagtggttagtgagaagaacatgtgctctgttttatagtgagagctctccttcttgttaatttgtttgtatacttttttattgctttatcttttaaaaaatatttttagtatttttgccaacgttatatgtttttttggttttttgtgtattgaggtttttttttggaatgaaagtttgtattttcaatgaaaaaattggatataaaagtatacgagtgagttatgattattattattatgagggaagtagctttgacaaaatgattatgaactagctgtcctgaaataaattttgaaccaattctatttaatgattgcttgatatatcaatatcatacatagttactaatacgtaaagacaagaaccctagtttaatttcagacttagagtttttcaatcgttgaaatttgaaaaattcaaataagttagccagtaaatttctttaaaatttgattcgagtttattttagatcctaaattagaatagtttattctatttaacgttatagtttgcaccaagtccatgacaaaaagattgatccaaatctattgaacatgcgtctataaatacatgataatgatatgggattagctagcttatgatatcataaaacaagactttatatccactcatataaacttgcatagttttatctctcgtagcaataggaagtatcaatcagtggtgatggtggagagctatcagaaccacaactttgaaataatttattagtttttatgtcaatcaaatttttatatgtttttctggtaaataatggaggttttttttgtttactttaacttagcctcgccgcccccatcacctaaatgtcattttctttaggaccgacccaatatactatatcatcaatatggtgctctcttctttttgtcgtataatatcatagcctgtcgatttttcagatttaaaaagccacagtttttgtatgccaaatcattttaaaataacttacgtccactttttttttttatcgaatcagcatttacattcttgaaaacacataacaaaactccaaaaccttattttgctccaacgaagcatggctaagtttcttcactccaaatccaactaatcatgcatggttatattcgagtgtctcattgtatatatagagaacatttttcttgttcaccaaagtcaaaacactttgttttcaaaatagatagatatatggtcattctcttacattataaacatttttgtagtctagaaggtctagttttctatcaccaacatatgttattaagtatgtttgaggtgtcataaaacaaaaccctacttgaagatgttagagccggaactcaaaattatgacacaatattaaagaagcataaactatttcgttcacaaactttcatttcaaacttaattgacgataagtaaattgattcgtcgtatatcttatcacacataactcaaattagcatttaagttgatattactaacataaagtaaccaaagcctaaacgaaccctttttcataattgttgtgttggtatatcactctctaaaaccagggtgtaaagttatggtgccgttttgtggggtgggtcgagattccactgaggttaaaatcatatggtctgtgttggcaaaaggtgacacgtgaatgggtggcgcgcgtgactaaccgacccgatccctccgacaaacgtatcgtcaccgtccaatccatctcagcatatagccgtttgttcgctcaaccactcacataatgccacgtttgttgtccccaccaatcatttgcattttctcttcatatccaaaatttcatatcttttgcgaaaattgctgacaattagactgaaaacgaaaatataacaaaacaataaatcccaataaaaatgacaaattgtgacaaccaaacaaaagacaggagatgcagttccatggttatcgttttgccatgtggcaaaccttatcgttttggctacgttggtcggctactattagacgaatattccacgtcagccaactcttttttctcatgtttttcgaagtgaattttagataataaaagcacagaaatgtgaattttctggttctggttctgttgttaattgttattagtatgtttatttatatattttacactttcttctattcatagaaaactagtcttaaccttatctaaatattctagacaaatcgagttacatatagtatgacgtcgttatgcataaattttgtcctttttagtcactccaattgaaagaattagtccagaatgtactacagcaagatcaacaaacatatattgatttatctgtcttcataattaataatttaatatgcattcaaatgataatcaattggatatatactttacatgatatttacagatcaaaaatttctatattgtaatttccgattacttaaatgagtaaaatataaaagtcatatgaagtccaaattttattgtaccggaaaggacaaataaattcatataaagtcatgttctattgaatctcttctagtcctccatatttcaaatctcttctagtcctccatacgtatttgaactgcggatataaagtatgttagttttttatttcactatggtagatttttaaaacgtaattaaaacaggtttaactatgagaacatcgtagatccgaccaaaatttatcgcatagtttgaaaaaaaagataagatactactattaagtatatatattttatgttttgttttgtttaaataaggaggtagacattattaatagttgtttagcacacgaacaagaagttactagtataatttctcaacgtttattttgttgatggggtgctcgttggtcaaatttagcggcctgacaagctcagtcgacagtaatgtgcctttttgggtgtacactgatgtctcacctacaatgtttttggtcgagttacgtataaaagctcttgtcctaatcaatttgtcttgcatacgttttttacaggaatgcattcacttagttaattagcctttccttttagcccatcacccatatgatctatttagtgcattttctttttgtttgatcatcgctggcatggcaacaataacaaataaaatcatcgggataactaaacgctaaaattctatgcaacttgaaaatctgattaaaaaaattaaagcaagagttatttttcatcaccatcgttttgtcgttaaatatgacagaaaatttcgttcttgacgtatcattttcattttattttcacaatgtccattctatttttgtgttggaccatttttccatgtgaacgagtggtttccaaaacagtatataaaatttctatgattgatcttatacaattcgattggattttttttatttttttttaccaaacactagccagcaagagagcccacaaggcccaagaaccatgaaccgttgccaaacttagcaagtgctccaaattactttgagcacttggcagaagttacttgatatcaggcaaaaacctttcttttagtattttagcacaaagaatcttcaagaaatgaagagagacgagtaattatgatgaaacaatcataaatcttccttgccgttcaatatgaatgaaatcgttttgagtgtcaagttcgatgtttacatgaatttgaagatacacatctttcagtatatttttatttgagcatatattaatcaatcaacatactggaggaaaaaataatcaagaactccaagaccttatgttcatatactttaaaacaaacatgagacagttatttcagcaaaagaaaataatttctactaagcaaagaaatttgtgaagaatgataatcttttttcaaaataaatagtgttcaagtaaccttcagaacaagtgccaaagactatgtatgaaatcaaatggccactatccattacatgagatgcaaaatccttaccatttaccattaacagtcatgaaatttgtatctaaagaacttcacaaaaagaatggaatagatagtctcggttgtttgtgcagtgatcaaaattgaatcaaagatcatgaaattctcatcttttaaccctcaaaatgcaataccatttacacctatcaccactaatcaagtaaacaagcacattccatacataccaagttcccaaacatttagcaaacatacaacaacaccaatgcagtttcagattctcatcaccataatcaaacaaagagctcaccaaaagcagaaattaaacagtgatgatagagaaccattggggttttgaaacagagaataataagaatccaaaacttgagagtcattctaagtgaaacatcatagcagctaagttcccaaacaaaaacaaaatatggtaaaacgagaaagataacaacagaagcatttcaaattcccataagaagaaaaaaaaactccattgttccttaattctcaggaatctcaatctcaccttcttgaatctcctgctgaagatccttagggtctttcccatcaacagtgcatcccacagagacacacgttccaagaatctccctcacagtcccactcagctccttagcaatagatctaggcctcataatcctagcaatctcagtcacatcatcgaaagagatgttaccgttatgcttaatgttcttcaccttcttacggtctctctctggctccttcaacgccttgatgacgagagctgcagcagatggaaccacggttaccttagcttgacgattctgaaccgtcagcttcacggtgacacgaagtcctttccattctttggccgtctctttcgcgatgtcttctccgatcttctttggtgcgagaccgagaggaccgatctttggagctagagaactggcggctcccacttctcctccggttacacggacgtacacatcgacgatctggctcgggtccaacttcggcggcatggctctgtgttttggagtttcgcttgatcaaaaagtggcaaacgaaaaggaggcagctgcgaaatgagcttttagggttttttggaagatgaggaacgtattaagtggtcgagattagggtttcttttgttccgatgctaaattactaacttatcctttcatttcgaacggcccaacccaatattatatgggcttagtaactttactaatgtagaccattgaagcccgtgtataatcttcggtacaatcaagtctcggttctattactggtttgatcgcaaatatttggtttagttaaaccgtttctacttctcatcaaccaaagttactgttaggaggaggagagacaaaggagttgaatctcgaggcaaaatcaaaatccaagctttttctagggttttacggatctgcgattatcattgttctgggtatttcttttttttagtgattctcagatctaccatttttcttaatttcgtaagaatgtgttgttaagagatttaacaagttagagactttgtttttccccagttcgttgaaatgacgagaagaaaatccaccgtcgtcctgccgcagcctattcgtcgatcagcgaggcttatctctctgcagaatcgagatagtcaagtgaaacccaggaaagatctgggctttggctcggaacccacgaagaaaactcgtcgggaagtcttaagaggtctatcgaagagattagtatactcatcggatagtccaatcgaagattcgaggtcgaagaaattgaacatttcgaaagatgggtttccgtcgctaaggagatctcttaggctttcgagtagggaatgtcctgaagtcaacaaagagaagcctaagactgcatctacttcatcttctcgcacgaaatcgtcgaccactgtttcgtcttcttgtgctctgagacgttctcctaggttttcaagtggaggaggagaatctgtggatcaatcttcttcttccattgggaagaaatcaggtaatagtgttttgagtagctgtagtacgaaatcaatttcatcggagaaagtgaaaggtggagatggtttgaaatctaaggatagaagtagaagtcgtgttcgtcctaagactaagaagatgtttagtggttgtgatgataatgaagaagaagaagaagaagttagtgtctgccttactgagaggaaaaggatgagaattgcaaagccgaatgaggaagaaaatgctgaagcaaaagctgatgaagtgaagagaaaaggaaaggaggaagaagaagaagaagatgaagaagaaggattgaaggcaaagaataagcttgagaaaggaggatggacagaggagttggagttagctttacaaggagcttatttgacggtgaagccaagtcctaatttctggaaaaaagttgctaagatggttcctggaaaatctgcgcaggaatgttttgatagagtgaactcagctctgattactcctcgtcaagctcagcctcgaagagccacaaaaacaatcttatcaacgattccgcagttttcactttctgcaagcaaactactgaaacccaattcaccaaagacaaagatacgacagcgcagaaacaatctctcaaagaaagtggtcaggcatttactggagaagcaaaatcatatggatcaaggtcttggatttgatctcttctcagttcttgagcctaacaccacaagcaattttctctcaactccaatggaaaaagggcgaagtcttccaaaaatccttgaaagtccggtgccttgttcaagtaaagatccaacaactctcgttagccctccagtactgaaacaggtaaaaaacaaggcattgcatgagaagtacattgatcatctgcatatcagggatgctaaaagaaaagccgagtcaactcgactggctgggaaagagaacataagacctattgaaattcagaagaaggattcggtgagagcagctaaggatgcacttttctttgatgtacaagatgcaatccaaaagctaaaaggtctggaagctgagaactcatctagttcttcagagttttgctatgatcatgtcgaaacggacgaagaagattaaatctagttgtttctagccagatagatttgattgtactagggcacagagcgtagagattagagtaaggcattactgtaaatcttagttttgtaaccatgagactgaaactacacattgtgtgagtttagtttagtcagatgtttgtatacacaacaaaattgattctctgtttactataatgatcaaattttggttccatactttttgcatataaagcttaacataaatcataagagagaaaactaaaagccaaaggtgttaaacttccttagttgagttacagaagaaagtgattcttaaacacaagaacacttgagaattaaaacaagtagtaatttacacaaaagaatttcctccttcagtggaaatttttagtttaccgttcctaatcaaaaggttagagatcctcaaaatctgtttccttccttaagtaagacccatcttaaatcctcctgacataaagtattaatagttatatgtttagataaaatcctgattaatatcagtcttcagaagagtagtcaatccgctctatctcccaacaaagcttagtcgcaacactttcatggcaaggcgaatattcctgcaaacaacaacaacaacacaaattatatggtttgaacatgaatatttttggatccattaaaatgtcaaattgtcaattgtcacgaacctccagcttctttacaagctccttggcagtaggtgcagaaattatgatctggcgtgcgtttgtactgatgaagccttcttcaacggctttatcaatgaaagagagcaaagagttgtagtatccatcaacattgagcaaacccacctgcagtaagaacaatgataattagttttctaatgactttgggtttagagttatctaccaaagtctgaatcttcagaaggataatagtgatgggtctttaccggtttatcatgtattccaagctgagcccatgttatgacctccaaaagctcttcaagtgttccatatccacctgcaatttttttaaagcagaagacattataatccattaacattattattattaagagaaatggtcaatttacagaactatgcttcatatgcagaaactgtcctctgactctatatacatatggacatgattacaaaaaaagcaggtcctattgaagaacaagacttccttagatgggcaaaacacgcatttttctgagactgtttcaggtttttgtcttttaacatgaaacaggtaagaaaagtaaaaccttggtcacagttacactacacacaagctaaatagagaagtagctcccaagtaaaaggcaaagagaaaaagaaacagagactggtctaattttcagtgcgagatgtcgatgggtcaaggcatctatagttattatattcaacattttgtccatataaaaaccccagaaatcattacaaagcaaaccaatatacttttaaagtttttaacttgaaacagttgctttcacactgcagcttgagtttgaccaagaaacaaaaaaaacatgtttttaccaacatgttcttcttccatcttctttggcaaaaacagtcaaagagttaaacacttttcgatgctatattttaatgagcattcttcttctttattactttgatattccacaatttaagaatttaaaaagcctaaaaaattatgctcattagattcttaaacaatgctgtcactagacttgaccaggttatatcttacataatcattacttgtttagaaaactgaacttgtaagagagaaaacaaaattaacattaaaaactgatgggaccttgaacaatttcaagattttaattaagaaatcaatactactaacctggtaaagcaataaaagcatcagagtgtctagccatctctgcttttctttgatgcatatctgcaactgctcttacttctcctactgtttcaccggtcaactgccaaaaagaaagagcatccaaaatttaagatattaactaacaatcttgaaactttaaacttaattaaaaggggaaaacaaaaagcagctttagactgttctatgaccagaggcaatgatggcattgtaagcaaattggcttattttaaattcattgcaagactttagttaagaagctcttcatcttatttttttctcaaaataaaactttctcttttggtttcaataaaagagatgaaagttaaggcaaagagagaaattaaagcaagaatacctctctaggcatgagtgtcttgggaataactctgtggtcaaataacaacaaagataagaaaaaagacttattaagacaaataactctgtgctcaaatcgtcattgtttccttaaatctatggtcaagtgattagatgaagagttacccaataacatggcgaccaccatcatgaacagcttgcgaaaccaaacccatcaaacctatgcttccacctccatagactagatcaatgttccttaaaacctgtgatagtaaacgaaacagagtaaataaaccatctttatcactacagatagtttgagaaattagctatgaaaagaaatcaaaaccaaagatactctatttgtactatcaaattagatacaaacattcccatgcggaatttgtgggctccaaatcataaaagatgaatatgataaaagggaaaaaaagaaagaatctttttgagtgatcaaaattacatatttaagagcgtttttcaaagtagaaaacagaggaaatgctctgcatttgcaaaaaaaaaaactcagaaacatattcacaaacatctggtgaacataaaactgtaagaactcaagaaacagagtaataactacacatagaaaaatccagaggtgtatgtaataataccaattcgttgcctagatccacagcagcatcttggtaactactcttcttgccttggctgcttccacaaaacacacagattcttccaaactttgacttttgcatggtttcattgttgacctccattggttacgatgagagctcaagctatgaaaaaatctaaactttttacccgaaaaaaaacaaaacaaaacaagaagctttggtcctttgtatttttggtaatgaaatctctcaattgggttttgcttccttaaagaacataaacgacaggtacaaaacgtacaagtgtcaaagaagaagaagaagttaaaccaaaagaaaaagctcgaaacttttctttgcctactaaaatgctttcgagagttggggattgttgtattaatatatagttagagagtgcgttttctcgtcatgctcttggaaaaaaatttcatttttgggatttttcacacgtgagagattgaagcatgcgcgtcgcagccacccgcacatacacttcatgttggcacgcgtggaccacttctttgtgttttcctctatttgtcttctttgtgcttccacattttcgtttatttttctatattgaactatacacttatgaatgtatttctataactttctattttctacttactaactccaaagactttggaacctaaaaataaaattcaaaatggtatggatgtttaattgagagtttatgggaaattagtgtaagcaatctcagaacaagaaagattcaagctttcttgacatagataaataacctaaataatcataatattgacgaaatttctatattatgaatttcaagatttttacaactccaacttgacgaaaattagagattgatgatattgaatcaaactccttttctttttactaaatttattggatataaccatatacattaataatcataatattttaaagaagattacatattgaaaatgaaatatccctaaaaaatgtttcataatgattttaatatatgtcgtgcgaaagataatgggaagtgacaaagaaaacatctttagattaaagaaattgatttagatataaagctacctcgctttttgattccctttttgaagaacagaacaaaaatttcattttcgacaatgcaaataaaaacatttcattgtcaacatatatctgaacatataagatgggtccaaacataatttacttttacctctctctattctgtaatatttaaatgaaagtgtgatcaaattagtgatgagatacacagacatgtaccatattcatataaaaatttatacttataaatgatgatgtctgggttatggagcaatgtgccattgatgattgaaataaggaacacaagatgagtagttatggcttttattatcaatgtactagtatcatttacactccctatgaagacaaccctcctcctatcttgttctaagcatataccaaaatcatttattttgaatatttactccacttactttactttttgtttggtgcttttataataatgtttttgtagagatattaaaagctctcgctttacccatatccctgtgcatttggataatggatatcttactcatggccgtttgttttagtaaaaatttattcatacatagttgttgttaacgtaaaagaatatgattacatctattacgaataatccaacacaatgatagactataaggatccaatgtgacaacaaatgagggtacttcaatgtagtcaatgtatgtaaaaggttgattttgcttggcttggaagcaatgaatttgaattatctttagctagtagcaagttcgttcaaatgatgagatagaaacatgaagccatattgacatcgttttccatgagcacgtgaaaacaagtacacaagtcatgttcaatatataaaaggaaaagaataagcaaatttagggtttcatgatttatttttttcatcgttagtacatgtaaattggcgaggaaggaggccatttttttccctttggactttgatgaataatttgatatatttgcatactgatgcacctcgttatgagacgaattcactccacaagacacaagcattctattacataggaaaatttgattatgaaattgtagactccacatgctattaagttattaaattatcttatggtactgtattagtatggaactgcagctagctgtttttactccgtataccgtatgctacgaaattactttcttccatatggacattagacagtcaccccatactctcatacttaattggacaaatatataataagtgtgtgtgaaattaaactagaaaattgcaatcccaagaactcagtgcaagctgccctatcagatttaagtatatattttgggttaatttagagattataaacaaataattacttcttgaaaccaatgtgtatttgtatctgcatgcttgcatgcgcatttaactcttttgttttgtttttttactccactccacattcctcttgggtttctaactttcaaacctattttataatattattatattcgactatgatgctaataaaaccacatactaattagttcattcttgatatattcaacattcatttttcaaagatctcaaatggttatgacttgtggttatatatataccaacaatggataaccaaaagtaaacctcgtttgcttttgatcttataacaataattctctttagatgcaagagaattatattattcggttaaaagttatttatattcacgatactgttaaacggacctaaattcaggtttgttaacaaatttaacatgtgtatgttatttttaagagtaaattaaaattgaaacaataaaaggtaaaaaactcctaatataattcaattttatgtatattatatgtgattaaataagttatatatccatttgatagatgcatttatggatgtgtgtgcgccgaatacagatgaagcagaagagcagtgatgaaaaggctcctcgctttctaattctatcagacagataactttattttaattgttttttggttagaaatttttgattcccaacaaatcatatttaatttgatgttaatgaacgagccaaatgacgaccatatcaactgcagctgtagtactaacaagggccccaacttgcaattacgaccggccaaaatctgccttgagagtaccatattcattatggtatttacatattaatttagacaaattttagattaaaccattttcagaatctatcttaaaatctataaagatagtgtgtgactttgtttaatactcgtaacattactcacctctataacattactcaaccttaataatatacgtcatatctataacatacgtgtatagggtcatggtggttgattgatatacgaagacaaaacgaaaaaagagttagtaaaaggcctaacttgtaggcaggaagagtggtggaagtatgatggtgaaagagcaaagtgacatttatgttcttgtgttctttatttttgagacataatcttccatttcttcacttcaatgtttctcttctctgctttcggtcattgctatgccccatttgttcttaccttttcgttctaccaataatataaatattctcttttttcacctaatgacgtcgaagataccatcgtcacgtgacatccgcacaccatatgtattgacattggtattagtgttgaaaattagaaggggtgtcaatgggccgtgcttgaagaatatagtccgaatcaatctcagagtttaggcccatttcaatctcttagcggtataatccatcattgtactagcgtttaggcccatttaataaaattgggatatataatacggattacaccaaactataaagttttgaatcccagagcatatgcactgggttcatatgagaactgacaatacaacctcacacaatcaaacccttccagaaaatttcttgttccatatcgaaatttgttaagttttaggaaaactggttttcagaacataagaagatcacgaacatcaaataaaacagactgctacagtcactctcatatgccaaaaagccaaattgtgtcaaaataccaacaaaaaagacaagaagaaaatgcaacttcaactacaaccaatctcgcaggattcgaacagacaagaaacatgggttctctgctttaatctaattgttatctttctcaaaaaaagaccattccttaacgaccttcatgcatcaaaggcggataaagcctagcgtgcaccagcagtgagttttagttactgtctgaaaccgccattttccactaaccctatatgcttcaaagaacctgttacattcgagattcaactgtcttaagcaaggcaatatatgattcagaatggaaatagcagaacatggctgagaattgcgattcttaccctccagaatttgcattttttgagaatatgaaagaggtgtgaccgctcaaaattggcctcttggtggcctagcctcagcctctgagactcttatttgtcttccatccaaatcctttaggaaagtaacacatgagttagatatttgatatttacagtaagaagtaccaatcgaataaattattatgcaaagaagagaagtgatgatacttactgctccattcaaggaattgatcgccttctgaacctcttgggaagagctaagtgtcacaaatccaaaacccttggatctaccgctgtccctgtcgtagataaccctagcttcaactacctttccttgctcgttaaacaagttctcaagtgccatgtcatcaacaccccaagaaaggttgcccacgtagagacggtttcctgaacctgagcccgaaccggaccctgaccccgaaccataactggaacgttgagaccctccgtaaccaccaccactacgttgagaaccgtatccaccaccacgctcggaaccataaccaccaccacgctcggaaccataaccaccaccacgctcggaaccgtaacctccaccacgctcagaaccgtaacctccacttcttggtcctctggagaaggattcctctcttttaggtggaggagggccagcattgactctcaaaggtctgccttcaaattcctgaaatgttaaaaatcaacaggattaatgaaaacagccagtgtagtaatgtaagaaatccaaaagacaagcttgaaggtatgaacaacaagacaatgtgacaaaaacaaatgtacaaatctaaatcggctacttatatcccaaatgagaaacacgaacaacctagaagaagatgcatcttatcagcagaatataaaacaacatcaaccacgaagtctccacaaaccaaacagaagataaacaacactatttctctatctcaaacgttcatacaatccaattcatggaattccacattacacacaagccaagaacaagaaacaatacaagcaactcaataaacaaacaagtccacacaaaactcttatcaacaagtaaagacacagtagcgaacacaagtatctgcttacatagccattgaactgttgagctgctgcttcaacttccgctgcggttgacattgtcacaaatccgaaacccctgctccggccagtcactttgtcatagataacctacaatatcaaactcatttcatcacaaatgaaaacaatctcaaacctttagctatgttctcactttaactctactcaaaacgattcaaacccaattaagaaagataattaatccaaatctgaaaacagaaacctaaatttatcttacctcaaccatctcaacatttccagcgctctcaaagagctgagcaagctgagcgctatcaacgttaaaagaaaggttaccaacaaagagcttaaggtcaggagagaaggagttacgctccacaggcgctgaatcgtcaccgtcagcgaacatatcatcttcctccacctcaaaatccgaagatacagcaacgtttctaacgaaacgcgacgggtactcggcgggggatgagcatttgagggcggaggaagcgaagatagagacgaggtggtcggagtgaagtttgaaggagagggaaggaggtaagacggagacggaagcgggtctggagacgcagagaggaagggatttaggattgaaagcagagagggaagaagcagaggcagacatggctaaagcttgagagaattttgctctcgaggctaaagctttgagaagctggtggtgaagagataaggtttaagggttctgcgagataacaagtccagtttttgatatttattggcaaaaaaaatggaacttttcgttttttctttgcaaaaaataaaaatctttatccacttgaaatatctcccacttggattttttttttacctactaaaatctgtgtcagtcaaaagagttggtaaaaataaaagttactttgttacataaaatataaaaatagcattgatcttattgtttgattcattaagtacgaaaatatgacaacacaaatataaatgttgtgtttactgtttactaatgaaatgaaaacagattaataaataattatattgaaaatttagaaatttcaaatatacttttttttttacagtaagcttgaggagcttaaaagaagagttactcaaaccaattgagttttttttttctgttatatagtaatttttcaatgaagtgaatggtatgtgtgataagatctggtgcgtccaaattggatggacggtgtagattaaagagaaggaataagagagtgggtctagtgagaagataaggccattactaaaagccaaaggaaaaaatgcaactagagagactgtacactgaggctccagtatggatcttcaactcgttcttaactattaagtaaccactgataccataattttgaggtttatgtaatattgatacagtttcacttgttttccagattttttttgtttgtttgtttttttcctttttgttggaaatgaaaatcaaaggtaaaaataataggcaacaaaaatgaatttatagtcatgagtaagccttgcacaaattttcaattaagattccaaatatagtgtgttccggcttaagttaaggaagagtatgtaactgactaactgttgtagcattaggctcaatagtcaatactaccagaagatgccatcttctcgaaccaaatcatcaattctgtcccaaagcctcctctccggttcacgtctgtattcaggagacaatggatccgagagataaaccctagctctccattgctgaggtttaggtttggataatgaataaaattagcaaagagttacttattagagccggttaagctggagatgtctagtctgggatcgggtatttcccaaacccgaatttaaccgtttaataaccatcccggttcagattcataataagaatgggtcccattgatagccacgtgtcgctagcgaagacgtaagaagagattgaaaatggctaaggaacattgtccggcggagaatcgaagaagagaagaagaacacaacagtcagatactttttcttcttattttgtccgtaccgaaatcggaaaatggacattactgttcgaatctccggcttaaaatcctccaatctaatccggataacccctagattctcatcttcctctagattccgttgctccaacaacgaacctcctcgaaagggaaacgagtccaacggtgagagtctgatctcgaagcttatgttcgttggtagattataatcggttaaattcggttttatttggtttatagcaggtggtggtggtgataaagcgtcgacggactgggacaaggcgtggaagaatttcaagaagcagagcaagaagtcattgttctcgcaattcaacgtggacaagtacgtgacttggaatcctcccagatcggagtttgatttgtcggaagaagtcgatcctataaaaagaacagagagatccaatctcatgctctggacaagtccaaggttcacacttgttggagccatcgtcattgtctcattcctccttctctacaccattcttgctcctgtcaagtgataataatctcattcatctttcatttagatcagattctgaatctgttgtttctactgtttatatgcattactacttttgccaaataataagatcgcagtttctacagtcaagcaaataaaaacgcagtataatagagccctttttgtttttgtaataaccgagatagatcatgagccgaaatcaagattaatcccctgaagtttatagaaattcgtgtatttttttgccgttgaaaatgtttacagtagttaaaaatgaatgataaacggttttcgtagatggtagaactcaatctctagacttgatcctctacacactcaaacaaaccacttggttacacgttcttggttgagcggatttcaaatgtgaaacattttaactcattttttttggtgaacctgaccaaaagaatattgattgtacaagaaccaaagttaaaacttgttttggtcgttgttgaataagaaaaccgtgctctcagaagtctttatataggcaaacatataaattgtgaattttgttttctttattatcaattacaatttattttaaaatataaataaagatataataaagctatatattcacgaataattctaaaaaagtggtaacaaaaaatgacttgaaaacatttttctagtttcaatttcaagtcattctaagaagttaaaattaaggaatatcacatgcatgaagttacattgaaagtgtcttcttacaaaatagaaaaaaaataaaaaataaaaacatagtaaatgttgtgcattattctttcaataattagggaaaacaataatacagtatcttagatgtttataagaccagtatttattcatccaggcctaacaaaactgcccgccgcgatttctcatgtaagtatgtaaccttagttattaaacaaaattgcatttcttagacgttaaccaacttaattatttgtcttatagtcaacgtgatttttttactttataataatgcttcgatcgtaagttgaatctcaatcaatgtcttgattcccgagagagaagtagagcgttaaaattgccgtacagaacatgatggagacattaatgaattcaataaaatcggcgaagttggaggtttagctgagggaggcctgtgtcatgctgattcgtttagttaccaactcttctttcaaacatctttagtatgttactgctttcatcctctttatttgatctactgattatatatatatatattttttttttactacattcgacattcgttgctaagagaatagaaaacaattttctttttcaaaattatccttagtttgatattggtatgagagatttacatgtaatttcgactcttgaaaatagataaatgtatgttgagtattgttgactataagaaactagatgaatgcatcaaatagaagtgtctttttgctttatgtacttccccacttgaaaacatgacgattctatgaacgatttcattcgtcataacgatagaattagtttgtcctacgaaaacaaatgtaaaactactataattttcttgacgtaatattggtgggtttcatgctgcggctgttggttgggaaacgtccaatataaacatttctaattatgtatatacctgaaaatttgtaaaagctaatctaaattgtgaaacatacataacaaatactttaagaagaaaaagtcatcaagcaaacaagaagacatgacctagaaccatttccgagacattatattaatataaaattgatattcaaatcctccacgatcttacagctttcaactttgagtatttcaacgttttctctgattacacataaactaaaatttgtttttttgtttttttaatagttgatagcatgtgttaattattagtttatatcatacaatgaccttagaatccgcagatcatttcaagaactcagaacaaaagctgatgtattcacttacatcattgaattgtgtcagtttgagtaacccataatataaatatacgcaagtcaaaatgcattgagcttatctctcatttagactttaaatttctgatttcagagaggtcaactctttaagccaagccatggctcatatggttggagcagacgatattgagtcattgagagtagagcttgcagagatcggaagaagcatcagatcatcattccggagacatacttcgagtttcagaagcagctcttcaatatatgaagttgaaaatgatggtgatgttaatgatcatgatgcagagtatgctctgcaatgggctgagattgagagattaccaactgtcaagcgaatgagatcgactctccttgatgatggcgatgagtccatgaccgagaaaggaagaagagtcgttgatgtcacaaagcttggagccgtggaacgtcatctgatgattgagaaactcatcaaacacattgagaatgataatctcaagttgctcaagaaaatcaggagaagaatagacaggtaagtaaaaacaaaatctctaggacaaagcttttcccatttgtgatttctaattctagaaagtttggaactgtgttgtgcagagtcgggatggagttaccgaccatagaagtgaggtacgagagtttaaaagtggtggccgagtgcgaggttgtcgaagggaaggcacttccaacactgtggaacactgctaagcgtgttttatctgtgagtactcagcaatttctgcgaattacaaagttgttattgtcttgatcctaaattgaatgctcttgtgttttctatttctccaggaactggtgaagctcactggtgcaaaaacacatgaagccaagataaacattattaatgatgttaatggcattataaagccaggaaggttagtagttgtctcctaactagttttgatcaaagttttataccttcaagtgtgcttattcttcttgctgttgcaggttaacactgttgcttggtcctcctagctgcggaaaaacaactttgttaaaggccttgtctggaaatttagaaaacaatctaaaggttctaatgatgaaagcagttatatcattttcttgtgaagatttttttgctgcagctgtgtgaagtttgtaccttttctcttgtttttcctttttgtttccacagtgttcaggtgaaatatcttacaatggacacagactggatgagtttgttcctcagaaaacttcagcgtacataagtcaatatgatctgcacattgcagagatgacagtgagggagacagttgacttctcagctcgttgtcagggcgttggtagccgaacaggtagattttataaaccaatcattgtttccctgagtgcattgaaatgtatgtattcatgattcttttttccgcctacgaaaacagatattatgatggaagttagtaaaagagaaaaggaaaaaggaatcattcctgacacagaagtggatgcttacatgaaagtacattcctctgacactctctagtctctgaagattattctaaatctaatctttaaactcaggtggttgattagagactttttgttttcctataggcaatttctgttgaaggactccaaagaagtctgcaaacagattacattttgaaggtaatatagtctctttgatagcctggctaataatctggcccttttttttggctcttatgtcttgtgttgcatttgcagattctcggacttgatatttgtgcagaaatattgattggagatgtgatgaggagaggtatatcaggaggtcaaaagaagcgtcttaccacaggttagttcatatctcggaaccttcaaaattgtcatcttttgttgacatgttcattttctaaagcattacttgaatctctgaatgtttgcagctgagatgatcgttggcccgacaaaggctctgtttatggatgaaataacaaatggcctagacagctccacagcttttcagattgtcaaatctcttcagcagtttgctcacatatcaagcgctactgtacttgtttcgcttcttcaacccgccccagaatcctatgacctctttgatgacattatgctgatggccaaaggaagaatcgtgtatcatggtccacgcggtgaagtccttaacttctttgaggattgtggattccgatgccctgaaaggaagggtgttgcagactttctccaggaggtaaaaaaccaaagctttgttccctaagatgaaacttctgtgcttttgaagtcatcagttgttgaccttctcttgttctgctttgaaggttatatccaaaaaagatcaagcacaatactggtggcacgaggatttaccttacagttttgtctcggtagaaatgttgtcgaagaagttcaaggacttgagtattgggaaaaagatcgaagacactctgtcaaagccatatgatagatccaaaagccataaggatgctttgtccttcagtgtgtattctcttccaaactgggagctgttcatagcatgcatatcaagagagtatcttctcatgaagagaaactatttcgtctatattttcaagactgctcaggtacaataagagtttccattccacagattttctccttgtcttctttagatgtcgatagtattcctgagctttctagctttatgtgcgcagcttgttatggccgcattcatcactatgacagtgtttatccgaacacggatgggtattgatatcattcatggaaattcttacatgagtgccctctttttcgccctcattatacttcttgttgacggattcccagagttgtctatgacggctcaacgtctagccgtgttttataagcagaagcagttgtgtttctatcctgcatgggcgtatgcaatccctgcaacagtgttaaaggtccctctctcgttctttgaatctctcgtttggacctgcctctcatactatgtcattggatacacccctgaagcatccaggtgagctttcccctctgttgcttggttcacattcaagtctggaaatgctcagtcaagagtaaaataatgaagtttaatgtttcaggttcttcaagcagttcattctactctttgctgttcacttcacctcgatatccatgttccggtgtctagctgcaatcttccagacagtagttgcttcaatcacagctggcagttttggtatattattcacatttgtctttgccggtttcgtcattccaccacgtaagatttcaccccattactgtgctaaatcttacctcacaagttgtaccattcaagcatgactctaaggttctgtgtttgctgcagcttctatgccagcatggctcaagtggggtttctgggcaaatcctttgagttacggtgagattgggttatcagtaaacgagtttcttgctccaaggtggaatcaggtgatctctcttagtttcgaaccgtcctcttctctcttaatcacccaaccttcttctttatttggcttctcagaatttttctggttacacatgtagatgcaacccaataattttaccttaggacgaaccatactccaaacccgtggaatggactacaacggttacatgtactgggtatcattatgtgccttgttgggtttcactgtgctcttcaacatcattttcactctggctctaacgttcttgaaatgtaagtacatccatcatcatctactaaaagtaaatgtatattctttcaaaacacagtcgccacatacttagacagcctttaccaaatcacagcacccacatcatctcgagccatgatttcgcaagacaaactctctgagctgcaaggaacagaaaagtcaacagaagattcttctgtcaggaaaaagaccacagactcccctgtaaagaccgaagaagaaggtgaaaactttgttgactctcttctcacatctctattttttttctcccactaacactttctgctgacacagacaaaatggtcttaccattcaagcctctcactgtaacatttcaagacttgaactatttcgttgacatgccagtggtaaagctatcataactcaaactataaaccatatctcaagactatcgccacggctctcacttattctttaatattccaatgatgatgatctcaggagatgagagaccaaggatatgatcagaagaaactacaacttctctcagatatcacaggagctttccgtcccggaatcctaacggcactaatgggagtgagtggagctggaaaaaccactcttctcgacgttctagccggaaggaaaacaagcggatacatcgaaggagacattagaatcagtggcttccctaaagtccaagaaacattcgctagagtctcaggctactgtgaacaaacagatattcactcaccaaacatcactgtagaagaatccgtaatctactcggcttggcttcgtctagctcctgagatcgatgccacaacaaaaaccgtaaacctctgttttctctcttctcttctcttccattactcgaaatcaaaagcttaagtaacgaaacgttgaaaattgtacagaaattcgtgaagcaagtgcttgagacgatcgaattagatgagattaaagattcattggtgggagtcaccggagttagtggattatcgacggagcaaaggaagagattgacgattgcggtggagttggtggcgaatccgtcgattatatttatggatgagccaacgacggggctagacgcaagagcagctgccattgttatgagagctgtgaagaacgtcgctgatactggacgaaccatcgtctgtactattcatcagcctagtatcgacatttttgaagccttcgacgaggtaaattgcataattggctcaataaactgaattgttatattttgaccccaaactgttttatcttataaaccaagtccaaacttgaatttgcagctggtgcttcttaaaagaggtggtcgcatgatctacacaggaccattaggccaacattcacgtcacattatcgagtattttgaggtaaatttgcataaattttacttttagtctatgattgtttttacaaagatatgttaacttcttttatttattggattgaaaaacagagtgttcctgaaattcctaaaataaaagacaaccacaatccagcaacatggatgcttgatgttagttcacagtcggtagaaattgaacttggtgtcgatttcgcaaaaatctaccatgactctgctctttacaagtgagtaaaagcttttaaactatgcattaataactgttattgttctaagaatgtggttgtaatgaaaacatgtgtgattgttataggcgaaactcagagcttgtgaaacagttgagccagccagattcaggatcaagtgatatacagtttaagagaacctttgcacaaagctggtggggacaattcaaatctattctatggaaaatgaacttgtcttattggagaagcccttcttataacctaatgcgtatgatgcacactttagtctcttctttgatcttcggcgcacttttctggaaacaaggccaaaatctgtaagtggagagtgaacatacctcttatatgacactttagatcccagtttgctaacattttgagttgtgttttgtcatttgtagagatactcaacagagtatgttcacagtatttggagcgatctacggtttggtactcttcttagggataaacaattgtgcatcagctcttcaatatttcgaaacagagagaaatgttatgtaccgggaaagattcgcagggatgtactcagcgactgcttatgcattgggtcaagtggtgactgagataccttatatattcatacaagctgccgagtttgtgatcgtaacatatccaatgatcggtttctatccttcagcctacaaagtcttttggtcactctactctatgttttgctcactactcactttcaactaccttgcgatgttcctcgtctccatcacgccaaacttcatggttgccgcgattcttcaatcgctcttttatgttggtttcaaccttttttcggggtttttgatcccccaaacggtaagatcacccatcctttagtttcttgaacaagaatctttaccaagaagaaaatgttttgtaatgtattcttttggtttgtgaaaattgcagcaagtaccagggtggtggatttggttatattatctaacaccaacgtcttggacactcaacgggtttatctcgtcccaatacggcgatattcatgaagagatcaatgtctttggacaatccacgacggttgcaagattcttgaaagactattttggatttcatcatgaccttttggcggttaccgcggttgttcaaatcgcttttcccattgccttagcttctatgtttgcattcttcgtgggcaaactcaacttccaacgaagatgatcatgccaattagtcttcatcaatcatcattttagaataaaataataaaataatggtttttatttttgtttgtgaaaataaacatataacatataacttttctttttggtatgtatatgattttgaggaaagtaaacaaagcattgtctatgcaaaacaaataaccaaatcttgcaagtatcaaaactatattacttattacttgtcttgacaaagacgagtacttgtttttccaagtcgaatacaggataagtaacggatacgggacaaataccatgtatttatgcccacccatatcgacagacagtcagtaatcaaaatttaccttcaaatcaagaaaaatgggcaatagttaacttgagtgacaagtaacaaactaaaatgaataatcatgcataaattataaagataacattaaaccattttccattttatataatttgtacaaataacttttaagttatataaaggaattatttagaaatatgcttgggtaattgtgttctcttctaatttcttattatatatctctagaaactttttttctcaaaagagatttctaaactgatattacatattttttttttagtttttttttgttgttgtaaattttagacatctatttttagacatctatattaaacgattaaatatttcattatcattataaaatcataatgtatttatgtataaaaattcaaaatatactactttttgtttaaaattttaatattacttctgtttggcaaattaaataaaatctttcgaatagttgacatagtataaattagagaatataaataagaaaaccaaagcggtcaacacaagaggatcggtttgttcctttcttcctcctcgtatacgaatcaatacgcatttctccaactccatagccaaaagctcgacgagatccaacagcacctcctgatctgcatcgttttcaacttagcttctcctgtcaatcgaaatccctaattatacattgatcggattcaatcgagcgattcgagagagaatcgcgatgtcaatccaaattccgtcagcttcttgggattttcgcggtttcctactctgtttcatcttcttcagctcgttaccaggtaaatatcacagaattctgaggatgagtgattttagtttcattttcgaattgggaaagtgttttgttgctcgtgcaataatagatgatcattgacgaggattcattgttttgatccctaacaggaacaatactaacacaagaagttacattagattcggttcagattttcacgactcacgattggttctcgactaagcctacagtctttttccaatgcaaaggagagaacaagacggtgttgcctgatgtgaagagaaccaatgtttcttactctttcaatggcgaagaatcttggcaggtttgtcttttgtttcccgaaatgtagctcagatgatttggttttgattatgttgttgaatttcaaagctctagcatgaatttagaaatttggtttggtttggttttgatctgaaaccaggaaaaaaagagctgcctttactctggttcttagcgattgacttatttttttgggaatgtgttagggatatggttttggttgctgaatctgctccagaatttagatcttagtttcgaaatggtagaggggttcttcatctgtgaaatctacttaacgtgcaaacaaataggttgtcttatgttgaaggtgatcatcaatttattatcactgtctttgacctctatgttctgttctgtttttgattttttttcagccactaaccgaacttcaaggaacaaaatgcaagagatgtggaatctatgaggacgaccctcttaaatatgatacatttgacgaatgggagctttgcccttctgatttcacagcagagggtagttacaagcgcttcaaagagaaagaatttaatgctacttttctctgccatggatgctcacaagttggagctggtgagttttaccaagcaacacatcttgagctttagggtcatttattactgttttgccatgaatactgtttcaactataaacggaatctctttcacatgtatctctgttggctgtagcttcagtttgaatctgttctctgtgattaggactatcatattcatatgcattctttttcttttggcaggttcgaataaagaatcaggcaccgagaaggaagaacaaaagggcggaatgcatcctggaattgtggtactgattgtagtactcttgttaggtgtagttgcggtgggactcttggtaggttacaagtattggagaaagaagaaacggcaacaagagcaggcccggtttctcaagctgttcgaagatggtgacgatattgaggacgaacttggccttgaaaataccctatgaagccaagtttaatgtgccacagtaattcaaagtttatgtacatacatacaaaacgtcttgatcctcctcacaagcatttttgtttttgtcggacatagagaggaaaggggtacaatgatacatacaagcagttgcttcatccaaagaaaagtcaatgttgttatttcttttgtcataactgtttaacaattaaagaggctaaaagaaacccagactgcgatagttaaatcctttttcctttacttaccaaattttttttttgccaaaaaagacattacgaggtgctttattctttactaaacgatccacaagcgagaatttcataaatgcatgattcttactaaacaatgaaaagtaacatcgcagagtttgaaagttgtcggaaaacaaaccaagagtcatcaagagagaaggcaaagtaacatccaggattgtcacgcaacgaaaagaaaagtatcacgcagaaagaaagggaaaggaaacaacatccttcagtacagaatgctacatagagcttttaacctgtgaaccatcaaggtgactcactgcctttaggggaaggacggctaagctcagcctcatcatcaatcgggctcctgtcttgaccattaagtccaacaggactttcaccacctccaacaatgggactcgcagagttcctgccattaccattctcttttgggctaccatcatagtctgatccacgctttgggcttgcatctatcacttttcggtctggactcaggctttggtccctacctttgggagatacagatcgctccattgccttaggactgcgtgatctgtcctccacgcttttctctcttctcactggggatcgcgatcgactgatgaacagagaaataaagagtcaaccaaagggcataagccatggaattagcgttgtcaacatacttaatagctacaaagtacgaatcatttctacaatattaagggaaaatagttgtctacgggacatgcttaaagatcaaactaatatagttccagaaaaagctcagaattgctctaagctttttaccccacatatgaagctcaaaatatgaatttctaggtaagttttttggtggctctcctattgtattccgtatttgcatttataagacaattttcgagaagtccaaattcacaactgacctgtagctgcgacctcgactgtaactacggctacggcttgggctccttcggcgacgaggggagcgggatttgactggtgacctggaatagcttccaccctgcctggagaattataatccaaaagagatatgagaagaagcttaaagaatagaacaaactgtggaaaaacaaagattcaaagatttagtacctggccttctttggactaggactgtttttgcagtttctctcaatgtgtcctctttcaccacagcggtaacatttattcttccagtctcctgctgtgcagtctcgggcccagtggccatcgacaccacaattaaaacagcgaccagaaccaggaggtgggcctctgctaccattgtcccgcgaaccacgaggagcctatcataaattcaaaagtttggcaagatatcagtaatttttcatccaaattatcaagccaatggagaatcggtaatacagacacaaataactaacccctcttgatgcctccacagtgatgcgacttccatcgaaatcccgtccatccaagtaatatcttgcgtcatcagcatcacgaggatcactaaattcctgttctcaaaatgtgagggacaatgatagatgcataacatatatataaagtttgtgcgcatgacaaacttgagaatcaaacgcttgaataaaggaaaagggtaatataagacttacaacaaaggcataatcacgcttcatatccacatctcgtactctgcgtaaattgttgccagaaaatcaaggccatcattacttaaggaacttccaaacaccagtttttgagatttgaggccatttccaataaaaacatgcaataaatcaacaaacaaaatcgccgatgcaccctctatacaccagacgagaatttccaccaattacaccacagtccacccattcatcaaacatctccaggttaggcaaacccccagaaaccttcaacaagatcattcaagttaaagaaaaaaaaatccactaaacctagctccacaattttcccacatgtaccaatgcaacgttataagtaaaaactaccctctttgattctaatgttaaactttaggtatatatcccctgcacaacatcaaagaggaatcattccagattcacaccaaagaacaattaacaaaaaatccaaacacttatctccccaagaatacaaaagtcaaattaggtcagtcaagacaaaggaatatgactctttaccttccgtatctgctaaagagacgctcaaggtctctggtacgagttctagatgataagcgaccaacatagaggcgagtgtttccatagcgatcatcatagcgaggcattgtcaagctgcaaaatatttttaacataagctattaggcacatatgtatatatatatatatatatgccaatcacaagaaaaagaataacagtatcctcttcaaattatataaacaagaaaaagaccagagagttaaaacactacctcagacctaaacatagaacccatgtgaatatctatgatttttcagcagaacacaaatccaaaaacaaagaaaccaaactgaataacacattcagaggcgaaaagaagaaaatttcgtgaggggagaatataaatctctaatcagattagacagaaggaaacctataaaggaaatctacggcgaggaaacgagaaaccaattgaaatccctaatctagagagcgaagaacaataaaatcgtaaccctaaacagatccaattacaaagattcttcctcgtacctggagagacgaagaaggagagtgcaaatacgcagtaaccctaataatttcgaaacgaaggaagtgaaccgcggatgatactgcgattagtcttcaacccctatcttataacttggaaaccgacgagattcaacggtagcgatttgtttcaatcaacggtttagatttcacggcgagataaacgtcgatattaccgatatagaaaatagaaaattgcacactttccaatttagtacttttattgggccttatatcaactctaaagcccattaaagatttagcaaacatatgcaatttcgtattaatcataagtattaagtacatcataatcattggtcaagttactctaataattttctgttttgtaaatcagcgacgcttgttcttgcttccgatcaagagtgtgaagtagaagagaaccctaaagaagaatccccaagctacagtgatccacaagcaattccatttgcttatctccgtgattccttgctgtttcagtatatcgattcccgtcgttacgcaagtctccgccgtcacgttgatccccaaaacgccgctcatgctcttcaggaggctgattttcacggcggttggaacttgtcccagcggcgaattgtcgaacatctggatccctctgacgaagcatttcgtcggatcttcgaattcgttctgtagaacaccttcgtaagggtatttcactagggagaggtaatggaaccagatccagtagagtgggattcgatctctagagatgaagaatccggagaagaggaggaaataagcgaggattgctacaaccaccgtgaatccgatcatcacgtgtgagactacgccggataagaacgtcacgaaggaacttccggcccaaaacgcggtgaggattgtgaagaagaagaagaggaatccctcggagcctccggcgagtcctacggccgagaatgttgaggcggcgaatgcggcggataagattatgagagcagggatggagattattgtgtgagcgaggacgtatgatgatcgccggtaagcgttgtaagctgtttctctcatgaatatgtaacgttcctgtagaaagactggtattgcttctgcacatgtgtagaatgttgtggacattgcgaatgcgaagaaccctaagcgttcttgtatacctcttggtgaattgtctagtttccagaatattgtggctaggatcattccggtgactagtacagctcctaggcggattccgaatagctctggttgtcttcttgagtttagtatagatcgtttaccaattacgagcatttcagtccagaatgggtttgcaaaggtttgaaatgatgatcttaggtttgttgctccggagacaagcttacctctcgagatacttgcgctgattgcatctttgagagatacattggtgtttcttctgctctggcttgaggtttgctttgctcgccattgcttgtggaactcgactaaggatttcgttccttctggcgaatcttccagctcacggataagatcgagtgcaaactccggcttgttctcgttttcaggaattgggtgaccgaattctgagaagaactgagggaggtgtgtcggggagccgctgtaaacggtgtttcccctagataggaagattaacttatcgagtaatcccaagattctgtaactcggctgatggatggacatgataactatgctgccgctttgtgcgattctctgaagcactttgacaaccatgtatgcactggtagagtcaagaccagaagttggctcatcgagaaagagaataatcgggtcatggattatatcggttccaattgagacccttctcctttctcctccagacacacctctgtgtccctcatcaccgatcacggtttttgctgcgttcctcaggccgagctgatcaatcagagcttgaacccgtgccttctttttcttcttagaaagcgagcttggaagcctgaactcagcagaaaacatcaacgtctcttccacggtgagcatcgggaagagaagatcatcttgcatcacataagctgatatgactttatgcaggctagattcaagaacttccccatttaaagtaatatcaccgcgtaggctctcttttgaaatccgattggctaatgcatcgataagcgttgatttccctgacccgctcgctccaagaacagccatcatctctccttcccgggcttcaccagaaataccattcaggagcaccttagtattcatctccatatcattaccatcaaaaggtgaattcccacaacaaggaaagggcttaaacttcttcttgatcttcacgctgtaagtcaagtctttgaaggaaagaacaaacggagaagaagaaggcacacgagaagacggaaccgaggaccagaaattggacgcaaccgcaatatccatagcccgactctggtcatccccctcatcttccacactcatgagaagttctgcaagtgtgacagacacccgcgcagtgtctctgtgacatctctgaagctccactgacttgtggatattgtaaaacagagggaggccatcgccattgacccgtttggccggagataatataccgaacaaaccagacatcacgtgaattattgtctggttaatgttttggcctcaggtaatgtgtctaaaggtcttacccacagaacaattttgatcgactttataggatatttggatgggagaatgagggagaaacttgtcaattagtttggtgatctctaagtatctaactttgagttgttctgggttttgtagcttttcatatttacatgtacatagcttttgtttatattttcgtatgtatataaattgtaagttacgagtaggtgaggagttgggcaaatccatccacatttttccgttattgtatgtattttttcttggggcttaaggtactctgtaaaaaaatcctattttaggtggtttttgtttacaaagtggaaaagtttactccatggaattacgtgtttatttcatctgtatataatgtatccggagtttatggaattgcaataagtatagcttatgtaacatgtcaggaatagaatttctccttgcacatgtatgtatgtcacgaatttcttaatctccttttgtttattatagtcacgacccgcgagttttctataatcacttacaagctctaagacttgttttttggtgcgtgagacaataattgactaggggttaattggatttccaactattttgaatcagtgaatatcttcgtacagtaactaaagcacgctacgaatatactgtttgttgtatcaaaatcaaatcatccaacattttgaacatttatttagcggttactaattaacttttgcaattagttaatatcaaacacataagatattctcataattaggatttggcatggtactatactaagattgtacaaaggcatgccattatgcataatgaagctaatggcgtgttatctttcaattgtttgtttaatcatgcacaccattttcgtcatataaaaaagcgtaagtgaagcctatttcatttcaaaaaaaaaaaaaaaaaattataaggatcattgatttgtacttttgtagttggtgaaacaaaaaggaaatgaatgtgaaaattatggcagaaaaacgtgcagatgttcggctttgatgttgtagagctacacacgaaaacacaacaaaaattgtcattaggaatatgtaatggaaactttatataacgtgatgagttagatttaggcatatggaagtttggtgtagctgttatatctgttttcttgattattttacttttgataacccatttttacaagagttgtcaagaaataatagaaaactatatacttagtatcatcagcttgtctctatcaagttgaactaatgatttatccaatgaaatacataacatttcttatggaatgtacactttcacacagagaatgagtttatattattctggttaagtttagtaagactttctttatgtaaagattgttttgaaattttgtgtttggtagaggatattttgctaagtttcccaacataattttgttaacactttgagatttatcaggtaggactagatcaaggaattgaatccctcaggtttgagatttcgttcaatgctaatatttgttaaatcgtacgagaaatttttactctcgtctgttgagtaacagcatgagagagttttcattcaaaaaaaaaaaaaatagcataagagcatatctctaggcataacattttgtgggctattaaggggccaaacttgggcatccaattgttaaaagcccatattttgtaagcctcgaggagttttttttgtttgtttccacatttgcctaaagttttgtatatgttcattgaataatatacaaatcaaacgcaaatcacattaatgatcccctcaagaatatatatataaaaaattgcatatattattaaacaattagtgaaattacttaattagattatctgataatcacatatagattttagaagcgaaacatatatatttgctctataactaaaacaaaataaaaataaaaaagagagcgaaggattgcatcaagtaatcgccgtgtaactaactacttttgcattcaccatcgctcttacgtttgaatctatccagatccaaagctcttcttcttcccggcaattctgagatctcattttcaccggcgacgagctttaatcggagaacgatgaagcagcttcacaagcaaatgagctcgaagcgtgatgaagaaaccattcccatgagccaatccagtccttactctcccaaaactttaaagcatcccagatctcttcccagatcgcttcactatctctttcgtgaacaacgactcctctttatcctcgtcgggatcttgatcggatccactttcttcatcctccagccttctctctctcgtttaggcgccgctgagtccacctcgttaatcaccagatctgtttcctacgccgtcaccgattccccgccttccaggtcgacttttaattccggaggcggcggaggtagaaccggtcgtgttcccgtcggtatcggacggaagagactgaggattgttgtcaccggtggagctggtttcgtcggtagtcatcttgttgataagcttatcggtaggggagatgaagtgatcgtgattgataacttcttcactggtaggaaggagaatttggttcatctattctcgaatcctaggtttgagctaattcgacacgatgttgttgagccaatcctccttgaggtcgatcagatttaccatttagcttgtccagcttcacctgttcattacaagtataatccagtcaagactatcatatccttttgattacgggtcgtgatttgcaagttctgattctaaatccgttatacaaatttaggcaacattaggttggtgatcattgttattagcatcctgttgataggcatttgacaattgacgtgcagcttagtagaatctcttacaattattgtgatatttcgtgatgaaatgtttccattgggaatgtgtttttctctattgttgatatgatgattctggttgatccttaaccatagttttacaagacaaatgtaatgggcactctcaatatgttgggtcttgcaaagagagttggggcaaggtttctgctcaccagcacaagtgaagtctatggagatccccttgagcatccacagaaagagacttactggggaaacgtgaatccaatcggtgagttggagaattctgtatctgctcctgattttgtgagatatataaacgagaggttgtatcactaattgctgttatctttttataggtgagaggagttgctatgatgaaggaaagcgtactgcagaaaccctggccatggattatcaccgaggtgcaggtgtggaggtaaatattctaatatctactcatggattgtatattgcaagctcttagctcactttatggagaacttgtacaatctggaactcataccctcattcacacatggaactttgtacccattagtttcaaaatcatctctctgctgtttatcaagatgtttacatttgatgatgtttcttcttctttctgtttccaatgttttggaatgtttagaactgatgactatttatgtccaaatcacggatataacttataagagtgatctctaactgcattttcaattttcaggttagaattgctcgtattttcaacacatatgggcccagaatgtgccttgatgatgggcgtgttgttagtaactttgttgcccaggtttagctccttcatcaacataaagacaaccgctttcgtataaagccttttgaaaacactctgacagaactattgtggcttatatctatgcagaccattcgcaaacacccaatgactgtttatggtgatggaaaacagactcgtagctttcaatatgtttctgacttggtacgtaacaacctcattttcagtacaatctgctctatgattgatttcttgaagcagtgaaaaatgatttattgccttgatatataacaaaatttctctttctaggtggagggacttgtagctttaatggaaaacgatcatgtaggacccttcaaccttggtaaccctggagaattcacaatgcttgaacttgcagaggtttgctttacttttaccatcttcgttttacttcctgcaaaagagatatgaaacccaaatggtaaagttaaggcctggtcattcagttctcggtttggtttagcttttgtgaagagtctgtccaaacttcgaattgtttttatcttttcatctaaagaaagtttgggtcggttttagtttgaagaaattcagtttgatatggttgttatatacatccttagaaatctgcatcaacgtttaagatgtctcataaagaaacgccaattccgtgtatgaaatgggaactttgtgtgcaggtggttaaggaggtgatcgacccaagcgcgaccatagagttcaaaccaaacacagcagacgatcctcacaagaggaaaccagacataagcaaagcaaaggaacagttgaactgggaaccaaagatatctctgagggagggactgcctcgcatggttagtgacttccgtaaccgaatcttaaacgaagacgaaggtaaaggtctctaagtcagtcacacagagatatagagtataatccttcttctgctttgatttgatatatgtatagtctctttttcaagagctctgctaagtctttttgttctctctgttttttctttttggttctatctccaagacacagattactacttatattagctaatgtttttgacttgggattttgtcattgggccattcaccactaggctcaatattagtggaaaggtattgatataaaatttcgctcggttcatacaaaaggttaccctttgtactcttcacatttacatatttttttggttttaatgttaacacattatatttgtttaaaactttaaatatgcattagtatactccctcggtttatacacaaaatagctttttgaataattttgaaacgacatccgatggaccattcttgtgtttaatatgtctaggttgtttgttttcgtttgtatttatcagtataattgattcaatgtttccaaaataggttagtatcttaaacgaaaagaaagctctctatgtttgttgtttgcatttacaatttacaaaaactttcaaaaataaaaatttgcattgaatactttttgaataaatcgaggcatttatgcaaatggcagctgaaaaattagttgtgggatctctgtttcggtgtttccgcttcgggttccgttggatagagcaattcagtctgttagaacttgagatataaggaatcattcactttataataaatttctatattcattccatttcttctacctacagtttaaaacaaaaacgtgtaattaaagtcttttcctttacccattttccattaattcgactttctgaaacagaaactgatcggtcgaattcaatacacaacatttgaatatatccaagagaataatgtaatgtagtacataaatatcccaatagtgacatctcaacttctaatacgttttatgtggacaatacaagagcgtttctactcaactctctgttactctctgaccttacacacactaacacactcatgtgacacactgacgcatatttatcaatttacacgtatatatattggtatatatgtaacgtaaatatatatgtgacttgctttttgtttgtatatattaataagctcttgttttgccaaaaatacatgaaagccggtatgttttattgtgcatcgcaagcatcgaccgctacggctaacggcgaacgtaccgtcaccgctcgagccatcgaccgtcataacccgattatcaaagatggtcgtagatctttcacggcaccgtgttcctccggagacgactacgttgctccctaccgtcagctttcgaaaattacgagagtaccctcctcctccggcgatggaaagagtgttcaggtagataaaggacggagaagcaattcagggtcgttgatgaagctgattagctatgacgtcagcttagcgaggaagagttttggctgtgttgttgcaacacccaaaactcctcctggttcaactaggtatcttctgggatccgaccctgtttctttagccgggtctacgggtcaggatacggttgcaacggaggaaagtgaagcttctgcgccaaaaagaggctcttctggtcccgtagaagagaagaagaagtcttctggttcaggttcagaccaggcaagtaaagtaaagttgtcgttttacttttactgtgtacggatggcatgaatgttaataaagagagcttggagggtgatttgtgttgtattttttggactgcaggtagttgttcttagagtgtctctccactgtcactgcagaggctgtcaaggcaaagtgaagaaacatctatccaaaatgcaaggtgaatcctctgttctcactgttcttaccctctattgttacagtatttacttttcttttacttgcttttcttatcaaaaacagcaatacatattttacttaggttagtataagagatcaaattatctaactatgagcaagttttagtgcaaacacattttttggttttaagttgggtacgggacctatagccttaatgggtaataatgcattgtcactatacgtgcaagtgtgtaaccgatctgatcatgtttctacaattatctctttcatattcaaaaaaggtgaaaaatgatatttctgatataatacttttgttaaagtttctataaaatatcaaaaatataatattatttacaatatcttgaagatattatatatgataatttaaggtaaagtaaaaaagatattttgggtttggtgatacccaaatgacttgggccaaatccatagattttatctatgaaatagtttgtaaatggatttagttaaagttcatgctaatggttttttttttttttttttggcaataagtaggtgtgacatccttcaacatagattttgcatcaaagaaggtaactgtgactggagacatcactcctttggaagtattgggttgcctctcaaaggtcaaaaatgcccaattctggacaccacctccaccatcaatcccaagggcaaatccggaaacctaaaagaaccactcacttttgtgtatttgtgttgtcttcctagctcttatttgcttgaatcagatcaatcgtaaaatgtggactttcctacttttatgattaaactgtcattacagggacacatgcttctttatgataaaattgtcattacatactgcattatcctggtgttttttttttgtttccttcccttaaactatgtaacaaagagattatttaactttctagaagattgcacctaccacaagctctgttatgagttcatctgtcagcattacctcaatctctctacctatgatttcaatgtcatcttctaaactcagccactgcaactccttctcctccacatcatatttgcttggtttctcgtcttttcttgtgaccaaatctcgcagagtctcttgtatcttgtttgcatcccatttcgggcatacctttgtggatttaacccaagggtgtggatccgacaactgctttaacatatgtagtacttctctgctgatctggtcaaaaagaagctttctttctaaccgggttgaggttttcacgctggagtacttcttctcgagatcctcaaacaaggatggctctacaggtgttgttgccatgacaatgttgtggtctgagtcactgaaactggagttggctaggagatcaactaagtatgatgacttccagtcttcttctctgagctccttggtaatcatagcctcatcagttattgtggatgactcctcttgatcagtgtcttcatcactcgaaacgagcatgccaccttctttgtaagtagctgactctagtttgaggagctgaagttgcattctgagtcctggaacgtagagataacagttaacacctcaaaacatttatagttaccccgtggatctacccgaatcaatttttgtgatacaaaaatattttaatgcatgaaagaattactgaactagcaagcactgattgactacctcggagatccgcgctaacactctcaaagcattccgaacctgatgatacatcatcgtcgaacgaagcttctagaactgaaaccggacttggttgatctccttcctttgagctttcacgaggctgtggtggatcaggaaccgaagaatgattcacatcctcagttgtcctccttgagatatcctagaacatcagtaaacaataagatatatgtgattataacaacctgtatattcaaaactcatgctcacttacagggtcagttaccgaggtgacagttgacaaatctagagcctcagaagacattgctgtcttgatatcatcagaagctgaactatcttcagtgtctgaatttgcatctcctgagaaactgctacgtgctttaaaaggagatgctgacttgcttggaatcccgtcgttcatataaacaaacttgcttaaacttggggtgatgctgacctctggcgaactattgtatgatgaatgagatttgttactgccaggtctagatttgcttgacaagaaagactctccgtgatgagaagaatccccctgcactaatgcatctcgattgatcaaccccttaggcaacactatggtgtaaccaccagcgctctcctggttcatgatggttctggattttgaaaaacttcttgagcaggatcctttccaaccatccctactgctgattccaactggttctggcagttcaggccactgaatgttgttctcaaatcttttactaatcccatcttcgaaactgagtccgttaaaacttgctggccttgcctccctatctgaagtggcaagcatttcagctaatgtcccacttctactaatttctatctcgtgctcaaacttgtgtgtcagcttccatctctctgacagtctcctcttagcttccctactcacagatgatgttgttgacttggaaggcaaagatcgatggtagttcctacggttgaaggcggttcttgttcctgaagttactggcactagctctgattcacttgcggagtcactccctgatgagctttcatcccctgcatatcctctaaatcctgaagtctcaaaactcatggcacgaccattgccacagctcaccttcctttgcctagacattattttggccatttctccacaatctcttgaattctgtcttgacaggcggacatcttcattacttttctgcctgccatgagtggtggtgcatggaagcctacgatctgctctgaactcatcggaagaagagcttggcgatgcaaaagttctagcagcataacgtggctccccgaggttaggtttcagaacaacaatcttggttggctgcaactcactcctctttctcagctcctcatttggtaagtcaatcgtgtcataagaagcatgcctagtatgagaacggctaggacaaccactaccaccaccaccattccgatgaggcgaccgatgactcttcctcaacaagtccctatcaactttctgagttttcagactatccacatgcctctgactgtttggcgacttcaaggatggtgcttgactgtactgtggcttgtgaggtgtgctttgaagatcatgcagatgttttgtaaataatgaatctgggtgctgaagaaacttcagtaagaggtctttgttagagtctagagcctcaagagcatcattaaactctttagaatgacgaagtttatcatccgttgatagccgcttagcctccatgaacttctgccgtatgaatgccatctccgcctgtgttagattagcattcaccctcccctgatgatataagtttctgttactctctgccatctttgcatccaaaacttcgaaaacatctttaaacttctgctcaccctttgagcgctttccaagagatttataagaagtgcctccaccactcctgccttgctgattctccatagacttttgttgcttatgagaagaactctgagaaggcaaaacatcgagacccatcaatctcgctataatgcttggcgatctctttttagattctttctgctttgacatttcttgtgctaacaaacttttcatcggtactccagtaggaaaatcttgctgcaacagcaatatgagcaacaagtcactttcaaacaacaacaacaggaaccaaacatttccagtcagatatcttaaaagagtaaataatacataccttgttttcactcaaagcttcacaatgacaagagttaaattcaggagaagaagaccttggagatttgagtttctgactcttctgtttctttcctgaaaaaatgaatgactttttaggattctcaattgataataaagcaatcaactttacgacaacggaagaaactttaataaaaaaaatggaaacttgggagacaaaaagagtaaattgtagcacaataagtggaggaagaagaagataaaaaacacaataaagcattgaggttaagcaaaaacactcattacatgtaaatctaaatcattaaatctgttgaaaaaaaagaaatttttaacaaacaaccaaatcatgacagtactactaccccaacaaacactgccctgataattttttctaaaaaagcttttctttactttattattataagaaaagaaaaaaaaaagagagtagcaatctgtaatcttcttcttctctctacccactgctttaaaactatagttttttttccacaagaaacaaataaacatttctttgttttgtagctcaagattttataaaaatacatttctctatagtttaagaagtaaccaattgtggtattgatgacctccctcactacgagagactctcgaacaacccgaacaaggaaacaaaaagacatcagtaattgcttttgttttggtttgctcagaaaatctcagaaccttttaactaaaatatttataaaattgattgaccaacaaaaaatacacaatttgctctaaattgacaaattcgagttctatgttagaacaaacgaaaacgcatcaaatcggcggtttctcttcaaccaatcagaaacggttgtgtaagaaaaaagcgtgagagagaaaagctgtgaccttggtgagaagtgggcagtgttgaagctaatcgatctcgagaactgaggtcgctgagtcgaaatctgttcatctttcactcactgttcatctccggtgaaaacatttcattcggaggaaaaagcacggagaggtgaatctaggtctggaaattcactgggtaagagaaaatcagaggaagatttagagaaatctaactcgtgagaagaaatgcagacgattctctgggattacggggagatctaagagaagagaaggaacccaagaagaaattaaacgattagagaagaaattgagtgaaagagagagagagagaagagcgaaccagacgagacgacggagaaaagaggaaatgggaaatggcttctgagtttatttgaaagttcaaatttttttaatctttttttttttttttgaagtttagtaaaggggggcgtgtttggtactattttaaaaacttactgagttctgtgtatccgtgaattgctgccacttgtctctccccttccattttccttcttcttcttttgtcgtaccgtcggatttcttttctaaaaaataaagaaatagtactacagtatacaatcaataaccaacaaattggtaccgtaaaaacaaacttcaacaaagttggaattatttatcaagatttataaccaagtttagaataaataaccaagttttctgtattatgttcttcttctatctatatagcaaacgatattttctttcgggacaatttttaggttcaatctaggagtgaacatttgtattcaccttttttagtttaaattaattattatgtcatgttatacaacacttaaatagaaactaaatattaaaaacaaaaaacaaaataaattaagaacacattaacaaaaaaattaataaccttaagtttttcttttaattagccaattaaattttactatctaatctaactaaaataattaatattatctaaataaataaaaataattcattgaaacctcttaaattgaattaattataaaatctaacactaaccattcttttataaatacaaaccgacatataatcttaacttaatagaattatggcttaagttttctattcctgttttttgtttcctctaaaaagtgagttaaaataaaattttaaaaatattttacccttatctcagatttaagaatgtttctaagtcatctatattttatattaacctctgactgaagtctcttgtctacaagtctcttcctagagaagattaggttaagcaagacttgaaatctattcaactatatggtcctttatcctcttaaatctatgctaattactcgaaaaaacagaaaaacaaaaatttatgctcataaaaaattcgaaatgtatactaacagtgacaaatagtagaacctttcaagtccctaataaagggttagttcgtgagctcaccaaatatgactataagtagaaaatgacagaaattcttacagccttcgctttcaagataattaatctgacacattgctcaaaaaaaacaggtttaatgacgactatgaaacatttttccaaacacaaaccgctaacttacttgaagttacttcgtattaaatttacggttagattataattttaatgcataatgttttgctaattaatcacatactatatgcacgcattaattgcatttactaactatcatgaattgactatatagtctctttatttatctcctagagaagaacataagataaagatcatatatgcacaaatgtgtgtagagtgtagtttcaaaatttattcgccgcaagacaaacaaaaaaaaaaaatcaaaaggaaaaaaaaaatcgaatagaaaagaacaaaatataaaagcaaataaatctttaactttcaatttttcatgtcttccttgatttatggaggttttttagacgttgatgcatccatagatgatagatcacctagacgcctacacacatatcattacttttatgattgttgttctttttacaatcagtgaaacaaaactgaatatgatggttcgaaataaattcaatttcttggtttttttttgtaatagctagaccaccgaggtcacaaaacctaaacgtttttccaacttttgtattataaagtaccactggactaaatttggaacgtttccaaaactacatctacaggaaaggattatatattgaagaattggtattatttcggtttattaaacgaaagaaaaagtattattcggacatgcgtgtatagcacaaatactattttcttcgattagcagctttagctaacatttgattattatatgaatgaacaatttgtaaaaccgaaaaacgttgttgacaaaaaccaatgtttagagttaagtacagctgcatggacaagctaagattcgtcttcgtgactactcgtaagtcaataaagtaccaattaataaccatattaaagctaaataaataaacatgcaagttgtagtatttaattgggaaaagttatcaggcgtagaaaaaatacgaaaaaaacagtaacaaaagacaaataaaaaaaaggtaaagcagattccttgacctatgtagtcgatgctcatgaaacggttatgcgtttgattcattatggcctatgtagatgtaagaaaatagatctataaccctaaaactcttaccgtaattgttttaagaaaaataataaaaagagaaacaatgagattgacctaaaattccatagtatttacgtaaatatttataccaccgtaaattaatttaatatatgtatataaagaatattattattttttgttttgtccatgttcacagattttgtctttggcttgttgtcttgttgatatgtcaaacgtctccttctccatgaaataactggtcgaacataatctactatttacaaacactcacaatcttgttagattttgttgtgtgtatcttatgcaaaaatcttcacacaggacttcaaggcatgaggctaaattagcaatatatgtgaaattgtgatatatcaattcacaaaaatgatcttttatttatattggacactacttaagtgttgttactcgtatatgaacaaatttaaaatcttattgatcatatactctagctcttttaagtgtggttagtatatgacaaaaaaaacttattcataacatccaaatatcagtggttaaaatcatagagagatatatgaaagttctacccaaaagtagtaaaaatattatatctgaaaaaaaatttgtaagcaaaaaataatttcctgaactgtggttaaaaaaaaattagatagaatttataaaatttatattttatcaatatgctataagtttcagtcatttgctgtagtatcatattctatataattacataatatagtatatctatctaccgtaaagagtcgtaatataatttgtaagatgttataataaaatattgagtaactgacaaaaaataatcaaatgcgatttatttcatcttgttatgataatagttcaaggattaggatgcatgcatcccataatctaatattaaaagagtatgtcggtttagtgaaaattaagctattaatttagttttgacagtggaacggaaccaaacctttgtgaaaaagttgaagaaaaaagtggagaagaagaagacgacaatgtggttaattacttgttcaatttgaacactaatttaacacccaacctaatctctaatcttagtttctaacaattcaattatattcacttttacttaaaatattttatcttgctattcgtttacttaactggaaagcactttttaaatggctttttaaaaaaaacgaaagtctctcttttcgtttgttaaaaccttcccttttacaatttttgttgtcacaaactttttgtcacgtaattgtacgtttatcgcttgttgttggtagcaattttcacttggaaatcttaatctttttgtccataattatatatagcataattaaaatcatcgaagaaatgtcgtagttcttaccatttatattctgctgtttaattatgtttgttaatcattccatgataattcatcaataatcagggcctttaattgtaactaacaaattagtctgttgaacaataaggaatcaacgaggagaggactcggagtctacgacacaacgaagagtaggtcaagtacacatttataagctatgatcaaaatttacgcattttgtttgccttctaggtgacaacgactctattgaccttaacatacaaaattgcaaacttcttttttcccctgtcaacacttgaaacgtttaaatatgttccaattgcgacataactatttaatatttaacctatgattagctgccaacaacgtcttactttactcataagcattgataattagacatcttagaccaacattcactaaatctaaacttataattattattatctttgacagatacagtaccatgtaataaaattttgaaagtaaacaatcatctatactattttccattttaggtaccccagtttatcaacaagattttttttaatatctgaatatctgctctgataaatttgtatggtttagttttggtttgaccactcttatgtcaatctaactgaaaaaacttcaaaataaatgagataccaaaacctaaatctaatttttctcatattgatttcatacatcttctcggaacttgagaagcacacatgcagtacaataatgcgaagattgagtgttaggtgcgttgattgataaaagttgtagatatgagaccaggtgacagagatatatagattctactttcatctgtccgacacgtaagcaaagctaagctagtttcaagaaacactgaatcaaaaccaaataatgtgttagattaaatcgagagagagagagagagataaggatattgcaatcagcttccaaagctactgcggttgggggaccatgaagacaaccataccgcaaggaatctactatctgtttggtttttccttaaccggacattatagtcttatggtttagagaaccggaatgaaccagtcatttccctatcgatttgatggaacgtggggaccaaaccttaccaaatgtcaaaatcaagcaagaaaatgggtaatcgaaacacagcatttataaacttcacctacagaagaagaagaagaagatcatcgtttgtgattgtcaaaattgtggtccagttaaaaacggcatgacaacttcatggaagaaggagatctctatcaaacttatgactcctcacaacttggctaatggacgtccatttccggattatccacaactgatagatgcacactcaacattaaaacatgtgtatgtgctttgtgcattgagttacttgaataagcagatattataattgattttaactagtgattagtcttcactccccaattacctgcaaaacctgatgcatttattgcaacatgcgcatgaaattaaatgcatatgcaagttgattgcatcacaagacaaaatctcgaaaattcgttgtaattattctaattattctctgttttgcttttcaacattgcttcctcaattctactctattgcgcttccatatccaaacctgaatcggataaggttaagatgatcgatcacttatatcgccgcttctagaagctttcgagatttgatcctaagaaaaactggccttatgagtttggacatatctttgaatttatttaataataaaaaaatgagagatcaagaattaataaagataatcttcttacttcaagatttgcgtgtatatcaacttgtcataatatatcctaaattgagaccttgaatcgttgttggtgtagtttgcagaatcgttgttggcgatccagtttcaagaagcaaatattttgcaacatcttttgtttaagtttttggcgatatatacaacaatgtaagtctgattttaattctttatttttgccctttctcaattaaaaaaagtttttattttatataaaaattaagatacataattctaaattaaggaccctaaacctttgttggtgtagtttggagaatcattgttggtgatgcagtttcatggagcaaatatgttgcgacatcttttgttaaattttagcacaattcacattttttctgcgttagggatactgtttgaccaaacagcccgacattttgagaagaaaaaacccaaaagctatcggagtatcgggacaagatcagtgagttgtccgacgatttgctcgtgcagatattgttgctagtcccaacaaaagatgcagtggctaccatgattttatcaaaaagatggcggtatgtttggacaaaggtgccaaaacttacataccctgcagagagcaatgttactctagttattgggggtatacttggtcgtttgcttgaccgtttatttgggaaacgtgataagcaagaaaggtttattgacaagtcattacaagtccacaaagcacctatattagaattattacatatagaacttgatccacgatgtgatgttgatgtgggaaagtgaattgcaaatgcggttgatcatcgtaaggtgcgagagctatgtttcatgctcacgtgggctggagagccgaccagcttacctaagagtctttacacatgtgaaactctagtctctctatgtctttccggcaagattctcattgatgttccttctttggcttgtcttccatccctcaaaggtcttagactttcctttgtggtatataaagataaagattctgttgttagacttttatcgagttgtccaattctcaaatctttggtcgtggatcgacaacatcaagacaacgtgaatttttttaatataaaagttccatctttggaatacttatcatataattatgtgaaattgggagcagaaaacgaaggtattgtggggactttggttatagattcaccgattttaaagaaaatctgcattacagattattcgggagactcttactcgtttgggaataagcctcgccttgataaggcaaagatcaaccttttctattaccctgataacaagtttatgagatctctttcctcaatcatgtgtctcgaactaattttgagcgttgcaacggtctgttgttctcttttcaatttcctttttttatatattggtatgatcacatttctaatgtgttaaattacttatgtattgttgtggtcattgcagcttgcgtggttgaacgctaataacttctctcggcttatagagtgtaagctgattattctaaacgagttagactggttggaatcactaatggtgttgcttcaaaattctcctaatctaagttcttttcatcgaccaggtttgttgttaccttcatttttcattgatgcagttttgatagattgatacaagcattagtaaatgtacgtttatcatatcacttgttgttgctttgcagtcgttcaaacaacttgaaaaggagttgccactttcatggaaccaaccgagttctgttcccgaatgtttgtccaaccatctcaagatattcgagtggaaaggatataggggaagaaaggaggagaaagaaatcgtgcgatacatccttgccaactctaagtgtttaaggagaattggagtctccttgaaatcaaccaacaaccataagacgatcaaagagttagaatctatgtctagggtttcgacatcatcccatcttctattctccactcaatttgaatatatgagcgttgacaatgaaataaggagtgactaatcttttactatcatatatatggatcctgcattatatgcatgccattagtcaagatattgtttttattaacttttttttttggtatcaagtttttttatgaacttttttttttttttttttgaaagaatgtaaaatttttattccatcaaaaagcttttgtacaatgaatgcaactgtttgtttagaatatagcagaggaaactgaaattacaaaactgagacaaaaattcagagtagttgtggggaagaatgaggctgcctcatggaaaaccatagctgcatacagtcgttgtagttatgatctcccgtgtctttttttatgaactttataatgtattagaattacaatgttcaaaattgttgttccatatattgctgcatgattcaagttttattcaatcaaactcaaagatccccaacgtaaaacatcatgagctaatataagaagcctacaagagaaagagaaactaaagttataagaaaaaatattcgtcttgtaagttcttttcttcagactcctcttggaggaagagatgtctatcaaactaatgactcaattatgaatagtgatagtgaatgtgctttgtttatttggcaacttgaataagcagagtcagagagattagagattgagcacaactagtgaatctctatatcatagacgtttaagacaatcaataaggtaaaaaaaaagaagaaacccttttggaaatttttgtcttgtcgatttgttttgtcatgtacagaaggaaagtgaaatagaaacaaacagaggaagactttaacacacactaagggttggtgaaacacattgacagaatgctgcctgtaatgggttccacgagaccaatgcttactgagtttatagaagccaaatatttaagtgaatttgttgaaagaggccccttaacttccgcttttttccatatttaaaacctttaagaatgctgttcttacatttaaacccatcaactttagtccgcctgctacacaacacctgataaacggaaaatgatgccttttgggttgatgatatttcttctgatttcttctttttagattgatgatatgcatgcaagtttatacagaggaaatgaccatatcgctttatttccaaaacgatattacactccatgtctccatgtcaaacctcagagactagaatatcaaactcaacatgaaatgctttactttttcagtattttaggtaagaaaatcaaagaaccaacaaagagtttgatatagctttcctctacaatctttagttcaccaaacagatgatatgaaatatcggtttctcataagagatggcaagaatatcaaaaagaattatggccagaacatcatccaactcaacaagcaagtaatgtattaagttgcctgaatgatatagctaaagtatgagacctcactgttcttttggatctaaagagcaagatgtacataagcatctagaccatgtgcacagggattctgattcaaatccattattaaattaaaccaagtattcgacttatgaactttatgtaaaccaactaaagatacatcttgagacgatcaagaaaaacctgcaacagaaaatcctcaaaaccacattttccaagtcttctaagcatgatttttcacctcattacacatattctcatcaactagttgatccagccatctcctcagccatctcacgctgcgccttctcggaaaaaagctttgttgctatcatattatccataaaatactctctataaggatgattctttggaacaagtttccgaaagttatcaaactgttcttctgccttgtctttcttcttcagcaatgtgtatataattccctgacaaagatacggcctaaaatctcttggttcctcctttacaagctcttgataaagcttcaatgcttcactatgttttccttcaatgacccgaatctgcgccacgagtagcttaaaatcccgaaaatcgttttgattattctcctttttgcacttcaacattgcttcctcaattctactctccacctctttcaaatcaagacctgcatctgaataagccataagcaagccgtgataagcttcaacacgaagcggatctttagccagaatctcttcaaatccagttttagccaagtctagatctccactgtaggtaaagatgttagctttcaaaactggccattctttttcttcaggttccaattttatcaaacgatcgatcacttctactgcttctgtaagctttcgagatttgatctttacctccatcaatgaacgaagagcgtcgacatcagaagggtgagtaatcaaatgctcatcaagcgctctctcttcttcttccaaggtaacgttttctttgctttcaactgacggcggaggcgcgatgggagctgcaatcgccggcgatttgagatggagattcgccaaaagcagagccgcggcggttgttagagtgatgcatgtggatttgaagagacggaaaggtgtggactttgggagaggggtgatagagttttgaaatttggaggacgaagctttaattgaagcggatttgagagatgaaattggttgaattgaggatttgaagaggtttttggggaatgttgaagaagaggtgtgagtgaaggaaaggtgaaatggctggtgatgtagctgtagcttccccagagactccatgattgcggaatgagatagataaaccctagaaaagtaaaaaccctgagctagtagtaaagagataggtgaagaagaagaagatgaagcctttcgattccgaatattctctcctcgctgcagatacgacgacagcgttttggtcattgatgggcctcacctcacgctgcgttttgacctatccaaaaaacccaataaatggtttaacatttcactttgtggtgtaaagtaacttttaataactcttacaatagccatggagggagcaacagtggttgtggtcggaaagtgaacacaaaaaaccaaaacaacagataagaaaaaattaggcacaaacctttctctctttctttcatttctatacatgataatcatatatataataaaatgctacaaaaacacaggaaactgaaggatacacagaaactgcagatgtatccaaacattatctgctgtttcttttttcttttcttttttagttcttttggttgtataaaaatggatgagggtttgggttgaagggtggtatactctgttcccggcttcttgtgaagaagggatggttcagtgcttctcttgccttgaacctctctgttggatcatatcgaagcagaccttgtaataggtctatcagatcaccggctgagtgatccacatgctgcattatcaggttctgcaaaatgcaaaaaaactggtctccttaatttcaatatttcagataagcggatgtcaagtccaatgtaaggttatttaccggtagccggggaagtttccatactgcttttaagctgtctcttgatgtcgcaccttcaggccagtctaacttcgcacctcgtctgaagtatttctcagagcgccggctgcaagaaccgttttggttttgatataagaaatgacagttcaagttattttctgctggtatctgatgctgcaaataggatgatattattgttcttactcggctctgagcaccatatgaggtggtaaaggtcctaggaccctttccatcatggccaaatgttccaagttttcatgcgtttggaaaagcgcctctccctgcaaggtttaatccagagaaaacgttgatggagacatggtgagatgaatagggtggtgtaccggaagatatgcaaacataaagttactcaccgaacaaagttcaacaagtatgcaaccaatactccacagatcacatggatagttccatccaacccctgcaataaacgttccaaactcttaaataccatgactacacaaaaaaataatcatctacgtagatgtgtcagagtcataaacgtttacctaggataacttctggtgcgcggtaatgtcttgtggatacaatgtagttatggtcttgatgttcaaatgttgtacttccgaaatcaatgagcttgatggcacttgacttgggcagattcttgaagtatgacccatcttttgtgggtcgggatagaaactagattttcatgaccacacataggaaaagggtcaagagttatacaagttccttcatggatggatatcatattagccatgaaaataaatgagtccagcttggagatgattgattgctcaccttataatcaggtattttgatatattcagacgataccaaaagaatgttctccggcttcaaatccgtgtggatcagccgtaaatcatgcatatctgtcagaatggaatgagcaaagtctgagtacactagtcaacaaaagtctccagaaataactgtctgagcaatatggattccatggaaattgcattatcgaaagaacattaagtaataactattaacgcctaagtcttgtatcaaaaagttaagaaaaatgatttgtggcactaatggactactatatagaagaatgggtcaagaatattccacacacatgcaacagactccaaaagttgtctgccaagctcccgaacaagatcaatgggaaatgaacggtagctgtttttgcggagaaaatcatataagcttggtccaagcttctcaaatacctgttgaaaccatttaaacccatgcgcaagttcttttaactcacataacatttgggcgtgaagaaattgcattttcccctcaaacttgtcaaataaaggtaacagcacttacaatacaaatatgattacgatagtcaaaccaattccgtatttgcacacaactgcaaggaattgaaaagcttataccaaatgtaataaaattaaaactagcgaagaaatagtaagaggaaagaaatattcttaccgagaaccaccgacatcatgccttgtaagcctctgcagcacgtcaatttcgatcatggcagcttcacgatacttgtttatggaccgtataactttgattgccacgacttctttgtttttattatcaaagcattccaatacttgtccaaatgtacctgccaaaatacaatccaattgattaagataactggcgaccaaataaacatatttctcctacactttgaaaaacagaataatctaatcataatgattatataaacattttcgcaagagatgactaaccttcacccattttgctgagaatttgatctgcacgcacaatagaagaggcatgtcaatgtaaacctccatgataaagtctgtgaaacgtaacagataagatgtcgaaagactctgtaacataagactcacatcgtggagtcaaagtatccccaacaacaaagacataatggccgtctttatcatctggtctccagggaggagagccctgacgaggaaggccattatagaacatgtttgggtaaacaaaattgggaactaaaccactcgcaaactccggaccatagtacaacggaggttgaaatacctgaaagaaaaaaacacatcagctgaaacttagctcaagcacacaaataaaaatcttaatttcttactagttaacacaattcgcagtatcttatgaaaacaacaaaagaacagtccattgataccaatacaatatgtggacaattcgttaccgtgggtggaggaggaggaggaagaagaggcggagcagcatcccaagtcaatcggggacgtttcctgggacgcttatcaacgatccgatgagggaattcaacattcctctgagtttctaagatcatcgcgatcgagctagctttatcacgatacacactgctttgcataaaggattagaaaaatgcaaatccagagctgaaattcagaaacccagattatgaacagcgagagaattgcgattgaatttcgaatctaattagagggataataagattccgaaattcgaaaccctagttatcttcaatttgggggggatctatctccagaagataactaaaaaaggtgggaaaagtaacagaaaaatatattaaaaaaagtggaagtaatgtagctaataaactaaccgcaaatttctctcacacagagtaatttaaaacgttgaattagtcgctgtcgtaatttgatcgccggaattcagatcggagaaacaataaaaatgctcactgaattggaattgaagaaaaaaatctcaggagaaaatatttaacagcgaaagagactgaaatgagagagagagagagaacctgaggaagagaacagcgaaggagcgacagaggctctggaagttcttaatgggcttttttagtcaggcctttattaaatatatgttgactaaagaaacgacatgatgttattactgttgaggataaaaacgacgtggagttcagttatttaatatcagaacaatggggtgttttctccaaagtcttttaatatggaggagacgggagagtcgttgaacaagaaaaataatctgaagcagccatggagatagccgccgttagcactgtctccgtcgcgccacaatcgcgcagagtgtcgaatgcgttctccaggaatctaggatccgtatcttctctttcgtttggtttctttgagaaagaatattgctttaagagccctagccttcgtgtgtctgcagcagcttccatggacgccgtcacagctgagaaattttctccggcgagttttctagacaaaaaagaaaccggagttcttcactttgtgaaataccatggcctcggcaatgacttcattttggtacttttgttcaccgttgaattctcaatttggtaatttaacccgaaatgtatcgaattcttacaaatgttttcaaatttttcgtctttggaattggattttgtaggtcgataacagagactcatcggaacctaagattactcaagaacaggcggcgaagctgtgtgatcgaaacttcggtgttggtgccgatggagtgatttttgcaatgccaggagtcaatggtactgattacgcaatgcggattttcaattcagatggtagtgaaccagaggtggggcttttcgatgataatgtctggtgatatgttgttgcgctcgaagtcattggcttttgattttgttcttgtagatgtgtggcaatggagttcgatgctttgctaggttcattgctgagcttgagaatttgcagggaaaacataggtatctctatctgtattgagaaatatctgtttagacttgagagttccgagtttagtcaagcttgatgtaaccttaagtgtctatttatttgtttttgtagttttacaatacataccggtgccgggttgattgttccagaaattcaagatgacggacaggtagatcatttggattgatgtctcatattaggtttagtcgtattcatgatgatgggtaaggtaaagtttggatttttattttttgtgattgatattggtacaggttaaggttgacatggggacaccgattcttaaagcacaagatgtgcccacgaaattgtcagggaacaaaggtgaagctgttgttgaggcagagctagttgttgatggagtaagctggaatgtgacgtgtgttagtatgggcaatcctcactgtatcacatttggtaaaaagggtggaccggtgcgtgtttcgttactagacttctaatcatattatttgtctacacgtgaatttcttatcatttgtaattttggtttgtgtcaaccagaatctgaaagttgatgatttgaacttaccagagattggtccaaagttcgagcatcatgaaatgttcccagctcgaactaacacaggttagtggagattcatcggcagatgtatccagatttccattgactgatacagcaagacttctcgcttatatttggatttatatccctttagttgtcttacagttctttctgtgtatccgcagaatttgttgaggtcttatcacgttctcatttgaaaatgcgtgtgtgggagcgcggagcaggtccgcaaattccccccaatcttcgaatataattctcagttgattataaacagtctctgtatccttatatgcttaatgcttacgcatacttaaaactgcaggagcaactttggcctgtggaactggagcttgtgctctggttgttgcagcagtccttgaaggtcgagccgacagggtaagtttggaatttcagaacttaaaaaactagataacagtttgcaaaatggtacactggattagcagtttttaagcattttttatgaaacctgaatgttgcattgaatggttggatgatttgattggtagacgattgatgagattatgattttactaagtacttttcgttcgcttcgtctcttgtgggagaatcttgtattcgttttttttggttcttcactctcacacaaatgtttcttggatattcattggagcttaaagattgtcatgagctgagattagctgcatgtggtgaccttgagttcctcatatatgtattggtttatggtggaacagaaatgcacggtggatctaccgggcggaccattggagatagagtggaaacaggaagacaaccatatctacatgacgggtcctgcagaagctgttttctatggatcagcgctgctctaatgggccttcacagtcgatgacttctcctctctctgttgttgttcttttggggtctgtgtgttctaattcaaacgtgtgaagctcttacctgtcctgctagattgtgtttcatggattttgtttatgtacttttattgttttcagagtatccaaaccttttgatttgttgctgcatctatgttcataatttaaatcttcttttcctcggaatatagctctcttctacactgattctccaccagaccagacattgtcaatggccgtggttgcacataatgacaagagaaatgaaacttgagagaatacaaaaccgcatatgtacatgataagattggttagcttccatatctgcatagatattagcttatatggttaggaatcaggacaacataactggtatcataatatctcctaagtataataacacaactctcattagtctgatgttagcctatctcacacaaatatttgtcaacgaggttttacagcgtggaaaaagccactgtccaagttacttccaggaagtaaagacaatggcgagggtacagaagaagatgacggcgatgttttggagcagagtaatttcgttgtttctgagaacatttcgggttctcgcacagattggcaaataccttcaagttctttcaccacttttgacattggtggtctcgtctctggtctatcttcacaacaccataaagctaattccgccaacttcttcactttatcgggcgaacattgtcccatccgactatccgccactgacaaaaccgttccacattcattcgcggtcctcacctgtatcacattgtacagaaaaaactcttaggaaatttgtagatatattcaaaaaaacataaacctcacagatttagctactccattatcagatctacgtgggagctcagtcaagaaaagtacctcgcggataatatgtgtaccctcaaagaatgggtgcattccagtcaaaagctcaagcaacactactccaaagctgtacacatcacttctcaccgtcaattgctgagtcatgaaatactctggatccagatatccctgtgcatgtataattatcaaaatgtcatagctgagagggaaaccatgtttggttttgtcaaaagccacaggttacatagtatcacatatcgacttgtgtcctagtttagaactcaccggtgttcctcttactactgttgatacatgggcgggctcaccatctccctccccaaaagcaggagccaaccgtgacaatccaaaatcagcaaccttagcatgaagctgacagtccaagagtatgttgctggttttgatatcgcggtgaataactggcggatttgcttcagtgtgaaggtaaagaatccctttagctgaacctaacgccacatgtgacctcatgctaaagctcaatgtgtctgcagcattagctgcgtgacaatgtaaaaccactgatacattagcatccatgtggaagcagattggcgcctcaaaaattttaagctagtttctgatcttacatgtatagaaaagaacttgggaggaatatttcttacctgaaagccaatcacgcacatttccattaggcatatactcatataccagcatctgtgcatgaaccaaacagaacacctatgtggattagtcgaagagcatagatataaagctaactgacaactgcacatgcaaaaggacatacctgttccccgatgtcactactgtagccaataagcgacacaagattccggtgatgtaacctcgaaagtagatcgatctcattcagaaactctttttcgctctgcagagaagtttcttctcctcgtttgatggcaacttcggttttatttgacaaaatgcctttgtagacctttccatagctacctctaccaatcagtgtggagctgtcaaaaccattagttgcatccgacagttctacaaaactgaacttcttcacccctttgatttcccgagatattgttctgactggaagacataagaaagagtcctcaatttcatggttataggacacaacaagatgaaatactgacaaaaagagccattgctgagttgcttacaaacacgttttttggtgagcgtatgtgagttttcacgacgtttcctaacatatagaagtgttgcagtcactgataaaacagtggcagcgacgacagagcctgctactatcatcatccatacaatcgttctaattccactcgtttgagctaacaaatcagctgcatccaaagaattaaatgcatattactatatatatacacatatccttatttgttaaagattagatccaaaaactgtaccatacggtccttgaagagggaagtccagcagctcatatggtccaaaaaagtcagttttattaaaactccatgacataaacctgtcccgtatacgtatgacttcactcttgttaaatgttattctgcctttggggactagctttaagtacattcttggacgcagcctgttctcatcgacaagtctatcaatcgctagttgatgagtctccagttggagggacgaggtaatatactccctgaattggcgttcaatatatggagtaaagaaaaagaagctagggctctttagcctataatcaatcgaaagaggtgctgtgcacaagcagattcctggggatactttcacattctcaaagggacatgacacattactgcagggtgtgtttgagtttgtagatgtctgctttttttcgccgcagatgtattcgaagaattgtgtaaccatgggaatgcttgtactcttgcatattgggttgccacgaagactttcatacagaaggatacgaaaagagctttagtagatagcaaaagaatagtagaaactagagaaacctatgagttgttgacttttggttttaaagcgcgcagaacaagtacaaaaacttaaactgaattagactataatgccaagacaagagaatgcagtttcagtccaaaatgtttgatgtgcattaagttgctaccaaacaggaacaaggaaacttactatagggtaacattgtctggtgttctcaggtttcctgtggcatcagagaagttgttgttcctgagatcactgtgcatgcatccaaaagaagtttcagcctctgagaatgaagtataaaactaggaaactaataagtaaagaaaaacaaatactagaggtcatacacttgcagcttgttattctcgaaagacttgtcctgccaaatttctgttgggacagaaccagataaactgttgttctcaagtgacctgttatagatgacacaaaaaaagttataaagtacttatgaatgggaaagttcatttcactgatcaatgaatgtttacatacagtaattgaagagagttcaaatctgagaaactttgtggtatagatccagttaggtggttataagatagttcactgcagaaaaaaattgacaaataagtattgtatcgccggatacactgcatgaaagtgaaattagatagatatttcctttgagtaaactgttaaaaggaaaaaggtttggaaatctgcgtacattgttgtcatattgtcagaaagcttggattctggtatagtgcctgtgaggtggttccaacttaggtctctgtacaagagatgaaaatatgcatttgtattgttccttaaaaaggtccaagaagtccaggaccagtcaaaagaatcagacaatgttacaaataccagacatagatacttacagatagctaagattttctatcctgcttaaatcaggaatagatccttgcagtccacagttccttaaacttctgccaagttggaaagatgaagcacaagagcatgttcaaactagtggagtaatacaaaccaatctgaatcttattgcagaaacctcttgtaaagtcttacaattttactaatctagaaaagtgtccgtaagcctctggaatagttgaaccttcgaagttgttgttatccagctgactgcttaagcggaatcttagcttagcaactttgcaaaatattgtaaacgcaaacataaagacagtcaatgggaacaatatatggcgcatacagtatggtcaaggatggcaattgagctaactctagcggcaatgtcccagtcaagttattgttgtccagtatcctacaagatttagtccacaatataaagactaaagatagtatccaaatgtgaaaataaaacaaacaaaactcacatgtgaacaagcttgggcaatttggatagctcaacaggaatttctccacttatcgtgttattgtttaagtggctgaataccaaaaggccactgatgagtaaaggatgaaccacaaaattactgctggttttgctatgaagaagtaataacttcacggtaaacttacagatgttttatgcttctcaagtttccaaatgaaaatggaactgaacctgttatgttattctcatctacttgaagcctgtttaggttttgaaggttaccaagttcagggggtaaactacccgtgaacttgttcccattcaacagtctgtccaaataatgtagcaaagagtcaattgaagaaactcaaaacaaaattgggattgtggctccaaaaaaaacaaaagagaaaacaagccttttttaagactatcccataagtgaaactaaccaagtaacaaaaaggcaaaagaaagtacatcatgtgatccaacttacaggagtttcaaggaagaaattcttcctatctccaacggaatacgcccagtcaggttgttccacatcacatcacttcaacaaggtaacccaagagaaaatacgtttttcagtatgcattaggcacccggaagccaatcagacaaaccaaatgaaacaattcattagactacgcatcttacagaatttcgagatacaataactggccaacttcaggagccagttctccagataaattcaacctcatcaattggctatatcacaatacgtaaatgacagaaggtgtaagtacggcaacgcataatattttcagtatgtccatgcaagaatcagaacactgcattagtgatgcatggactatctacctttgcatgagaaaaaatccctgaattccaaatataaagacaggggaaaggaccaaaaagaagaaaagaaatgtgactaatggtaatacaagagacatacagctcccggacgtgaaagtggccatcattatgtgatctcccgaagcatattatgccagtccagtttgaattgcacgggtcaccctttgcccagttacttaaatttctcataggatcaattagactccttttgatctcccgcaaagcatttactgcaaaatggataaaaatataagcaaacttctggaaagcagtctccacgttgtagaatgatttgggtagagggtggagcctgaaacgctaccaatcaaacattgagaggaagactagtgaccaagtttatgcaaattgaccgtatcagtacgtttatgttaggtggtatcataatttaagataattacaagagatgtgaagttatgataaaaaatgattaccttctgaaggatctgttctgtaaccagctacatgaagcagaaggcaacaaaatgtgaccagtaataatgaaccgcgtgttcttgaactcatcaagatacctagaaaaggaagacaaatcatactttatcctgttgtaggacacagaaacatgggggtcagagctagatgatttcaaacttcacaagaaaaatctgggtcaaggccaatcttagaagttatgataagaaaatacgagctcacatgaacaagtcactagaagaagcaccaagaaacgcgttaggcagaagatcaaagattcataaaagaattcccggaaatttcttcaacaccaaggaaaagcagaagtctattggtcatcagacatagttatgtctataaaaatactgctggaaatagatatttcatgatgacagtgatctaatgagttaacaaaacataccagaaagggactatatataagaaattgtcaacaaagttctattgaatatctatatctaatgaatggggtttgaaaatttcttattaagactgactttccttgatgaacctatctctgcagtttcccagtatatattgaacagcaataaaaaggttcgatggtaacattaagtgtataatccatgcctgaaacatcctacgaggcataatagtgcagacttttcgacacatatatagagagaaagataatagtttttacagaaaaatccaacaatcttccaacttgtcaattttatagtttcagttgcagagtggttgtccacttaggctgacctggtcaccaaagttggtgatttcagctgcaaagttatgaccctttcccaatctagactaggttattatgaaacggatccggtctaagaaattccaggagcaacccaacgcaagagtaaataggttagcaaaacttcagattacatggtgacaggaaacattaggactgaatgaaagacagagaacggaaagtaaaatcctgtctaggtataataaagcacctcatttttagccaaattctatgcagaaaaaaagtcaacacttgctagtttccactcatgtaagcctagacttccccaagtagtgattattactctggtaccaaaacatgtgtttgatgttgtattgatcaggcctcaacacctaaaactctcactgggctcttttatataacaaagtgcccggctcaactacaaacgacaaaccaattaaaattctcatcttttagtaatgggataatatctgtggaccaaacagctaaacaaacaaagaaacacataattctcccatcttacagattagataacagcaggtgacaaatttccagatatatttgctgcatcaaaatattggtaatgtgattaatgatgaacgaaaaataacataacatacactaacacatagctgttcagaacaccactgagttgataagttttagaactgatttttcttatatttctctttaagtttgatttacaacagatagaaacaattcatgaacaaaccaaatacagaacaaaaagtagccctgggaatgagttatagagcatcccttaccctcccaaggccaagaccatccaaaaatacctgataatccctatctgtttctttccaaactatatagaccacttgagcagccattctacacaagacacaaactataaaactttcttcatgtctttatcatccaatctttcttttttgggttatcatcattcaccactgcccaattacttaagctcctcataagatcaataaagtcctttctgattcatacaaatgcagttgctgcaaatttggttggaaatgtcagaaaaccactcagctccaataagatgatcatcaaaaaagttttggatgaaactaaagatgactgctttagccttaaggtgaaatgcaatgcattgtagctaccatgcagctaattttcaaagctggaactagttttaacaattctctagatgaaagtagcagaccaactgatattgttatagatggaacaaaatcgagtagagaggtcatatacattctgaaatcaatagcatccaaggcgagatgatttctgcagtattggctgattaaactatccctgacccaagtctggtaagaagaagaaaagacggcgtcgcgcctcctttgtcggagaagaagagtcgaagaagacaagcaaaggcaacaaagcaaagagaagttgggccgtgtggcttattaaaaaggttattgggctatagttaagcccatgtactatttgggttttagttggttaagtttcagggttttttttttttaaaaagtagatttctacgataaatgtgtgtgtgaagatgttgaaagttgaaacttcataaataaggttcctgaagaattcaacattcttggttgatcatataatactctctcacgattgacagtccaaatgactttcaactctttaatctaaagtctaaaccacaatctaaatccggtttaaacgcagtcacgattccatcattgatgatgtcttatatcacacacatagattaggccttagggtatcaaatagtgttttaggtgagaaaagcagttgtcagattttgatttttaagaatgcaatcatttgacttttagtttgacttccttttggttcttcttagccactctttctcatattctacacgtgctcattaacgttccaaagtcaataaaaaatcacgaagccaacaataaaatgtgcaacaaataatattaaacatgttagacagacgaaagagaattattctttatacgtatttaacataatgtgccttgtcggttaccaaacaaaataaaatatggcttgttagtggtcggtaatatgtaacacgttgtgtgtttgttgtccttgtcaaaccagcaatgctgcttaatttatttagataggaacccaagtttaaagaagactttttttttggtcaagtaagaaaatgtcaaaacctctgaaactttctttattttgtttataaatacattactccatgaatacgttacaaagatcttaatctcacaagtctcacattttctaggtggaccaaccaaaacccaaaatctttaattccctctatagtgctcttttctcttttcgaaatacaaccgtaaaaacatgaagagagaccggtccgattacgaagaatccatgaagcatatagacatagtagaaagtctaatgatgttatctcgaagtttcgtggtcaaacaaatcgatgtaaagcaatctaccggaagcaaaacgaaccataataaccacttcgaatgcaaaacgtgtaaccggaaatttgattccttccaagctcttggaggtcatagagctagccacaagaaacctaagctgatcgttgaccaagaacaggtgaagcatcgtaacaaagagaatgatatgcataagtgtacaatttgcgatcaaatgtttgggaccggtcaagctctaggcggtcacatgagaaagcataggacgagcatgataaccgagcaatcgattgtcccttctgtggtttattccagaccggtttttaatcgttgcagtagcagcaaggagatcttggacttaaatctaactccattggaaaatgatcttgtgttaatctttgggaagaatttggttccacaaattgatttgaagtttgtgaattagtagggttttaaacctttctctgtacttttgttgttgtttttttctctcttgctacacattatttcattctttccgtcatgtatgcatacacaatttgtttgaataaaaggtttcaattcttgcaatgagtgataaaacattaatagttgaaagtttgaaacagaaccattctcgaatgtatacatagaatccaatatcattggtgtgtgagtgagataaactgatattatcataagtcataatctgatgtcagagaatccattccagaaatatggaatacgaattgtgtccttcacagtcacactataccattagggaaagagagaatcttaaaagaatacgtagaaacaccatctcatatagaagaaaagcaaaagaagattgatttcctttttcattttttctttccaaataccatttctctttcactagccagattctctcctttgacaggcgtcgtggacccaatttttatgtgccgcaacatgctgatttctgagtagcttgagatgttcccgcaccttggtcggattggttgattttgattgtttgcggctacaaaaatgataagaaattcgatgacgttagtaaggttgatacacatactgaaatgtgatttttaccacaattgcaatgtatgaatgatgacagtggaaattaattctatagctcaaacgaacctcagctcgtgcatcggtatctgcaagtctttgcttaatgtctttagcaatagagaagaaaacttcctcaacgtttaagttagtcttggcactctgcaattagcaaactcatcaaagttaaccatttaaaaagaattagacctttccctatatctattgaaatgtaacaaaacatagacaacaacttacagtctcgaaaaacttcattccatattcatctgcaagagcttggcccttagattttggcacagcctggaaaaacaaagcaaatcggtgtattagccaaatagaaacatataatatttaaacaggacgaagataggagggagggtaaaagaagagactcttttgctttcatccatatctgctttgttcccaactagaatcttgttgacactatcagaagcatgctgctcaatgttacggatccaattcctgatgtctggaattgaagaaaacaaaggatgaaaaagaacaaattagttgagtagaaaataataaagctagcaaatggaaaaatataaagtttagaaccgttgcaagagcttgttgggtggcataaggactgcaagtaaaaagtaaagagagtacttactgttgaaagatgattcatcagtcacatcatacacaagcaaaatccccatggctccacggtagtacgctgcaataagaacaaactactcaggtgtattccagcgaggaaggcaaagatgcataaataacagcaaaaagagaaaacgaaaagcaagatcgaaaacacaccagttgtgattgtgcggaaccgctcctgtccggcagtatcccagatttgcagcttaattctcttcccatcgagctcaatagtccgtatcttaaaatcaatcctgtcaaaaacaaaaagcaacttgagtaagaacagtgaactacatagaggacgtgataacacagtgtcattgcatgaagacatcatacccaatagttgtaatgaaactggtggtaaacgagccatctgagaaacgtaagagaaggcaactcttaccaacacctggtacatgaaagaaagcaaaagtcagataaaacagagacattagaataatccactggaacatagtgaaacacttacttacaacaatcaacaaaggaatattcaaatcaatttggctaaagcatttgcggcattaacatctagagaatataattaaatagctacagcattcatttgtgattctcctccatcctaataccaaactaagaagactatgaacatcatatgctcacaattgttgaaatgagatccaaatctgagtaagatgtgttactcaaatcactgttgtctcaagatccttcaaacaaaacttaaattgtaatcaacaacaacaaaaatcgagagaatcaatcaacaaaaagatagagattgaataaaatgcagggaacaaaaggtagtattacgatctgaatgatatagaaacctaccgctgtctccgatcagcagaagtttaatgaggtaatcgtaatcagcacgagctctagcaggaggagcagccatttcttaacaaaatcaagtaatttccgagaaacggatcactggtaagcaaagagagcaaaaactggagacaaaatttaaatcgagaatcaattgtgtagaacctaaaaatcgaaagaaggaagtaccaaatctactcggggaagatagatcgtcggaagcaagcaagacagtaaccagacggccgttgaatttttttcttcccccgattggcttttttcggagattcagaagttttttttttttttttggttagagagaagagggagaaggagagggaatggatctggaccgttggatcttgttcgtggagatctgtgttggtccggcgcgtggtcttcggttacggtttgataaatttcgaaccatgggccttgggctagttttatttttgtgtgctaaatttatgatttggtgtccactaaatgtttagtttattcttactgatccaacccaacaggttacagaattgatgaagtatattcatacagtatatgtatttttctatatttcgttctgagttgcgttgcgattaagctctgggaaaaaaaaagttgtttcaatcccttcacttgtaaataaactcaattatttaactccaaggggacgcaaaggttaggcaaaataataataataataataagagttaggcaaaaagagagcgattgacaaattgaggaaatttgaatatattgtcgtcggtgttaagcaaataatcatccaaagaataaagcgtggataggaatctacaatgatcctacgtagcatctaatgtactgcatgagcattcgtttactcaaccccatccaccgatcatccgctgcggacaagtccacatcttcacttcttcacgaccaatgaggtaatgccacgacgaaagcctttcctaaaattacacgatccatttccttttctaaatggatacgaagagtgtttccattgacattaaaggaaagctaactttacttaaaatatcgtccttgaggtaacaaaaaagtttaagcccctatactgtcttatttaatgttttttttttactcttacactatttagttctatgttaatccaaatttatccaattatttccgatatctaactattatccaaaaaaattagggaatgacacgacacgacgtaagcctttcctaaattatacgatctagtttccttttctaaatggatacgaagagtgattccattgacattaaaggaaaaagttaaagcatacattctcagatttgttttgaatgtagactgcaattattacgttaatgtgatcgtcttattaatgcttttaactccaatttacaatgagattcatgtttatccaattttatcccaatctcattaaactcttaccatacaaaaagtcagaaagattatccaaaaccttccgatatgaaaatggtaattatttgaaatgcacgtgtatatttatcataaaaattaatcataaaacggtgcttacggtgatggtaattggtgacttgtatcaatcaatgccagtaaccgattataatacgagttcaaataccaaaaaaaaaaagagctgtaaacaacaaaaatccatataatatctaatacttttaaaagtataaatctaataatttaaaataataataagttagtaatttattttaaactcctaatatcaaaatagtatagaaatcctatactatcataggaatcctaaaagtataaattattttaaattctactaatttaatagttaccagctgaaaaaaaaaataaaaaaaataaaaaaataatagttaccaaaattactatcatagacaatccatgcatttttgcatgaatcctaatactatataaaatacgataaacacccatatttatcattttacacatctttttgtttgaattatccatatacattatgtatagaaagaaaataaaaacgaatattcacttgacagattaacatatgcttttcttttgattgcagtttgtaatccaccgacagagaaattgcgatgtcataaatctgaacacgaattttcggtgcactcgccaacacctgatctcaactctctccagcatattccccaaattaacagtagctaacggagacttaacgtggactcctcgcaatccgagtcactttaacgtgtatcagacagccaaaccttacgttgaccccaccgccgttaggaattccgtctatgtctctttttccatcatccaataaaatcttgccacattgacactttcgggtccggacatattccaaaattaaagagaatttaatttattgttttccttccagaaaaatattaatattctttctaaactaaaaaatggagtcttcaaatagcacagaagcagagacatagagcgggaacgcgtttagtcacagctttcttctcctttagcttttctctctacacttgcttctctctctctctcctttgggttatccttcttgagatctgtgcttgcgtttcttcttcattcgacgacactttatctcgggagatttcagatttgtcgatttgttcaggtacggatttcgaaatgttctttcaatcggatttgttcttcctcggaaggtttctagggttttgggattgggtgtctttaatctgtttgcataagccatgaacgagtttttttgttcccccgagagatctttgtgacttgtagatctgagttgggttccaaaatattcaatctttgtgatgtatatctacatttttagattatcaaactccattaaagagaaaatctttgctcgtttctcttaaggcccattgctttttatctgaagatgatttcaagagagtgccctgtttttttgtataaataaaattttgatcttttgctcgctttatacacatgtgggaacggttttgtcggtggagacatttatggattcgtgaactgctgcaaaaattatgcgtttcttggacgtttctgtaactttctctttattagattttgtatcttgtgtctctgtgtccaccattgcgttgtgtgtattcaattgatttccccaggtgttgaagattgttatttatatatttaacttattttatgcacagagatctttagtataattcatgaaaatatggttttatcttccatgatctaggggaactaaaacatttgtaaagtttgagcccatattttgtgtttgttgcttttcagagatgcatatattatggttgttgttctgtttatgaattgttatgtgcattgttttgcagcaatggcgccaccgattgaggtttctaccaaaagctacgttgagaaacatgtttcacttcctactcttaatgagaggatactttcgtccatgagtcacagatcagtagctgcacacccatggcatgatctcgagataggtaagctatacgtaaaggtttctttttcttttttttggctctaagatcatttcattgttttttagtaataactcttataccttttttgcttcgcattcctttgtttacaggacctgaagccccaattatcttcaattgtgtaagtgttttgctaaagctctaaggattgaaaatatttaattatattgtcacaaaactgccattatgcgtattcggagatgctgcagttgtttactatttctacagaatttacatatttgtagcattcactcaaagaaaattaaaacattcattggctatatatcttgaaacctgaattgagtctgctgtagcatatgaaatgatgttcatcgcctgattaggaaaccattttatgggtttaatctttgagatattgttgtgggaatcattaaccaagcatacggaggcattattacaggtggttgagataggaaaagggagcaaggtgaaatatgaactcgacaaaactacgggtctcattaaggtataaatttgattgcattaactttcttcgctgtccctttcattattagaggtacgattgtctaaactttacacatattctcaggtcgaccgtattctttactcatctgtcgtatacccacacaactatgggttcattccgcgtaccctttgtgaggacagtgaccctattgatgttcttgtcattatgcaggtaacatattttttcatacaattttgagaacctgcataattcattacataatgtttcttgttctattttgatttgtgcatctgataagctttgaagaagttcaagcgctcaactcttagctatagactctactttataactgtgtagcttaggaatgaatgtagcagatgagaaatgttgccagtcagttatcgagcagttagtggctgctaggcttataaaggtgtctcagcatattgtttagagtgtggattttctagtgtttactctggaatttaaaacctcttattaatcaatcaagtctataagcatcatcagcatctcagtctgtcttatttgactggtagaaaacacatctcatgtgaatcttgttgaatattttctacaggaaccggtgatcccaggatgctttcttcgggccaaagctattggtctgatgccaatgattgatcaggttagatattcaacgtacttgtcatattagtacttataaaagtaacagagattgaaactagaagctctttctgcttgaatagggtgagaaagacgacaagatcattgctgtctgcgctgacgatccagagtatcgccattacaacgacatcagtgagcttccgcctcatcgtatggctgagatccgccgtttctttgaagactgtgagtgttcttttcttacaaacttttggttggttaaggatgatatgaggctcatactcttgtaatcttgttgcagataagaaaaacgagaacaaggaagtagccgttaacgacttccttccggcaactgcagcctacgacgcagttcagcattccatgtaagtagccttcatgaaacttactgttatttacttcatatattatgaccttgtaaatagccgcaatttgtttatatcaaagaataactaactaatcaaattgggacaactcttttgtgtcatgtagggatctctatgcagactacgtcgtggagaacctaagacgttgaatcaccacctcaagcaatggaatgaaagctcacaactgcattattcacaaatataaatatacatataaatgtcaggcttctcaaaggatatatttgttgtgtatgtcctctgatgaatccggtagatgatgccgataattcttttttttttttgtcgtatgaaaccgataatcaaagactaaaacagggatttttctcatttgtggtcatcactttttaaattttggtgtcatttctcatcttaatcaatttgtttttgagttttattcttctattagatcttttatacatcaaagaatagatgaagattcctccctaaaaccttatagtatgtcatttattcacaatatgttatacgtgttaattttctctcttttagtatactctttttttttctttcagattccatcccaagttgcttaaattttgttaaaaccaactaaattccatagttcaatttacaaatctgtgatcagatgctatctaaatgaatattaccattttagcccttaccttttctgaaatttaccacgtttacctcaatgaaccgtcatcgcaaaaccaaaaaccctttcctatccctaaaacccgagagagcatcttcttctcctcttagggtagaagaaggacgaaaatcggaggaggaagaagaagatcgattcgatttgtgatcaacgatgagctccttcaatggaaacagcaacatcgacaacctcctaatccaaaccctacttggacgtctccaaattcgtccccctaactctcatttcctctctcaatccctagacgacctcctcttcaaatccgacgacagcgacggcgatgatgacggagaaggtcagaccagtctcgacagagaagaagctaggcttgagaaagagctaatccgagtcatcgtctctggtcgaagcgattctctcaagccgaattcaggtcaagccgtgacagtcaacgaacaccacatctgcgttgggtttcatgaggatgaggaatcggattatcgtgtttgggagtggcatggtcatatcatgttgtttgatgaagagaatgggtacacgcctgagtatatctacgggaattacttcgagaggttgcctgtgaagcttcctaataaccgccgtgtggagaaggagaagaagaaggagatgaaagaagaggaggtggagaatttggggcttagagagttgatcgatggtggtgacgctgctcctggtaggattcttcataggaacaacatcaacatcggttcctcaaggtttgtttcttacaactccttttaaactttctatcattctgtgttgctttcgggatgatttagttgttcattgatctagggttggctaatcaaagttttaggtcatgtattagagtatgtattcagtgagaaatataacaatggctcatatgttttggatgatttttgctgttagcgaattctgttttgaaatttgattcgctcatggtgaagcctttagtttgcttttacagtttctttttcgttgcaagacaataagttgatgaaaagagtttggaaaatgatagtttttgatcattgccagtagtgaattcagcacttgctgtttcctgaatgaagttacaggttaggccaatgtgtggttgtggattgtggtcattgcatttctgtctcgaaataacacatggtcgttaaatacgatcgattaattctcctcaattcatattagatagttgtttcccatatatgtatgataaaactgcatgttcttacaatgctttttgttaacttttttaccttgctctaggccttcaatgctgttttggacactcgatttagttcacaatgtgactagtgagacttcgtcgatctccaaatcaattgctttcatatacagttcactatattagtcagggattttcatgccaagaatattcatttttacggtgtccacaaatattgatatagaatgttgtttaaatgttcatatgatgaccacatctagatcttccgatatccatttacattacttaatgagagttctaagacgatgaattttaagcttgtggtgtgataatctactcaatagtattagtaatgcttgatcttactcttgccttttcatattctgttcggatatccatcctcttccaagtatctattagattattctcttgtttcactttagattccaactttaacttgattatcttgcggttacatactcaaaatgtttagaatcgatcactgaacttacgtggttcatcgtgaactggcagggtctaagttcctaagagcgtcttggtagggagaggtcacattgttcgggaagatttcagatgtgtgaacaactcgcgacaacaaaacataaggtgctggtgggtctacgggttctattccgttttatttaaaccgggaaatccatgggtgaatctgttttctttaagaaattcatctgaagttgtttctgaaccaaatttacaatacatgttaatgaagagagaaaagattacaatgcatggtcatcgaactcggaagctttcaagtttccccatgtttgtttattttgtgttcttaaatcagaatcatatgttttgctcattttacaattctgctttcgataacgaaatttaattgaatcgttttcaaatctcgagtacttccaatgaagatttcaccttttttttttattggtgaatagtatgtattatatcggatttaaaatcacgttgtgtaatataatgaggaaagtcgtacaaactaccaaactaaatgtacggtaagaactgggaagcacatgtgttgcacacgtacccaatacccatggtagaatgttgttattcattattgttttaaaataatatttaagataataattttttggaatttttagttatattaagactttgtaaaaattaaatctttaattattacaaataaattgatttgatatttgtaacgtagatattattaatcttattaagtttgattttacatatttaaacgtaaaaatgaagaaaaaggtatttttccaaatttactctatttataatctatgtattaaatttatatgcttaattataactttttaataatataatgcttaatgttataaatatatgtgtgtgaacacttctaatacgtaccactttctaaaattctttaaaaatcgttttgatatgcaaaagttctacaaaaattcgcttaaataacaatttcctcttctttaactcttactcttcatttgttgccgtgagttttcaccattcagaatcatagtcattcacgaaatattctcatatatatttttttttgttaaaaagaaatgtcaagtgtagaaataaaatgaaaaaagaaataagatattagagaaatacaaagattgaaaagcgatgtcttcagaaaatagatgttgaaagcaaaacaatgtttgcagacataaagtatattcggttgtgcaatgaaacaatgatgtagacaaaaaaaaacagtcctatcaagcattgattttcttaaccactaaattcaaaaaagtatgcaattttgatccacacacccttagcttaaattaaatcgtcacattttttttcaactgtcgaaactgaatcatgattctaagaacaacatcgtcattataacactctttagaatcttaatcaaaaaattaattgtgtaatatatagaatgtacatgtatccaagcaagggcaacaacattatgaggttcacttgcccgtgatgaatgggtgagctaatgcctgtgacactgtaagtctcttttgaggatcaagtgtgaaaattttgtccaaaagattcctgaaatgaaccaacaccttgggatcttcatcctcataacgtcgtctaattactgaacctaaatcttttggctttacgttgaccattattctccttattgtctttccagtaacactatcctcctctgtagcatagaagcataagtccttatcaaagtgttgatcgataaatgctcctttgcgaagcatctttttagggaagggacctttcagttccatatgcaggcgtaacatatcattgtttgtggagccagggaacataattttcccgctataaagctcatacagacaacaaccaactgaccaaatatctaacggatggtcgtagggtagtccaagaatgatttctggagctctgtagaaacgactaacaagatatggtgtaacttggttttcaccagcaaacattgcactaccaaaatcacaaagctttaacatgtttcttccctcattcattagtatgttatcaggctttatatcgcagtgaagaaccccacagttcttgagatgtttaagggatatgaataactgctcagcatacactctaacatcatatagttttagaccaatgttgacaccaatcttcttcacaacttcacggagattcagatgaagagactcaaacaccaagcaaaggtggttcctatattcaaaagttgaaagaagacggacgcagtggtgcttattctctgggtcagagcaaactagcttcttcaatatccgaatctcagcctggccagccttatgcattgtctcatttttccgaataatttttatagccacttcctcaggttcacctagctcaggttttgtgtcttttgcacgcaccacggtagagaatacacctttcccatgagtagccatgatttcatatctatcatcaagtagttcaccaagctgataactgtaataaccttctgcatcatcccaattatcattgagtccactccttacaaaaggaacaagtgcattccctttccgagtaccatcagctagaggagactccccaaagatatcatcactgaacatgtcactctttgggctgcctgcggaagctagtgtcatatctgagtctgatatcacaagccgtgcaggtgtttccccaactgctgaagatagcttggcgacttcaccatctacggcctcagtatccaacccagctttagcttgaacatctgccacagtagaggactgctccaactttttcttatatttctccaatatggcttgcgtaatcctcttgctttcctcgattcttttcatctctgcagcttcttgttcttcaactccccaaacaacatcttcaccgtcatcatcattatcaacttcagacctttcaacgttgccctgagtttcaccgttaggtttatggctttttaaagaatctaagtcatcttctgcatcatgcctaacttccccatatccatcaccaccacttttatagatctcctgatcactctggtcttctcttcttcctctatccctatcttgatccttacgtctctctctttcattctccctcccagtctctctactactagacctagctttatctctactactcctacctctgtagttgtctctattgctttctctatcaatgcttcccttcttcttcaaattctccccttcctccaaatcaagttcaccatcgttaccaggattccccaaaaatggataaacattcttttcattgccgtcctcatcaagatgatgactgtgtcgatgcttgtgatgatggtgcttgtgccgcttggaagatttaacgacttcgtcggaaggagaatacgacctacggtgtttgcggtggcttgattctactatcttatcgctcaccatcagatcgtcggaaaagatagacaatcgcaaaattagggttagggttcgattttctcccgcgctctctctgtctccgtgaacaacagacttccattaaaaaaattcacattatataaaaattacagtcggcatcggcaaattaaaaggaaatcagaatcgtctatttaaaaaaacaaagggcccaggcccattaataataaatgattaagaggatagagccatcatgtccgttgattattcgaaacctttccgatggatggatgacacgtcatcgatccgcaagaaactcgggtaaccaatgaaagccagcagaagcctctatataaacaaatgtctcctcagtttttccatcagacgcatctttcaattgtcaagtgattgtatttaaccacaatttcttctcatctctaaagtcagcatcaatggctccgaaagcggcagagaagaaaccggctgggaagaagccagcagaaaaagctccggcagagaaattaccaaaggcggagaagaagatcaccaaggaaggtggaagcgaaaagaagaagaagaaatcgaagaagaacatcgagacgtacaagatctacatcttcaaggttctgaaacaagttcatcctgatatcggaatctccgggaaagcgatggggatcatgaacagtttcatcaacgacatcttcgagaaactagctcaggaatcatcgcgattggctaggtacaacaagaaaccgacgatcacttctcgggaaattcagacggcggtgagacttgtgttgcctggagagctctcgaaacacgctgtttctgaaggcactaaggcggttactaaattcactagctcgtagggtttatatctcttaattctctttccgcctttcgaatcgtttaggtgttatcgctttcttctacatctttggtggtaaatctttgaatgaaaagtttcctttgttaatgaatatcgttttcttcataagaacaaaaaattatttgatcggtgatcaatatcttcttccgtttctgagggttttttggcctttttttctatccataactcttttggttcttcacgattccactaatttggtggggagcaacactagttatattttgcagagatttgtgggcacaatggtaaatcatatacttgagtaattatgttaaagaatgtttcactttaacaaaatcatactgatccatttggttttatcttaatcccttgatttaatcacttcatggtgatttctaactgtgtttagtgatgacgatgttgatgattgatgtttaaggttttcacttttcagtgaacaaacgttacaactgggcctatttatcattcgtgacccattttttccctcgtgatcgggctctagcgggaaaaattcagacacataaaataagagtattaaacacgagacacgtgtatatttctgattcgctccgagtaaggtggccacgtcttcgtctccctagttgacctttctttgcatttctatcttaatataaaaaaaactcgtttgatccatccgtcttctctcagattagctttttaacatcttggctgggtttcgtgtgatttcgttttggatatggttgttcggattcttgttaccatgattcggctatagtgtttgtcgcctctgattgtctcaagcatcgttctttactgatttttagatagctctgagatctgtctctgcgattcgtcggatttgaattcgtttttttttttgggtagctcttggatttcttcttctagggtttccaagaggatagagaaaatgcgggtgtcctctgagatactccttctttctttggttccggcgttgactttttatcattctggtttaagttctaatcgtttgaaacctcttcaaaagagtgattggcgtggtaatcttagttaaacaacaatttctctgtttttttgtttctccgatctcttcagatcttttcaattttctcttcggtttggtttgttttcacgcatttcctagctcggagtaagctaatcgaagaaaacaagcttgttattgatcgatctttcggtttttgttttgacgttttgtgtgaacgaggtaatttggctatatgattttttggctaaagtgttgtttgagctagagttctcttgttaatggtatttgaatttgtgtttgttgcagttacttttggatatgagctctgtctgtggtgggttggatttcaaagatgcagagagcagctctgcttccagtcccattatatgttctactggcgtaaagcatatctcttgtgttggatctgatgatgctcaagagtctgatggtgatgatagtggttatatacaccaaactgtgattgaagaatccaaagacaaggcgatcagcgaacccatccctgagtctttacctctcaattctttggatgatgaaagtgaagataagaaccttgctactgcattgcaagacatgttctctgagagtgtaagtgaccctatcttatttcataacactggtcgctatctttatagttgttgcgttttttctgttctattgtcttttgttctttctcctgtttagaatacggtgtggtctgtgctgatgtcaagtttctatctttgatcacatatataattgaacttagatgttttgcgtagctctaggcttgtgatcgtggctgtttcaatcatatgtcggtagttgcttacaacatctagaaccaaccttttagtctttagtggtagatatacaagaatgcgaaggagtaacattacaaatcatccctggccaaagcaagaacatagcttaggttttatgatccatgaaataatacaaatccttagattttggctgtgtgatatatatatatatcaatgtttggtgcttataaatatcttttctgtttatgatatatgtagtagagaaatgctgtgtttatgttggctgcttctgatttttgttgttttttgtaatccaacaacagatgagtgtggttactctgattcctgccattaaaggtggtcgagagaagcatggcaagtcactcgagaagctcagtgtgtcatgggctgaagatgtgtatgatcctcctccctccattgtctctcacacaagaagcaagaaacagcaaccgcagaaatcaaagagcaaagacaacctgaagaagaatggaaagaaaggacaaaagggaagcagcaattcccgcagcagcaaagacaagaagcagatttcttcacgcagcagcaaatacagtcgtgataagtttgattggacaacacaaatgtctgttctagctgcatcttcttgaatctgtgtggtatgaccaaggctcttgcgtcttccttgctcttgtctctctctctctctctttcttgtttataaataaaagatttgaagtgaaaacttttctcgagtttcagaacgactattgttgttggtacggaattgattttgtttttactcaatttaccacttttattgtgaagtttttccctctctacttgttcctttatctataatatagctgataattttgcaaaaagttgatactgctaatttagtagagcaaattggatcgtagttcgtagatttcaacccttaatttgatggaaagtgcacaagaaataatatatcagttcaagcaaaaccatacacagtacagaaaggaacaacattagtattatatgccgacgactttactatatttgcttctttttacttctttcctttacaaaatatttcactagatctgaaacctctcctgtgtcaactctaaattctaatatcgtctttgttaagggcttgtacaaaaaataacagaggtacacaagaaatgatccttctgcaaaaagaaaacaaagagtgggtttaaaaggggcaagagagcaaaaaaaggaaagatcccaaatcccaaaatccggatgaagcttcaaaaaatcttccatgaaagatgatatcagatgattgaagttgattctgaaaaactcggtactttcttctcgagcatcgatgttcccttgaagattgttagttgcacttctctctggtacctctgtaactgtaaacacaaacaccattgttaatcctcttttaaccatttttgtaaccagactgcgcaaccattaaagatttgatcaagtcaaaagattaatcatgaaagcatttgccaggaaatgtcccaggccaaactttacgtactcgatgttcagtcatctttgtgaatccaaatttatttgtccagatagactcagcttcttcagctgctgggagaagcaagttctcaacattcagagaggaaagaagattctcaacgcaagcaaacagcccttgaaagtagccctatagaaccattaaacaaattggttttgtcacaagttataaaacaaacaagcgaatccgacacagcaaagaaacatgggatgtacaaaagcttacccttccctgatactctcggcttgtagctacaataggaagttctgcaactttctgaccaaatatcctaagcagcgcggcagaaacaactagggaactaaaaacgcagcaaaaaacatttagaaagattgagagatggtaaaacaacaatacagagagaaagataaatgcatcaagaacaccagacatacttcaccatcaggaccaagcagtacattcctccaaactcctggccagatatgtttctcctgcaaacatgttggaagaattaccaggatgatcaattactattaacatttgaatgaaaaaggaacttgaatctgagtttatcatagtacagcttacccatagaccatgacaggaatgagatcacgaccagactttgccacaatgggatcaaaacactcctgaaaagtaaactcatttgctatacatgtgtttataaaataaattcgctgtacaatgtacatgtgtgtaagaaataaatttacaagccagataaaactcaaaatgatgtgagcacatttataaattgaggcataccctgaaaatagtagctgctcgtgaaagtaagggtagatgctctgggtatcgactttttccactaagcatcctccactccacagtatttccattgtcaatatatattcctttttctctgtactttctgcttatcgtgtctaacaaaagcgtgggaatagtttgtggcccacatgaagcagagctttgaagaaccctgtgaatcctgctgcagtcactacagcagaaccatttatcttgggggattccctacagcaatcaggaaagaaatgagacaggtttaatgaacatgtgaacacagaccacctatattacatgacttactttcaaatcacaaagctcattttccctgagacaaccgacgtggtactctttctcgcacttcaagagcaaagaggaaaaatgaccattagacaagaaagacgtgggtaaagaaaatctggaataagaaaccagaaacaacaatacctggtcacagagaataactgtcctatcatcaaatttcccaatgctaaaatcatgcgacctatcagaaatgggggataatgaataagcagagtggagtacaagtatattcgcattcaaattaaaataggtatacaaccaacctgcagaacacgcaaccaccaatttcgctttctggtgctttaacaactcttgtcagtcttataactatgggttttaaattgggatcactagcagtggctattttacaagaggtaggtccatcattgcagcttgaacagtaccaagtaccttcaggcattgattgaaatttcaagcatgctgcatatgaaaagggtcaccaagtattagaaccggagaacaaccttagagctaataccaaaacaatgctaattttgcaaatcatctttaagaatttatcttagaacttaaatggaaagaggcaaatatcagtaattcctttttcattatgcttaggaaaattttcttgaaatatgtgctcaagagattaagttgtagattcgccatagtaagtagaatgagcgagcaagtttactactatcctttagcagtaacgaatacacacctgtatgaaatgcttgaggacatccagcacaaagtagcaaatctccaccattgccacaaatagaacacatgtcatcactgtcaccagttgtaatgacatggcccccatccgccaatgacacagctatatcatgcaatgacaatccggaagatatgtggattcgacgataactgcaacagaaacagaaacttcagatatgtcttacaacattagtgcaaaaacacatcgtaactagataactcacggttgtcgtctaccagccattccagcatgtgcttcgaattgtgaaggactaatctgtggttaagaaacacgataaatatctgtcattatacttggaaaagaaaatgagtctaacggccaatttacatagtcactgcatccagcatgttacctttgtgtcgcagcagctacatactataccacttccttgcttgtaaccctgcagtagtttctgcgagaaaaacaagtgtcagcaaaagcagtcaaacttaaatttgcaacaagaataaacagagttactcaattaagcccacaaataacagacctgtgatttcacatagtaagccaattcagtcccatccggtagcccatttggcaaaaacagcaaccgatgtaaatcattgtccctataaagatatgattgcaattatttatcatcaccctttagagcatgaatgtggacaaaagacacccaaataatgagaatcacaaaagcaatacaaacctcttccatttaccgcctccagaaactttcttatggcaacccataccaaacatatgagaggtaagcctacagtattaacgaccaagtaaattttctatgttccttaaacaaattgtcataggtaatactcgagtatcaatatctaagcaagaaaacttgaggaccgtacttcttagcttttggcttatgtgcgtgtcgagtgtcctttgtacagattttctctctaaaataattgtcctctggaaaacatggagtagagctttgactctcatcaagagaccaaccagaaccaggataactgcaactttcacaactataacttagaccatgtcaaccttcttacaaaataaacaactagataacaaaggatccaagtgtcagctgaatgcctgaatgtcatcttcaattacaaatctttggagatttcagatcaagtaacaacacaagtaggaggtcaaagtacctaacaagtgattgaaacgaatgatccatgatatggttgctatcatcttcagtcatattcttatcttgctggaaacttcctgaagaacaaaatagcaagtcagctatgtccatcagaaagtaaaagaatacacattacaatccagggaaagcacttttaaaaatgcagggagatttccacgcaaacaatgcagactaaatccaccaagcaactaagatacctttccaagcctgaaaaccctcctcgctcagagcagaaccagccactttccttatcacctcctccaaaacgtcagggggagcaatcctcagctcttgaattacgttataaaccggccgtccattctccagatatatgtgattattagggtgttttgtttttccaccagcatgccgctcgaactcatatgcacctagaaccttcccacaaaacgaaatatgacaaagttaaaaatttgagaaattgcacttaagtacaaccccacaagaaaactatgaagaatgacaaacttactttcgagaaatcgcacgcagtacagccacacaaatacccacccgagtggattatcccttgaagctctctctaatgaccacaaaaagtaacataagaacatatatatgagaatatccaaactaatagcaggagaaaccacaaagaacagaaacttacagcagctgaggttgaaaggtacttcacccgagcaccatcgagaatccccgtccccaatagcttcttcacattagataggaagttggtagagtcaatcttcttcaacattttcacacctaaagttgaagaagctacattggaaggataaccctcccaagtatgctcttgaatcatgggcaaatcacagaaatcctcatttcgtttactgagcttaaatgtgattttcgttatcccagttgtgctaagatgctttggaatctccctttcgaaacttgacggtacagcatcactattagctagcgatgaacagtattcactgtgtttctcatcagttatagtctcataggaaccagaacaagacccgacacggtcaccagaactcgatttagccggattactagtgatatcgcgaaaactagaggcgttatccaccaccggagacgggactgggtttgatatctccgacttcatgtcatcatttgaaggttccttggtttgtctcttgttggaggaataaagctcttcttcgtctagattatcttgttcaaaacaaagacggtctctcttcaaatccttcttcgtttctgaattctctttcgcgaaacaaactgttgcttctcccattgtaaaatttctcaagaaattagcacttgtactgtgactgagattatctctgagatttgtaaggcttaagaaacaattcgaattccaagttttggggtacactgatattgcaaacccgatccgtaaaacacgtttgatggtcccaatccaaatcggagaagaaactctcttgtgtttgaggatttttatttttttccctcagaagaaatcgaaatggagaaatgtaccgatctagtaaccctaaaatttacatatggagatgattaaagtcgaaatattcacagagatagtggtaagaacaaaacggggtggaaaccctaagctcgaccagaatcgaaagttgggaagagaactttgtggatctaagatttgcagaaaacgattagagaaatcgatttcgaaagaaatccgaacaaggtaagagaagaggaaacgaattagggttagggtttccggaagtgagataagagagggaaaagagagaaaatagagggaacgtgtaacgcggcaacgaaccagaaggaagtaatgctttgtttagcggtccacatttaacttttaaatgagagagaagatgaccaactattttaaattaataaaacagattttgatggataatattacagatttttaaaatatcttattggtgggaaatttatttagcgggagaactgaaattttcgtttctagtgtaacgtgttgcgttggattgaggtgacgagttcgactctctacatcacacattcttttaaaaaaatcttaaatttacaaaacaactgtcctaatttttctgtttgtttttttttattggcttttttagccttcaaaatttaaaaggatcggctctgtttaaaataataagttatcattaacagtcattttttccattcatattggttaatgtaacttgagataatatcatgttttcagagaatatgtagacaacgtagtagcaaagtcactttagagtgactggaattgttctctctgtggctggaattaagtagattcgttggcaaatgtaacggaatctggtattagctatgaagaccaaaggtacatatctatgtagattaatgtataaaggtttttatttaataatgaaccctttctcacccttcttcaatgcatatttttgatgatagtaagaattagaggtatcagagaatgtagaatcctatgtggatatggtaggtatgatgatctcaaacgagaaaatcctaagagatgttacaagaggaaacaaaagagattagacctaagaagaagtttaaagcctgatatagtccatgaagtttggatggtcaaagagaggaacaagacctatgtaaagaaataagacaaaggttgcattctatacggtaaaacagagttaaggtgctagaagttgaaaaggaatttttgtttctaggatcttacattgttaacacgataaattattgtccatatgattgatattacctttttacctaaatagcgaaaataggtacaaagcatcaagaccaaatagaaatccatatccttaaagcttaagcttagctttagattagagacctatataataagaaatgctgatgctaaatatcaacgcttacaattataacaataatgagtatggtccctcgatggagttccacagttgtagcaaaaagccaacccacacctgccaaaatgtgtttaaaaagatatataaaaacaatgttttttaaaaacactcttgttaagaagaagaagatacatatatatacctgcacttcatgtataagcaaccctgagatttctcaatatagaatttgcaagaaggacatcttttccatttcttttgctttgccatcgtcgcaagcaaaatatcatctcttcctctctcgttcgccgctagcttctgaaactcctcgcaagtcatctccggatgccactgagtcccacactccacacacaccattctatgacaatgaggacactccgaatctttcatctttacttcactctcttctaagaaaaccaaagcagagcaatccttgtaaggacagtagaatttcttcgaacgcatcactactgcttcacacaaagcatcaccccaccgatcaaaaacctctttaggcaaaatctgacgacactgatctggctcgagccgaccagaacaaccagagacaggacattcgattgagagaatgttgtcttgtaatttagctgctatatatttcgaaacacagtcgttgcagtagaagtgagagcatccaccgatacgaaacgactcaattatggattttgaatcaacacatatctcacagtcgaaagtcgccgtctttgacgaagaagactgacccttttctctgtggattggtggtgcgaaacagaggattctgatatcatcgtcttcatcatcgtaaagatcaagatctatgtaaattggagattctgacttgattacggttttgtgaggagggtagacccagagacgttgaagtttccgatcacgatcgtaattctcaacggaaatagcatcacgctttgtggaaccacgtgcagagagaggaggagtggagaagatgaaacaatcggaattatcgccgtcgtcgtttacatctccgggaagatcaacgatcactgcgttaactgactgtgtcgccatttcaaaaatgattctaattaggtttcgtccacaatcagaattagggtttatgaatcacttactactttttgctcttttgcattgaatcactttccattttccaaagcgtctcactttttggcttactgctaaaaaacctaaatcgaatttttaataattgtccggttcacgaacgaaccggtcggttagcaaaaaattgtaatccttaaacccattttgttgcttcactctcatcatcttctctggaaactgaaaactatggctttctcttcatgtctcaaattctatccattttctatctctcaagctgtaaccctaactcatcattccttctctctcaatctaactcctccttcttctaccatctccttcgcttctcctcactcagcagctctctcctctaccgatgtcaagcttctcgactcactccgtagccagcctgatgattccgccgcacttcgtctctttaatctggcctctaagaagccaaatttctcacctgaacctgctctatacgaagagattctccttcggctaggtcggtctggttcgtttgatgacatgaagaaaattcttgaagacatgaagagttccagatgcgaaatgggtacttctactttcttgatattaatcgagagttatgctcagttcgaattgcaagatgagattttaagtgttgttgattggatgattgacgaattcgggttaaaacccgatacccatttttataaccggatgttgaatcttctcgttgatgggaatagtctgaaactcgttgagatttctcacgcgaagatgagtgtctgggggattaaaccagatgtatctacgtttaatgttttgatcaaagctttgtgtagagctcatcagcttagacctgcgattttgatgttggaggatatgcctagttacggtcttgttcctgatgagaagacatttacaacggttatgcaaggctatattgaagaaggggacttggatggagctttgaggattagggaacagatggttgagtttggttgttcatggtctaatgtgagtgttaatgttattgttcatggtttttgtaaggaagggagagtcgaagacgctctcaatttcattcaggagatgtctaatcaagacgggttttttccggatcagtacacgtttaatacgttagttaatggtttgtgtaaagcagggcatgtgaagcatgctattgagattatggatgtgatgcttcaagaagggtatgatccagatgtgtatacttataactcggtgatttcgggtttgtgtaagcttggagaggtgaaagaagcagtggaggttcttgatcagatgattactagagattgttctccgaacacggttacttacaacactttgatcagcacgttatgtaaagagaatcaggtcgaggaagctacggagcttgcccgtgttctcaccagcaaagggatccttcctgacgtttgtacatttaactctttgatccaaggtttgtgtttgactaggaatcaccgggttgcgatggagttgtttgaagagatgaggagcaaaggatgtgagcctgacgagttcacttacaatatgctgattgatagcttatgctccaaagggaagctagatgaagctctgaacatgcttaaacaaatggaattgagtggttgtgcacggagtgtgataacttacaacactttgattgatgggttttgcaaagccaacaagactagagaagccgaggagatatttgatgagatggaagtacatggagtttcaagaaactctgttacatacaacacactcatcgatgggctttgtaaaagcaggcgagtagaggacgcggctcagctcatggatcaaatgattatggaaggacagaaacctgacaagtacacatacaactcgcttttaacacatttctgcagaggaggtgacataaagaaagctgcggatatcgtgcaagccatgacctcaaatgggtgtgaaccagacattgtgacctatggaaccttgataagcggtttgtgtaaagctggtagagttgaagttgcaagtaagcttttgaggtcaattcagatgaaagggattaatttgacaccgcatgcttataatccggtgattcaagggttgtttagaaagaggaaaacaacagaagctataaatttgtttagagaaatgcttgaacagaatgaagctccaccagatgcagtatcctacagaatcgttttccgtgggctatgtaatggaggtggaccaatccgtgaagcagtggactttcttgttgagctgttagagaaaggatttgtacctgagttttcttctttgtacatgttggctgaaggtcttctcactttgtcaatggaagaaacactagtcaagttagtgaacatggtgatgcagaaagctagattctcggaggaagaggtttcaatggtgaaaggtttgcttaaaatcaggaaatttcaggacgctttggccactcttggcggcgtcttggacagtcgccagccgaggagaacctaccggtcaagatgatagatacctttagaaaaagtatcgttcccaatttcgtagaagatatgtatgatgttatgaatatgatttcctataaagttttggggtaattcatccatttaatactatgttcgaagaccaacatgcagaaacaaaacgacaatggagtgtgcggtgttaggtgttcctcattcgttgggtcatcctctctcgtccacttctagtctctatggtctctcgtccttactgtttgtatatgtattatgtaggctccgattgtttttggcattgatgctagcgttttcagattattgactataagagaaaaacctagacatgatctcttttattctccggttaacttggcagatttcagaccaacccggtcaaatcctgtggtcctatggtcagtccactatgcttcaataactatcctcggtcgtaatttcaaccacaaccacaagcgtcgtgtcctcaacaatatactgtatatgctatagtcattattgttggggtcagtggggttccgattctccactaaaacttttctggtataagtgtatgtttgttcaatcaagcagatcagtccacatatgtatcagtagatgacggtttcgtcactcgtagataaattatcattgccacttgtatcactacttccacatccactagtggattttgtatggatcacaccaaaacattctttgaacctactatatacttttaccctttatagaatagtgccaaaacaagataatttatgcgtttcgagaaccaaaacattatcacgctacgaacaacggaacaaggcaattttgagaaaaagaatgttcagttgtggttacagttgaagataaatttaaattgtgaaagactaaaaccgaaaatctttagcaaacaatcggctatggatcttgtacaaatacgttactccttaacacatgaagaaaagatatcaagaaaccgccaacttatgaagaaaaacgcagacctgtgggtatggatgaacatggttttaagatgaagaccattcttatcttctattcagaccacgatggtcccagccttaattaattatacacttctcaccggcattctgaatcacctatccgaagaaagatgaatataacgttactgctatatttaactgttaaagctacatgaccttaaaggttgcttacccttagagaaaacctccaccagtccaagcggtgtctgatttcccgttgtgaccagcagatttcttatcgcctgcactttggtaatgaccatcgaacccatcatctttggcatcatgatcatcccaaccagtccaaccatcatcatcattagaagcagatgacccctttggagctactgcttctgtcttcttattctcattctctccccaactatcccaagaatttgaattc

SEQ ID NO: 1082 - DNA, 112929 bp, Arabidopsis thaliana
gaattccaagttttggggtacactgatattgcaaacccgatccgtaaaacacgtttgatggtcccaatccaaatcggagaagaaactctcttgtgtttgaggatttttatttttttccctcagaagaaatcgaaatggagaaatgtaccgatctagtaaccctaaaatttacatatggagatgattaaagtcgaaatattcacagagatagtggtaagaacaaaacggggtggaaaccctaagctcgaccagaatcgaaagttgggaagagaactttgtggatctaagatttgcagaaaacgattagagaaatcgatttcgaaagaaatccgaacaaggtaagagaagaggaaacgaattagggttagggtttccggaagtgagataagagagggaaaagagagaaaatagagggaacgtgtaacgcggcaacgaaccagaaggaagtaatgctttgtttagcggtccacatttaacttttaaatgagagagaagatgaccaactattttaaattaataaaacagattttgatggataatattacagatttttaaaatatcttattggtgggaaatttatttagcgggagaactgaaattttcgtttctagtgtaacgtgttgcgttggattgaggtgacgagttcgactctctacatcacacattcttttaaaaaaatcttaaatttacaaaacaactgtcctaatttttctgtttgtttttttttattggcttttttagccttcaaaatttaaaaggatcggctctgtttaaaataataagttatcattaacagtcattttttccattcatattggttaatgtaacttgagataatatcatgttttcagagaatatgtagacaacgtagtagcaaagtcactttagagtgactggaattgttctctctgtggctggaattaagtagattcgttggcaaatgtaacggaatctggtattagctatgaagaccaaaggtacatatctatgtagattaatgtataaaggtttttatttaataatgaaccctttctcacccttcttcaatgcatatttttgatgatagtaagaattagaggtatcagagaatgtagaatcctatgtggatatggtaggtatgatgatctcaaacgagaaaatcctaagagatgttacaagaggaaacaaaagagattagacctaagaagaagtttaaagcctgatatagtccatgaagtttggatggtcaaagagaggaacaagacctatgtaaagaaataagacaaaggttgcattctatacggtaaaacagagttaaggtgctagaagttgaaaaggaatttttgtttctaggatcttacattgttaacacgataaattattgtccatatgattgatattacctttttacctaaatagcgaaaataggtacaaagcatcaagaccaaatagaaatccatatccttaaagcttaagcttagctttagattagagacctatataataagaaatgctgatgctaaatatcaacgcttacaattataacaataatgagtatggtccctcgatggagttccacagttgtagcaaaaagccaacccacacctgccaaaatgtgtttaaaaagatatataaaaacaatgttttttaaaaacactcttgttaagaagaagaagatacatatatatacctgcacttcatgtataagcaaccctgagatttctcaatatagaatttgcaagaaggacatcttttccatttcttttgctttgccatcgtcgcaagcaaaatatcatctcttcctctctcgttcgccgctagcttctgaaactcctcgcaagtcatctccggatgccactgagtcccacactccacacacaccattctatgacaatgaggacactccgaatctttcatctttacttcactctcttctaagaaaaccaaagcagagcaatccttgtaaggacagtagaatttcttcgaacgcatcactactgcttcacacaaagcatcaccccaccgatcaaaaacctctttaggcaaaatctgacgacactgatctggctcgagccgaccagaacaaccagagacaggacattcgattgagagaatgttgtcttgtaatttagctgctatatatttcgaaacacagtcgttgcagtagaagtgagagcatccaccgatacgaaacgactcaattatggattttgaatcaacacatatctcacagtcgaaagtcgccgtctttgacgaagaagactgacccttttctctgtggattggtggtgcgaaacagaggattctgatatcatcgtcttcatcatcgtaaagatcaagatctatgtaaattggagattctgacttgattacggttttgtgaggagggtagacccagagacgttgaagtttccgatcacgatcgtaattctcaacggaaatagcatcacgctttgtggaaccacgtgcagagagaggaggagtggagaagatgaaacaatcggaattatcgccgtcgtcgtttacatctccgggaagatcaacgatcactgcgttaactgactgtgtcgccatttcaaaaatgattctaattaggtttcgtccacaatcagaattagggtttatgaatcacttactactttttgctcttttgcattgaatcactttccattttccaaagcgtctcactttttggcttactgctaaaaaacctaaatcgaatttttaataattgtccggttcacgaacgaaccggtcggttagcaaaaaattgtaatccttaaacccattttgttgcttcactctcatcatcttctctggaaactgaaaactatggctttctcttcatgtctcaaattctatccattttctatctctcaagctgtaaccctaactcatcattccttctctctcaatctaactcctccttcttctaccatctccttcgcttctcctcactcagcagctctctcctctaccgatgtcaagcttctcgactcactccgtagccagcctgatgattccgccgcacttcgtctctttaatctggcctctaagaagccaaatttctcacctgaacctgctctatacgaagagattctccttcggctaggtcggtctggttcgtttgatgacatgaagaaaattcttgaagacatgaagagttccagatgcgaaatgggtacttctactttcttgatattaatcgagagttatgctcagttcgaattgcaagatgagattttaagtgttgttgattggatgattgacgaattcgggttaaaacccgatacccatttttataaccggatgttgaatcttctcgttgatgggaatagtctgaaactcgttgagatttctcacgcgaagatgagtgtctgggggattaaaccagatgtatctacgtttaatgttttgatcaaagctttgtgtagagctcatcagcttagacctgcgattttgatgttggaggatatgcctagttacggtcttgttcctgatgagaagacatttacaacggttatgcaaggctatattgaagaaggggacttggatggagctttgaggattagggaacagatggttgagtttggttgttcatggtctaatgtgagtgttaatgttattgttcatggtttttgtaaggaagggagagtcgaagacgctctcaatttcattcaggagatgtctaatcaagacgggttttttccggatcagtacacgtttaatacgttagttaatggtttgtgtaaagcagggcatgtgaagcatgctattgagattatggatgtgatgcttcaagaagggtatgatccagatgtgtatacttataactcggtgatttcgggtttgtgtaagcttggagaggtgaaagaagcagtggaggttcttgatcagatgattactagagattgttctccgaacacggttacttacaacactttgatcagcacgttatgtaaagagaatcaggtcgaggaagctacggagcttgcccgtgttctcaccagcaaagggatccttcctgacgtttgtacatttaactctttgatccaaggtttgtgtttgactaggaatcaccgggttgcgatggagttgtttgaagagatgaggagcaaaggatgtgagcctgacgagttcacttacaatatgctgattgatagcttatgctccaaagggaagctagatgaagctctgaacatgcttaaacaaatggaattgagtggttgtgcacggagtgtgataacttacaacactttgattgatgggttttgcaaagccaacaagactagagaagccgaggagatatttgatgagatggaagtacatggagtttcaagaaactctgttacatacaacacactcatcgatgggctttgtaaaagcaggcgagtagaggacgcggctcagctcatggatcaaatgattatggaaggacagaaacctgacaagtacacatacaactcgcttttaacacatttctgcagaggaggtgacataaagaaagctgcggatatcgtgcaagccatgacctcaaatgggtgtgaaccagacattgtgacctatggaaccttgataagcggtttgtgtaaagctggtagagttgaagttgcaagtaagcttttgaggtcaattcagatgaaagggattaatttgacaccgcatgcttataatccggtgattcaagggttgtttagaaagaggaaaacaacagaagctataaatttgtttagagaaatgcttgaacagaatgaagctccaccagatgcagtatcctacagaatcgttttccgtgggctatgtaatggaggtggaccaatccgtgaagcagtggactttcttgttgagctgttagagaaaggatttgtacctgagttttcttctttgtacatgttggctgaaggtcttctcactttgtcaatggaagaaacactagtcaagttagtgaacatggtgatgcagaaagctagattctcggaggaagaggtttcaatggtgaaaggtttgcttaaaatcaggaaatttcaggacgctttggccactcttggcggcgtcttggacagtcgccagccgaggagaacctaccggtcaagatgatagatacctttagaaaaagtatcgttcccaatttcgtagaagatatgtatgatgttatgaatatgatttcctataaagttttggggtaattcatccatttaatactatgttcgaagaccaacatgcagaaacaaaacgacaatggagtgtgcggtgttaggtgttcctcattcgttgggtcatcctctctcgtccacttctagtctctatggtctctcgtccttactgtttgtatatgtattatgtaggctccgattgtttttggcattgatgctagcgttttcagattattgactataagagaaaaacctagacatgatctcttttattctccggttaacttggcagatttcagaccaacccggtcaaatcctgtggtcctatggtcagtccactatgcttcaataactatcctcggtcgtaatttcaaccacaaccacaagcgtcgtgtcctcaacaatatactgtatatgctatagtcattattgttggggtcagtggggttccgattctccactaaaacttttctggtataagtgtatgtttgttcaatcaagcagatcagtccacatatgtatcagtagatgacggtttcgtcactcgtagataaattatcattgccacttgtatcactacttccacatccactagtggattttgtatggatcacaccaaaacattctttgaacctactatatacttttaccctttatagaatagtgccaaaacaagataatttatgcgtttcgagaaccaaaacattatcacgctacgaacaacggaacaaggcaattttgagaaaaagaatgttcagttgtggttacagttgaagataaatttaaattgtgaaagactaaaaccgaaaatctttagcaaacaatcggctatggatcttgtacaaatacgttactccttaacacatgaagaaaagatatcaagaaaccgccaacttatgaagaaaaacgcagacctgtgggtatggatgaacatggttttaagatgaagaccattcttatcttctattcagaccacgatggtcccagccttaattaattatacacttctcaccggcattctgaatcacctatccgaagaaagatgaatataacgttactgctatatttaactgttaaagctacatgaccttaaaggttgcttacccttagagaaaacctccaccagtccaagcggtgtctgatttcccgttgtgaccagcagatttcttatcgcctgcactttggtaatgaccatcgaacccatcatctttggcatcatgatcatcccaaccagtccaaccatcatcatcattagaagcagatgacccctttggagctactgcttctgtcttcttattctcattctctccccaactatcccaagaatttgaattctgcgagttgttgtaatgaccacttgtcgatgatgattgtggccttcctcctccaacagatgaattcgctgctttgttcccatttccaaagttctggtagtaaccattgccctcattttcactctgctgattccagcttgttgatccttctttagtaaactcttctaccttctgtgtcgccattgccattactcctttcatgattccccatgtcctatgtcctatctctgttgtcttattagcaactacatttacagtttcactcaccttgtgatcatacccaccttccttcacctgcaataaaatggtttcttatctgattttgactccacttttccaaaactctattgccagcagtattatggtaaacaagaattctacagagagcatctaagaattgtgctttctacagagttaaagattctcactagacgtgtcgttgaggcatcaagcaacgcagtaactagatatttcacaaactctatgcaaatcaagcagagagtacagatagttagttaccttggatgtgaactccttggttcctgtttgaacaacactagcagctgactgagctgcagatgcagcaaccagagacagtcttccaaaacccttagcaatttttaaacacgaatcaacacacaaaacgtaattcaccgaattcaaaaaggaattgcaaaacattcattcaattcacctgagaaacaacggagaaaacatcatcctgttgattatttctcggtggtggagccgagcttgatccgaatcctacatacttgccaccttgcgaaggaggaagaccttcaggcttagactcattctccgccattctcctcgcgaagaaactctctttcccagcggcagaagcctcaagctgcgatcgcgtgtagatatcctccgacgactttgacttcacatgtgcaccttctctatttcccgatgccctgaaatcattcgctgactgattccttctcatatcagatttgtaagaatcatcgttatcccaactatcccatcctccattgttattgttattgttgtttccgtaaccgccctgagccaacggaggcttcttattcgcttccttaacaactggcggatcattccatggtctaccttcagctaaagcttggatccggtcacgatacacagaagcagcgttcgaattgtacttggagataatatctgtctccttagcgattccgtattgcgcgaagaatttgttgagccgttcgttaccaccagcttccattttcttaatctggatcgcagaccatgaatccatggttacggatctgacgaaggatatgtgaacgcctaagcctcggtgtttcccggagcattccaaacacatgaagattccgtacgaaaccgacgcccattgaggattcttctgagcgcaatcgacacataccttgttttcaggctgagattggagagttcgtaattgtctcgtcgccgccatgtttcccggagctccgaacgatgatcaatccaacctgaatcagatctaatccaaatctcgcagacttgtgctgctcagattgatgcgtttttttttcttttccgttttttctcttcttcctaataaatgttcggggttttttttggtacgtgtctctggcacgtgagaggtttccggtagtttctcaaatggcccaaatgataattgtatttactatttagtccaaatatgaaattatatgtagacgatgcccaagatgcccaatcatggttatttatatgtagacgatcttacaattcttactcaagagctatctatatattgtagataaactacatcttcaactaaccactttaaccatgcattaagccgaagtttaagtactagatcaatttatttattgttatcatacatttgtgtctccgttaatacttagagaagactcactaacaattttggaaaccgtaatatcctctacatgagctttgttgtgttgttgaaccacaaggattgatggaatgatgtggttgatcgaagaggcgagcacgtctccgataggacctaactcaggatgttcagcttgacgctcagctaatgccgccacctcggccgacggtatcctccctcttccaaccactattagatcaaagtctttactctgtcctattgacagtatttcttcaatgatgttgtttggttccttttctttgtactccaccatttctttccatttgctcttgaagtcttccaatgccccttcgtctaattcctataattatttttccaagaaagaaagctatagttatatttgtcataactggtatataaacataggggatcaaaagagatttaccttttctttttctggatccacgttggttgttaaaaaggcatagttcttctccttgcctttagacggtgccggtcgtaaagtgacggcggtactcctcaacgtttctcttaccaaaaacctaataacggtaactttaacggccggatgctcagccattctcccgccgagctctatagactcacggtcatcaggcccaccaaagaaaatcacacaaaccctttcaaccacattcgacccatctaagctcaaagtttgggcctcaatggacccaagtccacggtctacaagaaccgccaccgaacacggcgcattcttcaaaaccctttggttaaccaatcgccaaccatgaccaacgttttccggtacgtttccatctcctcctccgtcttggtggtggtggctatgaccatgatcagcgttccatcgtttgtggaaaggtaaaatgatcattgtgaccctcttggtatctgccatgtggcaaatgtcttcgtgcattgtgggtaatggagagactgcggtgatgggccggactgcgacccggcctagttgacgataggcttcgaagcctcctatgacgttgctgtgacgctcaccatgacggtaacggtgaacgaaaggaagtccgtttttacgggctctttgcaccattatgattgacgaagaccgttccgttagttccatcagatgcatcacaaacagctttagccgtagtatctgccaaaacaaatacgactttttaaattattaaccaagattataaattattacccagctgatttttaattttaactatacaaaatgtgtgtaattatacgtaggatacattttcattgagcatttcaatgatatcttaattttctgatataactcttatcatagatttacaaatttaaatatagattattgtaacgtaaaaatataaaagaaaggtaatttaccttggtggttcggatggactcgacgagagagatgagggaggagacattggctgggccgtggaggcaggctaggatgcgaagctcttccttggtggagtcttggctcgccgacaagtcttttagtttgcggtgggtgccacgtgccggcttgtaaatggccattacagtaggcgtcgttatgaacgttgtgaagagtgccattagcactagtattgcaaacgtctcgtcgtttagtacctggttaaagtcaaccccgcgtacaaacagtttaattaaaaataaccacacttactacattaatgggtaatcattatttcactttattgttgcattatgaagaagatcataaatctgcaagtggatcagtaagtgacgattacgtaaacattggcccattcgaaaaggtatattcgtataaagttttcatgcagaaaaaaaaataaaaataaagttttcatgcatgcatatatatgactagtccttaattgatcagtttttctttattaccccaaaacaataagaaacgcctttataataaaagtgtagtatataactataatctttgttgggaagacacgtttaaacaaaaaattttatatactacatatttccagaagcattatagtataatcttgcacatatatttaagataaaaatgtttatttcggaggtgacaaaagaatcacggactaatgttttgaagctaccattgctaactgcatcatcttcgatgcacatagtaaacttagctatcaaattgcaaccgtgtccatcagtctatgattaatgaactgcagatttgtattatggtgactaatattactatacaacggttgagagcaaacctagctatcaaattgcaaccgtgtctattatagtgatagtaaacctagcagcccggctcaatattttattgggccctgtgctacaaacaaaaatagcccttaaatctaaacaaaataactttatgtgacatgtgtttactgtatttttattttaaacttattatcttttattttggtggttgttttttttgtagttttccccttaaaaaaaaaaaaactgcaaactagaagacttaaaattaagaaaaaaaaatgaggaccctgtgtactagcacctctggcactcccctagagccgggcctgcctagctatcaatttgaatttatacaacggttggttaatgttcaaataaaacataagcaattttactattccggatccccgaccagcctaccaatattgagcggaccggacgcatatacacatggatccaactagaacctaaatttttaaatatatctaaacaccctaaaataaaggtatagatgcgattaaatcaatataataatcgtattttgttttatatgctttatccactaaacatgatcaaataactttagtgttactaggttttttatatttataatattcatcagataactaaaagcgtaaacaagaaccttaaaaaatcagaaaaaaggaagacaaaactaacctttttctccttgcctatgttgagtacaatgagctccactaaacctttagtattcatcaagaaaccaagtgtcaacgcctctctcgccggaactttaaccatcaccgccacaacaaaagttccgactatcttcccggcacaagccgtaacaacaacaagacccaacatcccccacgactcagctcctctaatcttagccacgtcagtcttcaaaccactcgtagcgaaataaagcggtaagagtaaaccggaaacaaaatcctcaattcgttcaatcaatcgctgaccaaactctccatctttcggtatagtcaaaccgaaaacaaacgctccaaaaatcgaatgaatcccaattaaatccgtcgcgaaaccggaaaccataacaccggctaacgtcaaacacacgtaagactcgcgtacgacgtcgttttcaggagatccacgtttcgcgacccatttcattccgggtcggatcacaaccaacataaaaaccacaaacccagcgcccgataacaaaacccacaacgacactaacggactctttttctctccacctccctcaccgccattacccgctaacgcaaccgctaaagcgagtaaaatccacgcggctacatcgttaaaagcggctgcagccatcgcggtttctcctatctgagtcgttaaaagcttgagctctgctaaaatacgcgcaagtaccggaaaagctgtgatcgagagtgcgactcccatgaaaacgagaaactcggcgtaacctggtttatccgcggcggtgtagagagtgttacggatcacaaacgcgactccgacgccggcgataaacggtagtgtaattccagcgactgcgattccgaaagcgcgtttgccgcttcgtcggatcgatgataaatcgagttctagaccgacgaggaagaggaagaagagaagtcctatgctcgcgacggattcgagtatcggcatactccatttcggaaatatacggtccatgtacgccatgtttctacctaaagccgatggtcctaacaaaatccctccctgaagaagaagacgatggcagaattgtaaattaagaagattattatggtaaaattgtaaatagttagtgtgtgtggggttagagtgtaatttttaacgtacgacaatctcggcgatgactttgggttgacggagaggtttgaataagacggcgaggaagcgactgacggcgatgattaacgccgtttggacgatgagtaacggaaaagcgaagtttaaaggattgtcgccttgccatactccgttagatgaggttttcacggaggttatgttgaagggcattttggggatttcaaaggactctcttatcgacgactttttttttttgttttgttctcgtctatatttggaacatgtgatatagttcaagtatgaagaagatatgtgaagaaatttataggcaaaaattataaatgtattggtttgaagattcaaaaaagtaattatgttgttacttgtaattttggtgcatctcacgtgtgactagaccttgagtggaagtatttggttttttttttttttcttatgatatttgtttttttagtagaaaatttaaaaaccattagattttgggtgctataattagaaaccatctatgtctttgaattgttcatgtttacaataaagtatagaaagtaaaaatctactcaaaaacaatttgtggttgctataactcattcttatcagttttatttcaagcaaaactaataacataaatttagtattgagaagaaaaaaagaaacaactcgtctcacagacggaaattgcaaactaaaataagagtggcttatcaccgaagcaggaatcatgtgagtcaaacgtgggacgcgagagatgggcgttgacaaatgctgcgtcggcgtggatgggttttacaagtgcaaccaaattgacacgtatctatgacttctcatatattccaaagtatttcgatataagttggcaatattttcattaaatagagctgttgatttttccaagaagtggtatctcaattctgcttggtatttacgactttcctaactttttatctagtttagattgttcgtcaagtttgaaataaaactgttgataatagctatgactatcatatacagtatgaaaaaattaagagttagattgtggcaaagagacatctgaaattgtagaaataaaggatctaaagcagtggactgcctcgaagatgctataaattttgtaatcacactttatttcgaccatttcatggttaagtaattatgtatgtttgtggtttaagattaatataatgatcacacggttttctattagatgttttggagcgttagttacttttgtgcatattatcttaaggatctctcaaatccgattgacgcgataaaaaggtcaccaaaagttatagactcgaaatccatattttctgacctacctaatggtcgaaatattagtccaagacacatatccaatggaaaaaaacttatttaaattttttaagagaaactacgtcaatcatattactttttaaaagtttagatagtgggagaattcacaagaatactgattacaaaaaaaaaaaaaaaaaaaaaaaaaaaactgaaaatcacgaggcgatcgttatttcatttccctttctatgaaatagatttggacttttcatgaaggcaagccaaaagtgccaaacaagtggtcctccaaattttgaggaacagttagttcaaaacatagcaagtttggtctcacccatctttttttacattacagctcaaagatagaacattaaaaaaaaaaagaaaaaaaaagatttatagagaagattcatgaatctagctagactattgtaccttaaattgcagctcaaagtcatattttgcatgttgatcagatatgtcataagagttatgtcaaatacacttgttgtatctctttgtagaaaataagattgctaatcctaataattttgttgacaaaaaaaagaaagaaaagaatacatcctcaatttataaagacactatagctttgacattgacgactcacacgcccaaataaggtcggcagagtgaaattgtctgtgaaatcatggtgttttaagttgtactggaacttgtgtatgaaacagtctatagcaataataatgaaaaagaaacaacacattttgctccatagcttttgtatttgtgtaaatcggaaagaaaagtggtttattattcatggtcgaaaaaatcagaaaaatgggtcgattagagaaaaaagtaattttcagtggctacagtataagtacagcgaactgttctaggtagagagtcccattatacaacaacaactcattataaaatttgacttcagtaacgactgattgagaatatgttaatgtacactaaactattgacattgatgtaattgtatatttttgtacaattacgttagtaatatggcgattgcacctgattggtgaagaatctatattctcttccagttaccctacactagaatttttcaatgaagttatcacttgacataatcaatttaaaaatttgatttcgagacttcgacgataaattttgttgggccactacaaaaggttttactgagtgctgactacttattataataggcccaaacaaaacatatatgttgggccactacattattagccaaaagattttactgtaacttattatgagcccatacggagcatttcacagggaaaatttaactaaacgcgaaagtggcgttacgattattagaatgatttcgtaataaacagaggattagttaaatcacgtttcgattactgtatatgattaaaaattaaagttgaagacaattctttttttttcaattcattcatcgtttaactgagaaattacaaatctgaaatccctagatgctgaaattgaagagtttacaaaatccgaaattgcaatccgaacgatttagccgccgaatccatacaaagttcgtccttgtctcttgagagcgtaaacgacgtccatcgccgtaacagttttccggcgagcgtgctccgtgtaagtaacggcgtcacgaatcacgttctcgagaaagatcttgagaacgccgcgagtctcttcatagatcaaaccactgatacgcttcacgcctcctcttctcgcgagacgacgaatcgcaggtttggtaatcccttggatgttgtctctgagtactttccgatgtctcttggctcctccctttcctaatccttttcctccctttcctcggcctgacatttttctcttgggaaattaaattcgaactaagaaaaagattatttgattttgccgaatggttttgattgattgaaatgaaaattgagtttgttatataggatgagacgacgagaagaggaggagtgcttgtgttttttacaaaactttaggaagttgtgtgtcgttggatctgagtttatcgacggtcgttatcatctatccgcgtgtttataatttaatgattttggaccgttggatctgtttgctatccgcgtcattatgcctgatgacatctgagccgttgatacgcaattggtaagattcatcaagttaaaggagcgctctgggaaagttgtgttttctttcacaaaattatttgcttcgtttggttaacattgtatgtgatagatatacatgtgattaaggagaatgctagttttgttctcccttgaaattaggttagttgtgtgtttatttgggaaaatagggaggattaagaacattgatcttggaatcaaaacttttgaggttaatgaaaatctgtagtgagaatgtgttatggttgatttaagtttagtcttcaagcaattttgatattttgagttaatttagagacttaagaggaagagaaaattgttaacatatatcatggacttcaatattaacccattgatgatctctatagctttcattgaaagaagttggtaaccaattcaattgatcatccgtggtaactgatattcataaggccgcctgatttttcaatattccaataaattcagaggcaaaagaaagataattgatcaaaagaggcaaatagtttaaaggcagagtcactggtctcagacaaaactctctttaagtccgatattctaacaaaacataattcgagaagcttaggaatcataataacgattttgcaacaagaaaccataactctttacgagcgattcacaaacttaagatgacgttcacttcttcttctcagttgcaccaccaccgccagacctgcgtgtaagtaaacaaagtcccaaaaatcagtaattactataaaagaattggtttttgaattgagaaaaacaaagccaacaataagcttgttcgattgttcagtttacctcatcttgcggagaacactggacatctcctctctctttcgcttggctctcttgtgggttcccaacttcctcttagcaaccttaagagcacgtttgtctttaccaaccttcaaaagctcagtgattctcttctcatagggagcttgaccagcaacttcctttatcaagtttctgataaagattgtcctcttgctcgttttctgagcaaatcaagaaacaataccacactcagatgcataaacaaacacagcaagaagattgccacaaaaatcataacgaaataatcaagagatagctatcaaatcgccaccggcgaatcatgtcatactcagtatcagaaacagatatgatagctcaaaatatggattaataatgttactaaacacatggacaataatgcatcaatattgaaagaaagaaaatggtttagcagaagcaaaatggtttagaaagtaatgaactacacattcacaaaggtgaagaattcgtcaagcctacaataacaaatgtctatactttatgagcccacaaagagatacatcacactatctgaacgaaactaaagcaacctaacatagtctagaaactactaaaatgaatgtttcaaaacaattttaacagaaggcaaaagtgaaacaacatactcctttgcgagaacgaggacgaggagctaattcacgtctggtaacaacatgtcccttgttcaacccaacgaacaaaccggtcttcacttgtggagttgtcatcttctgtaaatttcatagacaacaaacaaacaaaactttctattcaatacaaaatcaaattttacaagagacggattcagagataataaagagatgaagagagttaaatcaaaagggattgatagaagatacctaatcaatggatcgagctcctccggtggttcagacaaaagaaggacgccgactgaaaattacatttttgtatatataccagagagactcaagaaaaaaccctagtccagtttgggcttttattgggccttataaattttgggtcagttttgacaaagtaaatacaaggctatagctgctttgctaacgtgattaattatttaccatttaccaaaagccttaaccgaggccgagcgagaaaaaaaaacaaaaaaaaggtagagggcaagaacgtcatttccacaaggaattgaatcggaaaacgaggtgtgccgaattcgaagcctttggacccgtttttatacttttttacttgccattcgtttttttttgttcattggcctcatttgattacttgtttctttgatttctccttccatagaaccgaattgttttcagtctgagatttctcctgccgagagaacgattttaatctattttcctcggtaatgttatagcctaatttgtgtttttttctttttcctgatccggatatcgttattctgattgacaattgtcagtttcatcttctattctgtgaaattttgatttttttccgatctgtgatttcgtcattgtatcagcgtgcttatatgcgtttgaggcgtaaatgagtgtgtacctcatttatcatttgctatgttttttttttttaacagagatcttcagctgtaatattataatagattgaattgataacgtgattctggatctggaatatatatatgtcacattcttcttaggatttgattttgtctctctttggatattaatattcttcactcccttgaaaatgaatctgtttattataatgtttagatatattccttaccggcatttgttttagcataaatatgaaacatagcattgactgatttgtctttttattattcttgtttttttgccaaattggtctcatgtttttgcagagagtagaaaatggctgatggtgaagatattcaaccccttgtctgtgacaatggaactggaatggttaaggtatttctactaacgaacgttttcaaactggattacaaatataatctttggggatcaatctgaaccttagaaaatttcaatatgtttttatcatatgaacaatgtagttaaggtgattatgttgtgtgtttgacttaggctggttttgctggggatgatgcaccgagggctgtgtttccaagtattgttggccgtcctcgccacactggagtgatggttggaatgggacagaaggatgcatatgttggcgatgaagctcaatccaagcgtggtattcttacccttaaataccctattgagcacggtattgtcaacaattgggatgatatggaaaaaatctggcatcatactttctacaatgagctccgtgttgctcccgaggagcatcctattctgctcactgaagcgcctcttaacccaaaggctaaccgtgagaagatgactcagatcatgtttgaaacctttaacgctccggctatgtatgtcgccattcaagctgtcctgtcgctttatgctagtggtcgtactactggtaactccagaaattgataggctttacatgtttattctgtagattctagaccaagtcgtaaaaattgttgatttatgttgtaggtattgtgcttgactctggagatggtgtgagtcacacggtccctatctatgagggttacgctctcccgcatgcaatcctacgtcttgatcttgcaggtcgtgacctcacagatgctctgatgaagatcctcactgagcgtggttactctttcaccacaacagctgagcgtgaaattgtcagagacatcaaggagaagctttgctacattgctcttgactatgagcaggagcttgagacggctaaaaccagctcttctgtagagaagaactatgagttacctgatgggcaagtgatcaccattggatctgagcgtttccgttgccctgaggttctttaccagccatctatgatcggtatggagaatgctggtatccatgaaaccacctacaactccataatgaaatgtgatgttgacatcagaaaggacttgtatggtaacattgtgctcagtggtggaacaactatgttccctggaattgctgacagaatgagcaaagagatcactgctttggcaccgagcagcatgaagatcaaagtcgttgcacctcctgagaggaaatactctgtctggattggaggatccatcttggcctccctcagtaccttccagcaggtgaataataatccaatcaatttcctttcactaaacataataattccactctgcagctctgactgatcggtcttccgttcttgaattttgtagatgtggatcgcaaaggcagaatatgatgagtcaggcccgtcgattgttcaccggaaatgcttttgagcttgaagttaagtctgcttccggagaagccctgggggttttccagtttgtccttactgggtttttatcttcgttctctgctcttctttgtttttcttcttcaatattttcagattctggcctaagacattttgaagaatttacattatctgtttgtagtgttggttaaactgttgtcttgttccttttatttattttggatgacacaactgtgtttgagtgaataagaactcctgatttttccaagtttagagaggttatttgataatcttcttaatttagtctacctctaattttttaattcttttttgtcaatgtctacctgtaacttttatcattgtcggttttgtgttatgctacagtcatacgttattcttttactgaagaagaaaatattcatcactgttcagtgttcactgttcataaatcactaactgaagactcttgattatagaaatttttgcaaatcacgtcatcaagcttatcatattgttaaaaatgattaaagaaaccacatctacataatttacagagtattacatctataaagcacgaattaaacacagcactaaacagattcttgtgaaagccggagcacagtacacagattcttacaaaggaaaggcgtgtgagcacgaactctgtccacatatatttatgtatattccattggtggcgtcatgtcatcctggtttgaggatcagacaaatgctatcttctcgtgtcatagttgttgcattaaaccttcggatcagctcatgtctgaaaaagcttcggaacgagattcttccaccaggactgtctggcattttacaatggaagcgctgggcgttgtcggacaacgtttaacacgccccttgcagttgcctgctaccaggaaagagagacagtgagaagctcccattgagaaaaacttaaatcttctgattgaaatccttacctcgtaaaaggaattgaagtttagacgtaaaagaaaacgtctcaagaacggggctcgctggctcccggcgagtttgctgcttctcagtatggtgtacaaggaatttgacttcttgttgaattccttaaaccgcaagataaaaaattatgagagaccattgttacctttgtatgagtattacagtgaaaagataacgcacctcagctatgttttcaagttctgaagtgtttgggttgctttcttgattctcaatgttccagcagaactggagacatagtttcatgatgctatcaagtatccttgagacggaaccaatgtcgaggaaagattgagagataagagcggagaggtacctgcatttgtatagtacagtaggtaagtagagggaaaaattactgaaaaagatttaggttcagacttgcttcacaaaataataaaaaatcgaaacgagaaccaaacacagaagaataaatgccaggccaagtaagtagcatgaagactcttgaaagagaacaacgagcattggatatacttactcttgatggaagccaacgagttcagtgaaatcttgagaatcgtggatgtgagtttgcaacaccttccattgagattctatcacgtcaaccttaagacaaagagagaatcaaaacatgagaagttttttgttttacaaactggcttataaccaactttgaaattcttaggaaacgtcgtctttacctgaatgtaaaactgaagattccttatcaaaaacgccatgtgctctctaacacgccacatgggtcgtattccttgtcgtctttgttgagatgttgatccgtttaaaccatcttttcgatgttgagcagattctatatgatcttgatgcattacagaagcccatgatttctccaattccatctgagttctctttagccgtatcaaatattggaacaccttgagatacctaacacaagtttatagctctcagagaaagcatcacatatttcaagttccagcagacagccgactaaaaatttcatagtataatcgatgcaaaaactttgaaagtgagaaaaattagaagaaaagaaggatataagcagtgcctaaggattattacttagaaagcacttcttgagtgaaaaacagttgcatgggccaatcaacagaatactccagagcaatagcgtcccagccatccacagaggtgtctgatgtaagatttgccttcccggtgagagatactttagatctcaccatgtcagcttgagaagatctgactgtgactccaaatgaaggcatcctggtgagaatagcagttaaatagccaaattaaggaacagttgggagaaatagttattaatatgtgcgtcccacttagctcaaaggctcgacactaaatccattaatacaaagtcgttaagaagaatttgatgtgttactaaccgtagggataccctagagaaatacttatcttcctccgcaatggtttttgttgcagcctgtgtgttccaaaagaaagaacattacaaaaacaatttgacctgaacagaactttaatcatgaaattgtttaagttgtaaccacataccaactgaaacggtaccataagatcagattctccagttgactggcgaggtggcaaacgcatcaactgacgactctcctccagaaagcactgaaatcagaaagtctatgagatgagaaattaaatgtccacaggtctttaactgaggctagtgcaagaagaggaggacatgaacaagtgggagcgacattaatcacccttaattttcatttaagagcatcaacagatagattatgtggtttacctgaaagaaatctcctttttctaagaggaaataatctttcagagctttaagatgaccattgagatcagcacgcacaacgacaagctgaagaaaggaaggtaatgtgacccaaaaaaataaatccagaagattgaagtttaaaatgttgtcaagtgaaaacctgccaaagatgactggctgctattgctcgaacagaatcaacagtgcactcaaatgatctcttgtgaaactcagatgattcctgcacacaaacgtataaatctaagtttacaatctgagctctaatgtgatcctaggagaaaggcatatactatctctacgcatgatctctatgcatgagcagtaggatcgcgtgctgcataaccgaaaatcaactcagttatttagattgttatactttttaccaaagatatactgtccagtgagaaagtacctttaaatctttgagcatagcttcaatcttatctgcctcagattgtggaagcaactctccccctgtaagatctgcatctaactcagtttctgtttcagggaaatcactatgcataaatcctcgaattctctgggagccacgcattgtttgctgaaaactcttgtccttctggaactggaaagcaggactgggatttcgcaaaacccttatggctttccccgcaaaaagaattgattcaccaaggcgcataggaatataatcaggtaacatatcctgcaatataagcacagaaaaatcaataatatagtaacagtacctaaatcaaaagtgtaagtggcatggagaataccaaagaaatgtgaaatccagagtgccaatcagttaaagatgtctcatgaactgaggtacgagccaacttttcagatacttcttcctgagatgagcgatgatctaaatcaccatcgtcctgcctacaagcaaaccagaaatgagttgaacattctttggagaagataaacagaaatcaaagtgcatctgcagacgacggcaggccataatgtatcaatgcaagtatacagcagatacctaagcagaataaatacataatgaggaccactaatgacgacattaagaaaaacgagatggcactcagcaaatatcaagataaaattgacaaaacgatgtagatttacaatttacctcttgatgaaaaattctccatgaggatcctgaagaatgccatagaccatccaagctgcaagctgattatacatgacctgatgtccattccaaagaagcctgcacgtggataagggaacaagcaggatacaaaaactttgacaagtggtgacgctggactaaatgatctcagtttactgaaaataaagccactgaggaacaaagctagtgaatacctttggagacaagtcctcaattcaggcacaccacaatgacatcttttattcaatacattaagaagctgccctccacgaatatcatcacgctcaatctcaagaattacctcatacaggggcgggaaaagaacgaaaaactagacagaaaatggcattggactatcaataaacacaaattcatttggcaaatgctaatctcaatcatcaagtgataaatgtgttggtattgtactagaacatgtaccttattgagcccctctgtaaccgtagccagaataggcgtagtctccgccaatagcttctgttcaatgtgaagaaccgcagatctatagaccgaaagaatctccccaattccattagcaatggctctacggtacacgctaggcttcttctctctactctgcttcgacaattcatcagcccgttccaacggatgcacactggtcacagacctaatccagctcaaattgcgagacttcttcgcaaaccggtcgagttctcgatagtagaaccctaacttgatcaacctttcgatcaagtccctgcaaggaagcgcatcagagtcactagaaatcaaaatcagcggccaaatttaccagatcagcgcgagcagagactaaacctttcgctgggttcgatgaaggagatgtcaggagcgagtttgaatgtacattcatcagaaagaggtgaatcggagttgaaagcgaggcctagggttttccgttgctcacgctcgtcgacgatgagatcgccggtgaagcctaagagagctagaagaagctcgtgcaacattgggaaattcacgaaagacgaaactgctaaatattttttgggggagggaaattgaaaatccaaatgccgtcactgtcgccggacttgttggtttaccggtgtagttcagtggcaaatggtgtaatttcatgagaaaacaaaggtgttttgctaatttagagagtctctttttctcttgtctcgggtccactcgaaagaccctttattcggtttggtctttccaatcaacaccaattcgatatggttaaccaaaccaaaactctatctaaaaatccgatatgaaaccgaattagagaaaaaataaaatccgactatgttttaagaaccgtagtcgaaaccaaacttgctcgtgtaaccactaaccggcacccggcaagtggagaaaaaaacaatttacttgaccaattgtagggaacaaaggtagttaagctaagcttgattaagtcaaaattcttttttgctacacttctagttgagccaacaaaaatgatgctaaattatattattcgaagaaaagccattatctcgattgacccttcaaataatttgaccgttcagagaaaccattgaatcttgatcgtctcagaccttttcacataatatgtatagaccaattcaaaaattgttttatgtttagttagttcaccgttattaaatcaataaatttgatttaaaaattagcacgtacgcttaaaactctttaaaaattgaagcatgattaggtcattgtcctggttgtatatttttcgatgatttaatctgacttcaggtcgagcaagggactactacttctctttacactataatttttttttttttttttaacagaacctaccaatactttaattttttattttgttccaaagtctgatcaacattacaaagtcaaagtattagtttattccaacaacaacaaaattgttatgattaacaaattccctatatacctatatataaagctatatcttccaaacgtacataaaccaactcgcgcgttcataaaatagtctatacaaaaatcctcttacacttaatcttcttcataggagatttgagaggattaatgtctcaatcacttttcaatctcaaaagtttatctcgctcgatcaacaacacaatcagaatgtaagtctatccatttgtataaaccttatggttttagaaaatactgtatattggttaattcttttgaatatgttgcgttgtaaactaaatgagaattcttttttttttataaatattattctaggagaagatacattgtgatcacaaaagcctctcaaagggcatatacaattggaagtagtcaagagaagccatcgtgggcatcagaccctgataccggatactttagacccgagaccgctgcaaaagagttagatccatacattgcaaaaacctctcaagttcaaggtaaaatgatgagaggagaagagttatggtggatgcctgatcctcagaccggatactatagaccagacaattttgccagagagcttgacgcagttgagctacggtctttgcacttcaacaagaatcaaaagacgtacgtagtgagctaaattatctctacatgcatgtgtggttaaataaaataaaaaacttctggtacattgatttgaagtgagaactcgtaataaggttttggcaaattatttgtttgcctcattgcttcttagttcttatttttctaacgcgagacgcatcattgtttagtcatgttgactttatcaaacaacatgatttgttcaaggttgcttccaaatgttgggttttatctggtgaatctttttaaaaacaagttgtcacgtattactattagttatctatataaaaaattccattccaaatttctgttatatattttaccaaatgaaagatctccatgccaaatttccattttcagattctaatcaataaaaattgtttgagagagtattacaaaaaatatatctacatattcttaatttatttttcattttacgagtggtctttctataaaaaaacaaacattacgaatttacgatgtaaattgaccttagtaacaaattaaaacgagagagatatctattaagtaatatattgaagttagaagagaacataagcatcaaagccgtcttagctcagtggtagagcgcgtggcttttaaccacgtggccgtgggttcgatccccacagacggcgatttattttttatttttttccttctttaaaagaagacagacacaaacattggagttgattgatcttacaacgagtttttaccaccaaaagagcaaagttgtatcatggattctcttctaaaattgtagcaaagcaccgttatagtaatttaggaaaacattgtattatttattgaacaagggcctctataaaacatacacataataagcaagaaaaaaatatgatagatacagtgtagagtgtgtttgtgtacataataatatttctaaaaatcagtaaatcaacggcaaagctgaacacataagctattaatccgtgaatccgagggatttgccaaaatgtaagatgctgatttcccattcctcaaacaagtcatgctcaattggttacctaattgagtcgtctgcagaaaaaacaagaagagatgctttgtgattagatacaatggaaggaggtttgatactaggctagagaaaccgaggaacgaaataaaagagcttaaggtttttaccgtgcaagaggctggttctcggttacagctccatttagatgttggaacacatgaaagataatgacaccacgaacaatgttcgtttccatcgacattgttgaagagagagatcaatccaacaatgaacctgataaggaaagaagcttggtttggttttctcacaaagttcataacttttttagtgtcaatcaaagagacaagatcatcatttacacaatctgcaggcttttattagtatagttaaaaacaaacagactgatttattgctattgacgtgacagagaaatgtaacacttacccagcgaccaagatgagaagagagatagtccataatatgccctgatatatcttgaacctgtggggtttagctccaggaccgtttctttggttgatccatccgtaatggggacggattaagagcacaaatccaagaagaaaacctgtagcaaaccctccgatatgagcaaagttatctactccagggagcacaccgagccccaagttcaccgccacaatcaatacaagagttacaatcgtcacaacctagaaaaagcattggcaaaacaacataaattctaaagttcagatctttagatcatagatagaaaacaggtcttgaaggtatagtgagttaccttgttagaatagattgtccagttgataaagatctcagagagcattcctccaagtaaaccaaacacggcaccagatgctccaacagagatgtttgaacggaggaaaagagctgacaatatgcttcctccaaaccctgatatcaaataaagcaatccaatccgaactgcaaacaaaaatcaaaacaaaggttatatacttacacacacacttcactaaaaaaggatcttcacaagctaacaaagtgatcaagagaggcagagagagtagttaactcactaaaaccaaattcacgttccatacgtataccgatgaataaaagagtcaacatgttcatcagtaaatgaacaactcctccatgtaaccaattgcaagaaagtagacgccatccttcatctcctttaaccacttttttaacatctaatccacccattgtttgtaacctgttgcaagtaaaatgtaaccaaaatcaatctctaaatctatacatcaagacagttcaaggaagtggagaaaaacacacactatctctttactctactccttctacatcgttaaccatcattaaaccaatcagctactaaagaaatttcagatttttcattgaaatcctaacaaagttcggatttttctgcttcacttgactcagtaaagatcagacctttatttgaaacaaagtaaaactcttacttacgtgagagaggaaggacccagaagaggattttctctggtgttctgaaacgagaaacgacccaagaaatcagcaaaacaatctccagatttcttaggacaattgttgacatacatggtgatcacgaagacggcaacgttagcaacaacgaaacaaggaatgagccaaggaaaccaactccgaaactctttaactcctctacctcgttcttcataagaacttcgactctgagtcaacgatcgttgttgcccagatacagaagaggacgactctaaatccattggctgtatattgttgttgttgctcctctctctctctcgagttttcccccaaatcggagctgtttctgaatctttctcacccattgaagcaattaaaaatccgagctttgaacagaattcgagctttgaacaaaattggagagatttgagatgtgtgtagggagaaattaggtttcgtgtttagctctttatgggagtttttaatcgggtgttggactttgggagctaagtgcaaagttcaatctatacaacaataagcaaattttggttggagtttttgagtctgaaaacaagaaaaaaaggaaagagttaaataagtcaatggtctttaccaaatatgcatcacacatggttcctaaaaaacaatcatcaaaacaaaaaaaggaaaagttatgttatttcgtgtctcaaaattgtttacaaactaatttataaacaaaagttttagtaagaaaaataaataaattttgtgatcataaggataatagttatttattaccctaaataaaagtggccctaaaaagaaaaaagagaaccgagtcttttgcttaatttgcttatcatccgaattaggactgacttgttaagtagttcaaccgctccgtcgtccaggggtttctttttattgtaattgactcgtctacttgtatctttagtacgtaagcatcgagctttgacatcgacgcttttggtcgtgctttctatcggtgacctactctttctctatattgtttatgtacctacataccatttggcatttggaatccgaattgtctactaaaaaatccaacctatcattatcagtttgatttgaaacagttaaaacataaatagttaatgaaagtgacgaagttgaagctttcttaagaatgattattgttttatggttttcgctagatatgagaattaactaccaataatatatataaccttagattgctttggcaactttaaatttgttgaccatatattgtcgttaacttgggagctacgttagcgaaaaagattaaatccaaagttttacttaaaattaagtatcattcaacattaattttaaacattatcaatttaatttattgttctgcaatcacattttccattcaaattcatttgacttgatttctattatatatacaccttattcaacacgtttctttaactgattgccagttacatcctaaaatgcttccgaatggaacaaaatatgtactccattttgccacgttatttatccaaaaagtactcgcaaagaaattcctccacaacaagaaaatattagtgaatgagaagagatttatccatgaataatgtagagtcgtccacgtgttaaaagaaggatcgatgttgagaagtcatgggaacgaagaactggtccaaactgttcggaggagggttttaggtctaaaagctaaaaaaaacgttggttagttttagcccccaaaaaaaaacatgtctttagagaaaaatataattcagaaaacgttttaaatttactgataatttcagactactcagatgttgacatgtgttgttaaaattgagttcaaattttcttaaaacattggagtttttttgtaaagaatttttgtggtttcatggggtttttgttcagacacaaacccaactttaaaggcggatgtttttatacggctcatatctttctatatattttacttccacacaaacaaattccaacataaatctcacttttctttctcgcacaaaatcaaaatcgtttcagataatcaaaaggtttgtgaatttgtatgagatttgtgacgaatgtttgtttttccaattatcctcatcatttttgtgtctcatatatcggatatatgaatgtttgataaaccgagattgcgcaggctcaggcttaacgtaagcaatttgcagttgtgtgtgttgcaaggaacatggtggactgtggtgtcgatatttaccaacttcctgttgttcctagggcatgtagatcacccagagtacgcatatacattcgaacatgatttattttgccataagttacatacattttggctcactcgattgcatcttttattttttatccagggacgcaggctaaaaattatgagaaaacaaagatcggagttcgaggttttagcccaagtggctggaagattctcaggtgagcgtaaaaaccgaattgttatcggctcgttggctcacgaaacaaaggagacgaaggacgataatgtcgtcgtcaataacttcttggagacaatggaagttgaggttaagccgcaacctggtctggagaacctttctcaggtgttattgtctaaggactggttagctcttggcccttccatgcctaactcgccaatcacacaagaagaaaactttgattcacgttccaagatcggtaagatcaagtcatcatatcactcgcgaactttacttatatataaggaaagcttttttacagagaaatgaagaatattattgaccttctttttttttttttttgtatttccttggatttatgtagatagtaaaagaaaggtgagtcacttaaaagagcgaggttcgtgtattagccaagaatcgcagaatatgtatcctttgaagaaacgaaagctgttttaccaaaatcattcatctgaatcacatgatactccatgtaccggtatgtatatctatttgagatcaaatctatatgaaaaattgttatttatataacattctcttgttgcattttcagtgaaattcggtattaagtcgttgaatatctcggagctattggtagacgttcccgaatcagccacggttggctcactgaaactagcggtattggaggcggtaacgcagattctcaagggtggattaaacattggagtgctctttcaaggtaaaaccatcgttgatgactccaaaacgcttcttcagattgggatcccatacgatgatgacgatgacgaaaacctcggttctttgggattcatgctagaaccgcaaaaatcagaaacaacaacaataacaacgtttaccactgtttccccgagaacacgacttaggtacacaatcaaaaccataaatccttatttttgtataaactcatttctaaaaaattatgttattagtaatttcgtattctttttaaactgccggtcataaatagacaaaatcaggtcctagggtccgtggatagcactgaggcagtagcagctaaatccgtggttccagtacgtatgaaaccggcctggcagccagagatggttcaacggagaataagacggccattcactgtctcagaagtagaagctttggttcaggccgtagagaggctcggcaccggaaggtaattaattttcaagctcttgagatctctcatttacttctttttgtaataatctggtttgttaaaatactgagttgtgtcttatatatacattgtttctatttaggtggcgcgacgtgaagtctcatgcatttaaccatgtaaatcatcgtacctacgttgacctcaaggtaccttttagtagtaaatgccatgtatgaaatcagaatttttactgagaataaaaaaataaaattatatgtgtataaccaaaaacaggataaatggaaaacgttggttcacacggcaaagatatcagcaaggcaaaggagaggcgaacctgtgcctcaagaccttcttgatagggttttagctgctcatgctttctggtctgaccggaccggatgaaatttagatttcgatttagagttatttaagtttaggattttgtttacataacacataagattgcccttttcagtacttaaagcaggtagataatctaggatatataattactccaccaaaagtggtgggaacattttaacctgtgaaggtttaggttctaagttacactagatgattaaacgcgtgtaatgattcaacacttgataacatctataatcaatgcttttgagttctgcgtctattgaattatttcaaaattgggattcaattagcgggtttattaccatttaaaccaagatctattttcttaaagactttggttcccttggtacaaaactgctgataaaaaacaccaaaacaataattcctctgattaatctatatttgggccatagtctattcaaatctgtatttgggccatatcttattaaatgggtttagtatatgccgtcgatttaatctagcgtggtcccacactcgttctccttaacggcttaaccgataaactggctagtgcaacttggccacgtgttttttggtctatccatactttacggggcacacaaaaatatctcctctgttcctgtaataaaaaacaaactaacattctcattcctctctcgatcttactcaattttgcgtttctgcttttcattttctctcaagaagcgtaaatggcgaacaatggacctaactgggacggattactcaaatggagcctctcacattccgatggagcttcctcttctagccgtataaggtcctttgatattttctctggaattcaattgaaatctctttaccctttttctttaccggatgttacattataccctagtcattcttgtatcaagcttgttgttatctttgaccaacctattcgtctcttgctagttgctaataataggttcttattttattggaatatattcttaattctgagagacaataaaccatttggacgatgaatcttgaagttatgataaaactgtttgttgagttatgatattactattcgtcttttgagttatgatattactgtttgttgagttgtgattttggagtatttgattgtgttctggttagtgaggaagatcgacaatggtttgtggaagctatgcaagcacatacaatcgattcaatctctcgtatgaaagtaatatctcaaatcatgaagatgcctgaacaagtcttggaggctcaaggagttacacctgatgatcttgaaggttctttacttcgttccaatggcgattattcggttatgcaaaagaaccatactgatcgatttcataaacttatatctacttttgttttgacaggaatgttggctgagctgcaggaacacgtcgagtcgatagatttggccaatggtttgatcttacataactagtctttgtttttcgaggttcttttttttaatatattatttggatctttaaatgttttagatcttcactccattggaggtttggttcctctccttagctatctcaagaactctaatgcgaaaattcgagcaaagtctgccgatgttttgactacggttgtccaaaacaatccaagaagccagcaacttgttatggaagcaaatgggttcgaaccattattaactaactttattgctgatcctgacattagagtccggaccaaggcactcggggctatatcttgtaagagttactatttctagcaaagtttgctttgagaacccaaaagtttgacagtttttttcttgctttcgacattgcagctcttatccgtaacaaccaacccgggattacagcattccgtctggcaaatggttatgctggcctgcgagacgctttggtctctgataccgttagattccaaaggtaaatagggtctcaagaatatgtattaggtagatgaattgatccgggttttggttctgtttcggttcaggttttcagtgtagtaaccaatatactctttctgtttcagaaaagcgttgaacttgcttcactatcttctccaagaaagcaactcagactgtaaaatcgttagagatcttggattccctcgcataatgatccacctagcatccaaccaagattttgaagttcgggaattcgctcttcgtggtctcctagagcttgcccgtgaagaatctgtgagaaaccttgatagaggggatgtgaatctaagacagcttcttgaggagagaacaagacgaataattgtgatgtcggacgaagatctttgtgcagctagagaagaaagacagctagtggatagtctttggaccgtgtgttatgatgaaccgtcccttctaagagaaagaggtctggtctacctcccttctgacgacgagctggctcctgatgtggttagggaccgctttgaacctcctctaagggcttgggctgcaagacgacatgatgaaacgagtgaatccccggttccacttcttcttggtcctgcaccgtgatctcgttcaaccaaattattagattttgcagttatcaacaaatcagctttgctttagaatttctctagctcttgtttatgtatatctgagcgacaacaagacgctattaaagagattatctgtgttctgtttctgtaatacaaatctacactcatggacttcaagttctacaacttctccgttcactttgccaatatcatagtgtaccgttattatgtttaagtcatgaataatacttgcgagactgttcttgatactgaatccactatcgcaatcataatcttcatactctataaattcttataagatatcacaaaaaactcaattatatattccatacaaaggcaaaaatgtatgtacatgatccgtattagtaaaccttttttaaaaaaactataaacataaaacattgctagagttggaacatcaaacatcacctcccaccggagagtagagagtcagcaatggaagatccgccggtaaaccctttaaacacagtggaaaaatcagtcattgcaataccgctaaaaccgtcccggcctcccagattcatcacgctccccgccgacaaatccaagggcgttaattcaggcagtgccatgtctcctcttagatattgtaagacctgcctcatacttggtctagcccgagggtctgaatgcgaacacaacagaccgagtttcaataccatttcaacctcttcaagatcataacctgaagaaccgagcttcggatctttcgcttccattatgttacctctgagccacaaactgaaaacccattccacaagcaagaacgtatcatcgcttgcactatggaactcgatgggtcgtctaccggaaacaacttctaaaagaaacgcaccaaacgcatagacatcagtcgtggtagtggcacgtccagtccgggaatgttcaggtgctaagtaacccaatgttccaacaacgtgagtggtctgaggatccgagccgtgatcatacaaccgagccaacccaaaatcaccgagtctaccattgaaatcagcatctaacagaacattgctagctttcacgtcacggtgaatcacaacttgttcccattcctcatgaagatagaacaatcctgaagcaactcctttgataatcgtagatctttgtttccaatctaaggtagtctccggattgttgtaaagatacttatctaagctcccattaggcatgtaatcgtaaaccaaaagaagctctcctctccggcgacagtaacccaagagaggaactaaattccggtgactcatcctaccaatactcacaatctccgccacaaactctttcataccttgttttgaatcatgtgagactctcttcacagcgacttcaagcttcgtcgttggtaaaatgcctctgtaaactctcccaaatccaccggagccgagaagatccttctccttaaaacctttggtcgcgtgatagagctccttgaatctgaatcgattcttcccaaactctgtttcccaatcatcaagctcttcctcgtacttcttcttcctcctcacgatgtagaaagcgaggaagatgatagagaagatcagagatagtgaaatcaaaggcataccgattttgtagaattcagagattcttctaggctcaaatcgaggaagcttcgggagtttcgataacgagagcatcggagcttctccgtttaaccggaaactccatccgactaagaaatgctccgagagaactgaaccagtcgcagatgagaaacctacatacatatcttctagaagaatcgaagaaagatctctcacatacgaaactagaggttttctaggtttatcagaatcaaacggagccacggtgacatcaattcgatgactacgattatcgtaatcgatccaaacttggatccgtttgcgactaatcaaactcagattctgaaacttatcgtgatcatccctatatcccgccgtcgagtaattcgccgatcgtaaaccgttgagatcgattccgacgtgattatcgtttggatctccaaactcgctactctggattgtatcgaattcgacggcaaagatgtgattcgtgtcgttaccattgttagagatgttgaagagaccgatgtattgactaggaagtgcaaaaggaagacctagcgttggagctacaacgaaggcgattccatggccgcttagtgttgggatctgagaatgtatcgcgaagacgaaggttgtggagaaggatgatacgttgccgttttgggaatctttgaaccggattcgttcagtacagaaggcgtgaccggttttttgtaccgatgtgttggtaagcttcaagagaccattgggtgttactgttgcgagaccttggagtgagatatctgttaatggaggatggaaaccattgtaggtgaagttgagattttgagaggaagaaatcataatttgacagagtaggaagaagaagaagatgagcttgagcttgacgaacatggctgcttccggtttaatccggtttagttttactctgttttgttaaacgaaagaggaaaagattgaagatagaaattgaagttattaaaagaggtgaagagaaggataagaaaaaaaagtcgtggtagtgtttctttgaggccacgctttgtgagatttgaataatatgtcagtggttggtgaagtattaatcaagattatataagcttgaattaaatagaagttaatttcattctatgattaattggttttataaggaggaagtgtatatacaaaaaaaaaccacactttgattttgactgatgcattaatccagtttgtctgcatgtgacttctagtggtcaatggtcaatgagtgagatgttgttgatcatttttgtttagttaaattaaatgaagtaaattcaatcttatgagtcatatggttaagacacacaaattcaagtttgtgattctgagactggagttctagaaacgtgtttctcttcggctttgtttggttttatttccagaacttttgaaccatggtaaagctttcttttttggtcaacaaaacttttttggttaaacttcatataactaaatttaacttgtaagagaactatcatttctctaattgactaaaacgttctggatggtgacagaagtattattcttgcaacatttccaaaacttaatattgtgtgaacactaaaaagatatcagaatagatgtgtacttatccaaacgtttcacaggaagtacaaaagcaaaaatcattttagatagtgtggcttgaaaggctgagattgacgacaacaaacaaatgagaggctaagatttactatgtgttatattagtggttatgtaactaatattgttccttcatcagaaagtattcagtggtcgacatataaaatattcctctgcatatgaatttttataaattttgtgatgcaataaacggaagattcttttgacattttctcctttggcgtgatgcagaaacaaactaaatgctgagataaataataggatttcatgtcacagtacttatgaataagtggacttatccaaaaattgttagattttttctcttttgataatagattgtatcatttttaggaaatgaaatgttccataaatacactatagtctatagtgacgttgaaaacttgtttgaggtgtaggaaaacgtgaatgaatgaatcctggatttgtgagaaagaaaggtagtgataagagggagagagcaacgactttaaggagtgatatgatagtgatgggtcctcatgtgtcaaatggacaactggtcaaaacttgtccacttgtctctttaggaagcttctcaatttttgacctttgatttttcgtctcagtcagcttcatgatcgatcttctttgaattttcttgcacttcaattttattctatcccgacactctaacatttaggaggactggttatagttggattcggatgtgttaaattgatatgatagggtttagaaacataaaagaacgccatataacttctttttggtattagattctcagaataaaatgacaagatcatattcttatatagatattgaagttggctaagttaataaaatacaagtactgtaaaagtaatatctttggtaacgatcttgatcggtcaatttttagttcaaaatctcgacatattttccaataagaagtattatagactaatactatgaacaattcggaaagcatacagaaaagaaaagcctatagtatggcaactggtcaaaatccatattttgttgattcaaaacttctcaaggtttaaatttcagtaaaaagaaaccaattttttttctggaccacaagaaaactagcttaagagattttgaaagaaatttctgaatgtttttcttttggttgatggatatatcattgatttcagaaaaaaaaaaaaaaaggaaaataatccagttatggctaagcccagaatcaggcccaggcccagatgcatttagttagtaatgtataagataagccccatatatatgttttttttatatctaaaagttacaaaaaaagttcagagtataataaaaacttctaacaattataatcgaaactttttctttgaggttgcagataaagacatccatgtgaaacgccgacactgaaaagtcactcaaagaaatgttcaaattagagttgttcttagaagccaaccgtagggttaaaataagctaatggagattataatgttaatttgtcaatatcaattatttgttggataagtccaaaagactaatgcggaattgttctaaatagttttccctaagcaacgattataatacttttccctcgttaaccatttcacaagttaactaagcgagtgccgtcaacatttatatacattacaaactgaccagttatgtaagttgcttcccgccattattagatgttggcatgttgctatcgtgaaaagtctttttaatttcatttttgttgttgttcggatatttatattgtgaacatacattataaactgagattgcaggttaattagttagaaaacatggtaaattcaatgtaattgcgacacgttaacatttatatatcaatttatgtcaacattagtacaaatcaagaactatatgttttgatatctaacatatgtaattttattatgaaattttatatcattgaccccgccctaaagattgatatattatctaaaatggttttaagtcttcatatctatatttaatatagaaacctaaactcataaagaaagaattctgaactacattcgtagttgaaattcatacactataaattaagaatgagcttaatctaagattcttattgtaaacaattggttaacatttgacattagtaagtacaattaaatatagcgtatacgagatctatgataccgacttataggtacatatctctaacttgatgaaaatctatgaaggaagctaagctaagtcaataaacatgtatttgtgtaagtattttctaatgacattgattaaagaaaactagataacatatatatgtcctccaccgtttgctgataatacgtgtaaaagatgtgtttaatttcccaaatacattgttattttttttacgtcaatttgcatacattgtttatttagacatcgcacatttgtattttcatgaattatagtttctaacattttttgatacattcataaactttgtgtgtgtttataagaaacatttatctacattgtcggctatattaaaagttaaaaatgtaaacgcccaaaccaattaaaaacaaaatacacaccattacacaatcgcaagacaataagcacataacttatctatatacttttgtcggctagaaaaagtcgactttgactttaatttttaaaatgaccaattatcacgttctttatcagtatattaaaattttttctcatgaaatataaccatcaccttgttatttatcaattttacatctcttctcaaatcaaaacgctcccttgtttatattctccctcgcgcgatatcatatacaaatgaatagaaaatacttggatcgtcgatcatattcatggtccggatcacaagcaagaccatacatatgcgaattttgcgagagaggtttttccaacgcacaagctttaggagggcacatgaacatccacagaaaagacagggcaaaacttcgacaagcgaacctaaaagaagaagacagtgaagatgccatttgcaccacttcgagaaatcggtttgggcaagagcttattgagttacctttcttcgttgatacggtcggtccaagaagaaaaggagaagatgataaaagcgaaaaaggtttaggagatgaagaaaagaaaaatatgaggatacttcaaaaggctttatctcaaagtgcagacgtgatagatcttgagctccgtctaggattagatccttataaaaaaacaacaagtacaagtacgtaactaataactatatatgtgaatactttaatccccaagtttgtaattatgtgaataatttcgtttgattagatattgatttgttaatattacacaaaaattagaatatactgtatgtacataatggttactgattgtgatgagtttttaatcattaaatttgtgaccaaaatttgtgtaaatggtatttagggtttcatcatatattttaattgtgaatcttatgaaacatgaatacaacgtactaattagcatatttgaaacaaaagtgcaacttttatagacttgaagtgattacagaataaatcagaaagtttcgaaaaatgaaaaaaatgaagatattaagcaggacatgttgtcaatgaaaaacgaaggaaatataacactttttttttgttttcctccgaaggaaatagataacaattatagttgcagaataggtaagaaattattgcttattgattagttagtagttaccataataaatgacaaactacataccaaaaaaaaaaattcgagccttctactaattaaaaaccctagtctgttctagtttccacccatgcacggcctattcttctcttccttttgatcactctatctctccaagtctccaacctcattccacctacacaatgatttgaacaaagagacatgagttttatactatatgagaagacaaatacatacattgatgcagagaatagggagagcataagcaggcatatatatgatgagatctttatgtgatgaattaatggattaattagctgtctcagtgaaacttcttgtgaatcaatagataagctaacaacaaaaattactactgattaaaaactatagtcgatttcaaaatacaagaaaaagtccttcacgagaaaacattttttttttgtttgaattgtgatatgcatggacatggtcttgggctcttggcaattgaagaaacacctgcctagggtgttatttgatcaccattaattattacaccaccttataaaaaaaaagtagctcaaaataccaaaaaaaaactttgttctccaaaaaccacacacttcacattaagaaagctttcaaagattgctcaattatatgtcttcaaatttcttatgcaaacttggtttatattgatgcaaaagcctaattattgactaaccgacaaataataatccggtttgatatgcgttttagaacaaaaagaaaacatacatgcgtacaaaccaatgtgtcgtagtcaattcaattatatattgaaccaataaataaaaaactaattgttcttaaaaaacattactaattaaattagtctataactggaaataaactaatttttggaatcacgcgtcaatcagtggagaaaagtgagctttaaatatttgaggatagtcttttgcttccagaaagttctccacatttttatttttaaaaaacaaaaaacaaatcgcggtctagatcacgccacgtgttactaagatgacgtggtatccgaggtggcacaacgtaaatccccgtaattgattctctctctctgagtcaactcgttctctcttgtttctctccgtttcgagactcatctgaaaaacacgaatttgcagtgagaggtgaaacgcagatcactatattgttttgggttttgtgtgtgagtggtttatggtgattttggatttggaagaatcgttgccatgaatgggaatattgtaggaaaggttccgattggggaatgtaaagcgactgtagtttacatgtccggttacttaccaggagctgcgtcggagaaatccccgattctctcccctgttcccgtgcgtttatcggcggctgttcacggtggagattcgtggaaagatgtatgtggtggtggttgtggattcgctatggctatttcaggttggatttattgaaaagatcataactttgggattcttggatttacaaaagatgtgttttttttggggatttactaattttgtttgttgatgggttttagagaaaggaaagcttataacttggggttctactgatgatgaaggacagagctatgtggcttctgggaagcatggggtatatttctttaagatgattgaattttgtctcttcttattacctttttttttttttttacgaaattgattcgattgttgtcttgtattgaatacgattggttaaggaaactccagagccgtttcctcttcctacggaggctccagtcgttcaggcttcttcaggatgggcacattgtgcggttgtaacaggtaagtttaacttctctactttggcttctattacattacactggtctatgacttgaaacatgaaatggagtaatgatacttgtaactgtcattttttgtccatgacctgtgtgttgctgtgtaacagagactggtgaagcatttacttggggttggaaggagtgcattccatcaaaggatcctgttggaaagcagcagagtggctcaagtgagcaaggtgatatcggttgggatatctttggttgtagtgttgttatttttttattgttgatggatatggtaacgttttcaattgtgatagtgagtccagcatcacaaggttcaaatgcggctagtggtacgacactacagaatgagaaccaaaaggtaggggaggaatcagtgaagcggagacgggtttcaactgccaaagatgaaactgaaggccatacatctggaggcgacttctttgctacaacaccttcacttgtgagtgttggccttggagtgaggatcaccagtgttgctactggtggtcggcatacgctggcattgtcaggtgaagttgaataaacgactttttacaaatccgagatgaagctgctaccttgtagttgaagattcatttgaggatgatcatgtttttacggaagtttcagatttaggacagatttggggttggggatatggaggcgaaggtcaactaggattgggttcccggattaaaatggtgtcatctcctcatctaataccttgccttgaatcaattggatctggaaaagaaagatctttcatattacatcaaggaggaacaacaaccacgtctgctcaagcttctagagaacctggtcagtacatcaaggccatttcatgtggaggtcgtcatagcgcagcaattacaggtctatcttctcttctgagttattcctctgtacactgatcaaactggcttgctatgaaataaataaaaaggttgcgttgcagtatatgttttgtaaaatttagaaaactttgtaatggtttgatcttgattgcacgtcctttctaattacagatgctggcgggttaataacttttggctggggactctatggacaggtgaatattttacaacttagcaatctttgactggttatccaactgacttaagtgcattctgtttagcctctctatgtgctcatgctaactcgacaatttacttggcattcagtgtggccacggaaacacaaatgaccagttaaggcccatggctgtgtcagaagtgaagagtgttcggatggaaagcgtagcagctggattgtggcacactatttgcatctctagtgatggtaaagtgtatgccttcggtggaaaccaatttgggcaactgggaactggtactgatcatgctgaggtatctctcataatcaagatttccagaaattttgtgccattcatgacctgaaagatctggtattctcaaatattttatctcctctcttctgatttagatattaccgaggttgctggatggccagaatttggagggcaaacatgcaaaagcagttagttgcggcgcgcgacatagtgcggttttggcaggtatgttatttcaaatgttgatggccgaaagggacctccccaagtcgaactgagccctagcatttgttttcagttgttttaacgagaagaaactaaagagccctagcttgtgagatgctgcaacttgtcttcaggtctccttttgcattgttttcagttttaatctgtggtctctctttcaggggagataaagctagctctttccttcttagaacatgtgacatgttcgtgaaacactttgcgttctatgatatgtgcctgatgttgatacaccttttaagtttggttcattgtaatcagtgaaggtgtggtactgaatgtattatctgttttttctgattaacactgcaatttttgtttctgcagaagatggtcagttgctatgctggggatggaacaaatatggacaggtacgatgttgttcctgatttggtttgctaagaagttatgtgagtatgtctcatgatcactgcatttgtacaaatagcatctcatttttgcaatctctcctgttgttaatcaacagctgggtctaggggacacgaatgaccggaacattcctacacaagtccagctggatggctgcagactgagaaaagtggcgtgtggatggtggcatacattgctactaggagattcacccacttgagttttcccaaccaatcaccaaatcctcagatacacatttccgggttttgtctgtaggtttgacgatgtacatacagacaggctttttgctgtgtatgtatttccttctttaacattaatccgtcttcatgttttttacttagggggagagctttgactttgtattgtgtagcaaattgcggaacaaagaataaaactgtttggtatgaaaaaaaaaactttagattggtaatagttgcgaatataaaattttcaagagttgtgaggataactcatctactaggcttctagttacataaccacatacagtaatcgaataagagttttaattaaatttcaaattacaaaggagatgaatgcaaaatctttagtatattccataacgaagcgttaaatacatgtatatgttaaatcacagataagtcatgactaaaattttaaatcactgtacctccattgagtattttaattctatgttagttaaaaacaactagaaaaaagtgtcactaagagtgcaataataaatgtgttaactaaaatatgctggaaggcacaaaggactgaacatgggtgcagaagcgaaagtcagtaaagatgctattttttggcgatttaaggatctatgattctattgctttaattaaaagaatcttagagatctatggttttgctacctcattcagaacgatttaaggattcctaaatacaaatacttttacgagatttgatcaccattatttatacacaaatgttttataaatacacaaatgatcaccattactaaaacacaaacaactcaagtatatgcagttcttcagagcaaaaaatctatttaaaatggattgacgtagagtggacaaggattttttaaagatctttcgtacatttagtgtgttccaaggtcttaaatatcattctatatgtacaaacaaacttaatttgatcactcatattatgaattacagtcgagtgtcttcttaaatatctgaggattggtttgtgaaaacctccttaccaaaaacatttgtaaacctaagatcagtccgaagtttcgggaaacgatacgtgtactgcttttttttttttttttgttaagaacgagacgtgtagtgctaattaattatttcaatatcttgtgtagaatgttattatatggttgggtttattggccagttggctactgaacactttcaagtataaagaagtaaagaactatattcctcggaacccatgtcacgttgcaggaggtttgtctcgttgctacaccaaagttttattttggtcaaggtggttacgtttacatcatttaaaagtattagtggaaaacatactttttaaaaatttataggtgattattttggtcatggagtcaaggttccggtatatatatatcagtcgtatataaaaatgaatttatgtaaacaccaaacaagttatttaaataagtttgcaagaatgtgaatggtaagcactataggaattggtgaaataaagatgaatggaatgataatcatataagaataacttttagttcataggaatgcatgattctgctatgtatttaagttatctgatactaatttagttgctaattatgggaaattttgccatgaaaaaaaagaaaattttggaaaaatcacgtaaattttttctaaggaatattccagatactaaaactctatacataattacatatagatggacatgtatgatgatgcacgcaactaaaaaacaacttccacttgtgtatcctacttattttcgaagagaaaaatattcagcattttgggtcaattcgaggagatatcagaacacagcttttaatgtaccatgatgcaatcggaacattgaaagaaactatttgacaagattttactattttaaagaaaaatcagaaatcatagtacacatgctaatatacttcccacacaccctgatcagaaagagcacatgcccatacaactaaaaaacaaaacacaatggagcttccatggctctctctcaccaccttcactctttccctacttatctacttctcttcaactacacaagctttcaaacgatgccctaactgtggatctacccgagtcccgtacccgctaagcacgggactagattgtggcgatccaggttacaggatccggtgcgacaactacggttccctatggttcgacacgctcaatggctcaaccaatccaatcaaaacaattgacccatcgggccaacggttcgttctccgtccaccaggtttcgaacaaaacaaatgtgtctcggtcgatatcaagtaccacggtattcaactagacctaaaccttccttttaatgtgagttgtagtaacacggttataatcatgaactgtacaaaagatggtctagatgcgtacagctctcaagggtttaactgctcagacaatagcttgtgccacaagtttctaaatgcaaatctcgaggcacgaggcaattgccgaggcgtgacgtcttgctgctggtataaaaccggggcatcggttaatacttacaaagtttatcgagctaggccagatatgtgttcggcttatcagagttttatgaatttggatctgacgatcccggttagcaaatggggcgaaccagccgtggaaatactatgggaagctcctagagaaccggtttgtaagagtcaaggagattgcagagatttattgaattcagtttgttcgaacgattcaacgaatttaggacagaagagatgtttctgcaagaaagggtttcaatgggactcggtcaacgcagtatgtgaaggtccggtccggttttgtgatatggtttttgattatttgagatttgagtcttttactaaaagcaaaattgttatttgtttgtttagttaacaggtgctctaagcgtaaaagttgcaagcgttggagcaatttacctttattaggaggtaatcaaaattaaatcagatggttgaaccgggttagattcggttacattctttggtttgggtatctgatttccaatttttctataccgagaaggaaaccaaacattctttggtttggactgattagtttctgttattgaacaggtttagccggtggtgtgggagcaatattgatcgccggattcataacgaagacgatagtctcgaagcagaatcggagaatcgccggaaaccaatcatgggcaagcgtaaggaaacttcatcgaaacctgttgagtatcaacagtaccggactagatagaatcttcaccggcaaagaaatcgtcaaagccacagataatttcgccaaatcaaatctcctaggcttcggtggattcggcgaagttttcaaaggaaatctcgatgacggaaccaccgtagctgtgaaacgcgccaaactcggaaacgaaaagagcatttaccaaatcgtcaacgaggttcagattctctgtcaagttagccataagaatctagtgaagcttctcggatgctgcatcgaattggaaatgccagttcttgtttacgaattcgtcccaaacggaactttgtttgaacacatttacggcggtggcggcggcggaggaggattatacgatcatttaccgttgcggcggcgtcttatgatcgcacaccaaacggctcaaggacttgattatcttcactcgtcttcatcgccgccgatttatcacagagatgttaaatcaagtaatattctcctcgacgagaatcttgatgttaaggttgctgattttggattatcaagattaggtgtgagtgatgtgagtcacgtcaccacctgtgctcaaggaacattaggttatttagatccagagtactatcttaactttcagttgacggataagagcgacgtgtatagcttcggggttgtgttgttcgagttattgacttgtaagaaggcgattgattttaatcgtgaggaggaagatgtgaatttggtggtgtttgtgaggaaggctttgaaggaagggagattgatggatgtgattgatccggtgattgggataggagcgacggagaaggagattgagtctatgaaggcgcttggagttttggcggagttgtgtgtgaaagagacgagacaatgtcgaccaactatgcaagttgctgcaaaggagatcgaaaacattttacacggaatttaaatgtttgttgaaacgacgtttttgtgttgtcgtttaagaatctgtaaataaataattttggaagagaatttagagatgtttcactcttctttgtactaaacagcaatgttatttgcgaatacccgttgcaacttgtgcatttgattcgtaactattcggaacaaaaagatcggaaaaaagctagcgataaaatgatgtgatcctaggtataagatgtttcaccgattggaattactcttctttgcactaaacagcaatgttatttgcgaatatcccgttgaaacttgcactagatgatcgaattcggaagactcaatgactaaagcatcaatcattgtgaacaaggtagtagtaactttgtttttaagttctaagtaaggtgtagtggttaagagagaaatgccaatatgcagcagtagcacttgattgcaagaaacattgatagattcgattagaagcagattgttaacgtcatcaaaagctacaaagatgtctcaacattccaagaagaagaaaaagttgggagttctttgcgaaactaactaaaccgaggctaagatccaaaatgtgacatgagaagaaacagcaatctggatccaagtgacgaaagaaagcgctacagctacttcatacctaagacatggatattggctttgagtattgcaatacttgatatctttttcatacaagactacaactcctgctgatgaacatgcagctgcaagagataacattgccgtcacctgcaaaacaagaaaaacaattctcaatcctttaaaaaatcatatcaagaacactgaatttaatgtagcaaagccataaaaatgtggtgttgcatacccaatcaccaacgacgaataagctaaccaagatagggttttggagatctttctttcccctgagagcataaacatcaagacatgctagcccaaagctccacaacaattgaagacccattgacgcaatcaagtagctgaaaccaaccccaaaatcataatcaacatcaacgagacttgtactactactaataaacaccaaaattgcttgcagaaattccactaccatttctactaaatccgacaactaaacgaacaaaacaaggttaaaggaaacaaatcaaaacttgaagaaagcgaaaccgtaccaaaaagcagtgtgaacagagaactctttagcagagaccataacgccgattgaagcagcagctgaagcacattgtccgattctcagtaacagaccacacacagttcccggacctcctaaaagcttcttcatttcaatcaataacgactccaatttctcttcccaaacccagaaattccgacaaaatcagcgaggaaagaggaacaaaatcgaacaaaaccctagttcagcaagtaaaaagctacatttgcttcaggagaaattttggcggggaaaaaaagaaattgcagaggaaattcatagctaagaataaccctataagaggattttgtcacctacaaacagaatttcccgaaacggcttagattcgattataagctaagcttcttccttgtttctcctttgacattctctttttcttgctttgctttttagtggactgagataagtgagataagcatcctacgtggcagcacaaactaactttttttttttttttttgtctttttttttttttagcgattgtatttggtcgttaagaatctgaagtattatttgttgtatttttgagttctaaaaatgtgtatgcaaatgcaatgcctttttgcctgtctctatgtggctattagaccattacataagttttcgtagtaactcgtaaaattgatcaaaattgcaacaaaacagagttaaattgagttccaacacaagttaagtgtttgtgcttatggatcaaatatcatcatcttatcaagtctttacaaacagtggaatcatcatctcaataactccactgtaattagacctatcttaagctaccctacattgtaccaaaacctgttcttaatagctcagtgctgataaaagatccgataccaacactgtaacaaatccatcgctagtcaaatctactcacaagaactgaaagagatggatctctagaagatatagtaagccaatatattatttctgggaacgcggcttgactcagcttgtcatttcttcctttactacacttttaagtttaccctccttatgtggattttttctttgtgcttgaatgtgatgcacaaatgcagctactataacatggagctttgggggaggcttgcttgttgaagagacattgtgaccagcatcttttaaagctttggcaacattcttctgtgctttctggtagtgcacgttacacagtacaggaacagtcgatgctagtgttggttttccacaaagtaatggtcctgctggagatctgaatgtacaaagcaaacaaatgcagagttagtagagaaccgctcaaataatcatcatgtgctaattacaaaccagcatgaaaaagtacatatctatgaaatctggattgtaacaaaccgaatctgataataacagtgtatcaatctgaaaccaggttaatgttgtattccaagtcacttacattttcaaagagctcatctcaatgttcagttggaacacattttcaaagatgacataataatgctaataatactcataaccctacctcgtttgcaaagataccttaatagagacatctttgtcacttatgtatatcaacgcagcacatcaatcaaggttatgaaacaagtcaaagtaccgaatctatatacggttaccaaagctaaaattttctcccaatccctacggaaatctttgaaacagagcaaagtctcaatcctaaaacctttccgcaggctcaaagaagaaagaaactatttcttggcacaaacattgctttgcagtttcaattcatcatcactacaacatcttaaaccgactatacaatataaaagaacacaacttgaagcaaacctgttgatgacgtttgtgcaaccagtgtagagcttctgcttactatccttgagaatatgcaattgacagtatttggtaagcgccatagctttagctttgcatccatacatacagaacccggaattgctgtttgcatactgatcaccatcattacccttatctccactaccttctggatcaagcctccgtctcttattcgattgattttgttcgtctttaaactgactaaccccatacttacaccaataatccctgtgttgcgccttgagatcctccattaaagcccaataatggtttttataacacttggccagctgctttaggttgtctgctcggcgtcggagaagctctgggcgtgtgaggtgactagagcttgcgaggatttcatcttcttgtaacatcgtaatcggtgaattcgaggtcgatggtaagacgtttgtgctaggtttagggttccgaatttggggttcaactgaagtggaagccacagcggtggaagatgcagcgttggaggaagacggaggtcttgggggtttcaaggagaaagggttttgctcagtgttcttggcagctgacgccattgtcgtcgccggaaaatgatgacagagaagattcaaaatgcgagatttttttttctcttaattacttgattgaaaacatccatgggcccaaaccaattatttaactattttatcaatgtatgggccaaattattcaacaaataggcccaaaggaaattggatgtgaaacctgattttctgaattaggtcaagtataagtactaatagcatctctttcgagattacgccgctcatttttagggtttcagatataggcagattctcacatttgcaaacatgacgactcagatcagcaagaagagaaaggtgaattgtgtgattctgttcattttgttctttcaatggatttatcgtattggaactgttttggtaactgtgttgagattttgattttgtagtttgtagcggacggtgtgttctacgctgaattgaatgaggttcttacaagagagctagcagaggatggttactctggtgttgaggttagggttactcctatgaggactgagattatcatcagagctacacgtactcagaatgttctcggtatgtttttgatcttcgagcttaatcatttcttctattatacggtagtgactgtaaaatttgattgtatttcaggtgagaaggggaggagaattagggaattgacttcccttgttcagaagagattcaagtttccagttgacagtgttgagctttatgccgagaaggttaacaacagaggtctctgtgccatcgctcaggctgagtctttacgttacaagcttcttggtggtctcgctgttcgtaggtacgacatttctctagttcgtttgctatgttactttgtttgatcagtttagtttatcattagagactgatttggataggttactagtgtatataagcattcaccgatcgttatagttgtatgtttagtatagagtaattgttcttatagactctgtatggtttcaaataggtattgtctagcttctaagtgtaatgactttaagttctcatgcaatggttatatgttgtatagggcttgctatggtgtgttgaggtttgttatggagagtggagctaagggatgcgaggttatcgtgagtggaaagcttcgtgctgccagagccaagtctatgaagttcaaagatggctacatggtgtcatctggtcaaccaactaaggaatacatagactctgcagtgagacatgttttgcttagacaagtgagtttcgtctgagttgttcttattagagttaagtaaaaaatcaacaacgtctaattaaagtgttgttaaaccgaatatgtagggtgtgttgggaatcaaggtgaaggttatgcttgattgggaccctaagggcatatcaggaccaaagacaccattgcctgatgttgtgatcattcattctcctaaagaagaagaggccatctatgcacctgctcaggttgctgccccggctgctctcgtagcagatgcaccactcacagccgtagattaccctgcgatgatcccagtcgcctaaaagaatcctttgtactagtcgatgtgattttgttttcaactgttcttgctcttttgacagattatagcttctcgtatcttcgaatcagacacgtttcctctgttcttattcgaaaattatctcaagtttccattgttgaaaaagccctttttagtttcataaatcattctctctttggcaaattattctgaattaattcgtaatattacaagaccagtttgtccaaattttggtacatccatcgaattaactaatcgtaattactaattactaattactctcatcacatgaaatatgaaaacacaagtatttgcgtttagttatatccacgtgtttgaatactaaccgtctgttgttataaaactccgacgattttcccgctccgtcgacacaaacctcctccgtctttcgtaaaaggttctcgagatctaagtctcacttctaaagctctgacaatggcggacgaaatcggattcttccaactcaacaccggagcaaagatcccatcggttggtctcgggacatggcaagctgctcctggcgtcgttggagacgccgtcgccgccgctgtgaaggttcttctgtgattttccgtctcatggtttctcatttgactgatccttagagatctttgattagatgttctgatccttacatagtttggtttttccctcaatattggttgatcttgggatttacggattgatttggaaattcgtttcagtagcagaagaacttaataatcatttcgttttctgcagattggatatcagcatattgattgtgcttcaagatatggcaatgaaattgaggtaaaattcaccgatccgaatctgtatcttccatagtttgcttcatatagttcatcttttgacggctcgttacttgatttgcctttatatagaacagtatatagtatgatcgttcttactcgattggctgttttatgtaattcttactaaggttaaccaatttatatttaggaatgacaattgcacacattgtcttgtgtatctttttcttaaactagctttaagttatgtaggattaatggagttatttgttatagactgtttacaagttcatttgaaatgtggctttttgtttttcttgatggagaaattgaaagctttttttaacctgcagattgggaaagttctgaagaagttgtttgatgatggcgtagtgaagcgtgagaagctgttcatcacatcaaaaatctggtattttgttcatgaagtttctgcatctctatcatttttatgcattttcagtttccctcgtttgcttaagcctcttaacctattaaaatctacaaattatgcaagcacaggttgactgatcttgaccctccggatgtacaggacgcattgaacagaactcttcaggatctgcagcttgattatgttgatttgtatctcgtaagcacgacttctttgaacaaatgctgattttttaataagttctaacagttttcaagatccgttcctttcttcaatatctagcctgaattgtccggatctctggatttgaaactatacatatgcttgcttatactttgatttgtttcatttgatatttttttcaagatgcactggcctgttcggttgaagaaaggtactgttgactttaagcctgagaacattatgcctatcgatattccgagcacatggaaagcaatggaagcactggttgattcaggcaaggcaagagccattggcgtaagtaatttctctacaaagaaactctcagatcttgtggaggctgctcgtgttcctcccgctgtaaaccaggtggaatgtcatccttcatggcaacaacataagctacatgagttttgcaagtccaaagggatccacctctcagtaagttttaaaacactaaacatttccaaatcatttaatgagtccgaatgtcatatttatatacacttcgtgaatgttgattgtggcagggatattcgccattgggatctcctggaacaacgtgggtgaaggccgatgttttaaagagtccggttattgaaatgattgctaaagaaatcgggaagtctcccgcacaaaccgcgcttcgatggggacttcaaatgggtcatagtatacttcccaaaagcacaaatgaaggaagaatcagagagaactttgatgtcttgggatggtctattccaaaagaaatgtttgacaagttttccaagatagagcaggtaagtgaaacaataaaccacatttctgcaaatttcgtatctgtgagtagtcttaactgtaacctcttgtattttggattttgaatcatctctgtgcaggctaggttagtccaaggcacgtcgtttgttcatgagacgttgagtccttataaaacacttgaagagctttgggatggtgagatctgaatcaaaagatgtcttttgttgaattttaaagttgaaaaagaacaaagttccactgctttaagctttgatcgagaatgtgtaaacgattcaattttcaataaaagtaggattttgcagacatattaacaatctcttatgttcatacagtaaatcactaatccgagaggttgatgatagataatctaacagttatatttgaaagagaaatatagacgagtattagactgtagatagaatctgattccattggcctcaaagcctaataattatctttaataaagcagaaaaatcgaaaacatgaattcgcataaagagaaactaacattttcaattcaatgacaaagccacatagctaataaatcgaaacctcaaaaaacaaacaagagcttatgacattgtcagattgtctctcactgttgtttagcttcgaccttcttcttctgccagagcctgtccacgccactgtctgcgtctccctgcagatgcaatcataatgtcaatatacatatacaatcatgaactttgttataacaactgtggagatgattataaagtaattagcagagtggaaattcacaaacctgagcacggacaaatccgcagagagcaaaagtggtgaattggccagtgtagagaccattagcatcaagatgaccaatgttaagctgaactgaagcatgatcctttgatgtgatcattctgtttgttgccgagctaaacaaattaccattacacaacaatagaatcagcttaggctacttaattaagacaattagcttaagattttaatcaaacgttacacagagaacaaagagagctgatatataccatttccttggaatgtagagctctgtgacctgacctgcgtcgttctccatttttgagatttagcttcaaaaaaaaatcgatctgagcaagtaaacaaacaaaaaaactaatcagatgagcaatagaacctcgaattaagagattcatcaagaataattgatcacattcaacaataatatataatcaacaaaagacacaacgagataactaattctgaaatcgaaacctagattattccgatgcgttaattagcaatacagtgaaaggagattaagatactacggagaaattctcacctgcgaggaagaagaagaatctgagagaggtttggcggcgacaaagatagggtttgcttaattcataggtttattagatttatagtagcgagctagggtttgcttatttcataggaatgactactatacccttcaacttttaattgaagagcaataaaaaccgatccaattagagcggtatacaaaattaaatcaaaccgaaatactaaactttttcaaccagaattgtaccgacagttaattgtaaccggaatcgaacgtaaccaaaccataaatactggttcagtttggtagtaacttaagttcattcaatttgataacaaacttttattattggttcaaatgtttgcttcatggatgaatttttcagattttcttgcatactttttcccaaaatggtttgtggtagacaattgagaatgatacacataaaatggttgacaagtttgttctctgttttgtaataatgaggaattcagtttttcttgtttgtgaaattttgactctttatcgaaaccctctcaagaacctgaaatcacacatcaaaaacaaagtacaagagacacaatatataatctaacgattgtgactgttaaagtttaacaactcatacaagtatcacttcacccaatgtgtttctgtcccgaaactgcggtctccagcgtctccaagcccagggattatgtacctagttcatgacaaatacataaggacattaaaatacaatcgccagttttcatatggaaagccaaagaacctaatgacttaccccttttcattgacttcaggatcaataattccagcatatacatgaagcctgaaatgtttcaaatagtagccaaacagtttagtaaaaagagagttaactaaatggtaagcaaggtgagagttgatcttttgctattgattacccggggaatttctcgttaagcttcgatagtgcaggaggtgcagcaatcgcacaaatctgtaatcagaaaaatcaaaacaattaacacttcgatttctgacaaaagctgtttcctatatatatgcttaccactttgatttgctgaacagacaaaccacgttccttcaatagatccatcgccgccattatggtaccacctaaaatacaagttactaagttactaaacctacgcttctagctatgaaacattcgtattaccatgtcatgcgttcacattcacatattatcgtgtacatttgaacatcaaaccctaactatacttctaatatggaggtggctaaaatgataagactttcttacctgtggcaagcactgggtcgaccaaaaatactcttgaattcttgggaaattcatcaggcaacctaaagaagatgtatcaaaggtgttattataaacacttcagtaactacaaacacaatgctgcagagaagttcttacttgttaagatacaccgatggtaaaagtgttttctcatctctacttactcctgtaaaagaaaagaagcacggggacatcaataagctatttgataaaagttttcatttttgacatccgaagttcaggcaagagatgatatatagctagattactaacctaaatgataaattttattagcaggtaaaactgaggatgcgtgttccgcaagagcaagaccagctcttaatatcggaacaacctacacagagacaaaaccaagaattagaaacgcttacatgtaaggtcgaaaagaaaatatagacaggaagagtttgagggataaacaaaccgcaataggctctctaggatcaatgaattcaacagaagcaggacccattggagacattatttcacccacaacagttggcttaaccgcatagagcaaaaaacaaaaaacaataagcaaaaaacgggtaggaagaattcaagaataatagagatgtgaaattctacgcaccagccactctcgtgatgcttcatacatgagtaatctccctagttcagctattgcattccctagataattaaaaaaactcaagctttaaagatcaacacagacttatactagtagcaaacctaaaaaaactcatattcaaacgcaatgtagcagataacaccaatctaagagctaaagattgtccaacgaatcaaaaaaaaaaaaaaaaaaaatggatgtaaaattcagttctttaacaacaaacactggttaaatcgcagaaatactcataagaatcttatctactcactgaaaacaggacaaggagtttgttcatttctcagaacagagatccagtgtttgatcaaaggatgtggtggcacaaagacctgaaacaccagaatcaaattcacatctttcactttcaaatcaaactcaaaaaaaatctgaaaattgaaatcctagagttttattaccagcatcctgttgctcccgttaatggaagcctccgacgcagccatttttgttctagctcgtatagtccgtcgggaaagtgacgaagaagaagcacccaaattctttaaaataatccagaaattcgaaaatcaaaattcagtttgaatatgcaaaaggcgttactggaaaagtgtgctttggacattagaataaatatatatatatactcgatacctgtgcgagaattggggaggaattaaaggagaggaaagaggaaggattagggtttaggcggctgctgcattgttgtcggggagcaaaacgcagcgtatcagaagaacacctgaaagcgttaccaattgagcacgccattttcgacgagatgtccgaatctggttcgagatttttgcaatgacgatagcgcgggcgaagattaaccggtcgtcactactgtaccgaataactttgggtctacttattacacggcccattgggcttttatattaatttttagcaatttctttccaaacagaaatctacaaattaaggaataaattaataaataatttattaatttacatagagagttttctaatgtagtaactttttaaaagtttctacaagatatttttcatcatagagaatatctttctaaaaccaattgcaagtaaaaaataattatcatgtctataaaacaatatcaaaagttttgatacagtaaaatattataactaaattcaaataagaacaaatacgagtttaagcaaaaaaatattagaaatttcttacatataatatattagatatatatatattttatatttatacaattactaatttataatattgatgggatcatatatttacataggattttcaaaaaaattattattttattaatttatcaatttgtgtcactttttacagtcccaactcgggactggaaaaaattattaatcttatatagattattaatttatcgagtattaatttatagaggttttactattacaataaacttgaaaacttatttagactagactccttaactcttctcctcttcaactcattcatcagtttttgtaacaaatctctgaaactgtacaaaccagacacggattctttgtctgagaattcaggcacaattaagaagtcctaagccctgtttgaagattctcaaaagtctttaaccaaatacagcaaaaaatgtttagagaaagatcaaaccacaatcaaaagtttgtaaaccgaaatagcaacaaaagtctagagaaagatgaaacaacacacatagaaccatgtcttgtggatgtaagaaagattcacttaccctctgtagcaaagtgatgtctttctcaatggtaactttcactctcggcttgatagctttaatcgctctctcctcgtatttggcgagtccctgaagatctgaatctatcacttcctcaattctcttcttcccaatctttgtcctcgtagcaaaataagggagctcggtgaccgaagaggccacaaaagcaaaatcgaagacgtcatcatctccgtccagagcacgaatgagtgactttagaaacgatatcatagcgtatgctgaagtgaaagatcgggaagcctagatcggagataactcgaaatgttaagtcccgcgaaagaggaagagaaaaaaagaattcacggaagaaaaaaaacttaaaacggaggacaaagacgagaaggaaggtgattatcatccgattcacttccaacccgacgattgaacactccaagttaaacgagaaagaaggactcacggtccgagtttctaaggaacatccgaatttctttcaactctcggtcatacttcgcaaaaggtaatcggattttatgacccgcatgtgagctaagctttagcgggttagaccgagttaagagacatagagaatccgagaggaagtaccccgagaaaagaagaaccaagaaaaaacttgatccgagaaaggagttgtcgttaggtggttagatataatctttttcaattagtaaaattaaaaattaaaatttttttatatatataatagcaaaaagtatgaattgtttataattgataaaatatataatactaaattacataataaattttataattggttcaattgaaattcaatataataattgcacaaatgcaagataattgatacagctatattgtaaaagtaatcgaaggatgtgtagattatccaagtggttaggattttataacttgtacaatatctattttcactgtaatataactatataagtttacaaccccgtacaagacattttacactcgaggatctccaatgttactattataaacacacaagattacacaatcacactgtgacagaagacataagagtcattggagccaaaaatctctattttttactgattcaaataatatctgaggtcttcggcgttgggttggtctctgagtttagccattgctctccgttcgatcttccgaatccattctttgctaactttaagaagcttcccaatctcttccagggacttgggcctgtagtcttgaagaccataacgtaggaccatcacttgcttctctcttggctctaacccttctagaagatcatgtatgtctctcctcgcgctctgcctcatcacggcctcctcaggactctccatcgttgtgtctggtgtaaattcctgcatactcggaaaacaaacgttgagtctcaaaactgaaccaaactgaacaaaaagaatagcttaaatctaaactgaaccaatctttatgataaacctgatggtaacagtattttcatatccaaaaaaccaaatttaaacttaaactaatcaaatcttggtccttgttcgatagacatttctcaaaaccaaagattgaagcaaactaaacagacataccaggaattttgtagtaaagcaatccccaactttcttgtcaattgaaccgaccacttttaggcattggttagctgctcgaatcttcttcaccgagtggcctgttagttttgcaatctcctcatcagccgcatattttataccatggctcgttttcagggtcttacgagccttttgtatatgattgatagttcggattattgatgactgccaaaaaaacagaaacaataaaggaaaacaagtgaggttctagctttgttgaaaatgagacaaaaagggccaaaaatcaaaatgcacaaacaggaatatggacgcctcttgcatgccgtgacaccatcgtagacattgattttcttatccaatactgcacatatgttgaaaacttgtaaccccttgtgtgatcaaacctctctgctccttgtaacacccccacataccctgcctgaaaaagccacaacattaggacaaaaggaactacaatgacaattttaattctttccacttgcaaagtttcatcatttgtgtaccaagcagaatcatgaaaccaagccagacgtttcctatctgttctttctgtaatcctaatctaaaacatagaatttttgcaagactcttaatacgattctaaggagagagatgaacctgaattaaatcttcgtgggcgattcccagtccacggtaatttcttgcgaggaagagaaccaaagaccgggtgcttttcaccagttcatctctacagtaccaaccgtaatgtagattgcgcatcaggagtttctcgttcatcccagctgctgcagcccaacaactcaaactcgctaccttaccactttcttcctccagttgtgttctgattctctccatgtccgccactatctttaaaagatacatgagagtgtcgtaaggttaacaaaaagtgaacaaaggaaaggaaaaaaagttacaggaagatttcacactgaaccttgactcctgttgacatctcagtctcgtttctagagatcctctctcttttctttctatattttggtggtcttctcactctagggacatcaatattgttccatgtagttcttaaaccgattggcagagaactctgatcaccattctcagctgtcacactcgacctccttgctttcttttttacttttctcctcgaggatacaaagacttgttgattcggcgtagtatccaccaactcagttgtgtcagataagcacgacgtgattgaggaaccacgatacctagatagacaggttttaaataactcagcagcccccaacttccccatttgcaacataatatctctttccattcttacagaatccaaggcaacaaacgtttcctctagtgccaaaaggttctttgccagtaaattgtattgcaacatgctacgagatgaatatgatctttctgcagaacccacgccaatattttcctgaaaacatggcaaagaattctgaatatcgcaaacaaggaaaaagtgtgaaaaagtgtccatctgcagtgaaattcaacacacctttgggtctttgagctcaacataaacattattttgtgcagtgtaaggagatacagatgcgcagccacatgcttttagagaatcgttctgataaattctgctttcctctttgactgaggatagaaacgaccacctcgttgcaaccacagaagtcattggaattctaactgaagcatcaagtaacagagaagccatccaacaagtagcaaagacgtcaaattttggatcaagtagttggttatatgaaataagaagcatctaatttttcaagtgaaaacccataataacaacggcaagcacaaagagacgttgcaaattcgatcacaagagtgaccgtaatcataatttttgtactcaccgaaaatggggaaagaagtttggtcagatctcaataacgagagccaatgtttaatcaaaggatgaggatgtacaaagacctgatccaaaggaaaatatttcacactaattcaaattaaattcagagagaattcaaagaaagagaagaagagagcgtcatcgggctaccagcatactattggtagaggtcatagacgatgttaaactcgatcgcactaaaatacgtggccgagaagtagaggaggacgacgaagaagaagaaccaacaatctatcatccgaaaaataaaaacacacagagaaatcagctcgagagtggacgcacgcgtgtctatacgattgatatgtacatgtaaggagagacaacaaacctgtttgggaatggggaacgaattgaaggaagccattgagacgcagatgggagcggaggaaggagatgattggagtcagtggagagatatagtttgtgtgcaaattgtatggtctacgacttctctcttctaatttgcctaattccctctctccgtttcgttgccactcttttttttttttttttttttttttttactcagttgtaaatttttatacacaaaatatctaaacccaaatccaaattttatgcaaccataactgaataaaccgacgttttcattcaatgtatatgtttatagcaatatcctaatcactagaacatgaaatgcaaacgtaaagaaatataaacttggtctatattaaaagagaagacaaaataatgctttgtgtaattatgaaaaagataagccatgaggattctatgttgtacaaatctaccagaggaccaaaaaagaaaagtgaaagaaacagaggatcatcgactaaaatccggcatgccctccgtcgcaggcggcacaaccagtatcatcatcatcattttcgcgattaggtttagtgctgatgcagcaacacacgagagccgccagcaagatgaatccccaaacaaatgcaaatgattgtgccagcttcaagaatttctccatttttgtgttcatacaattcctcttcttgtcatgatcacatctctaataaaccacccaaaagccttgaaaatttcattttaatatcggcagaaataaaagaatggaacattgtagatatgcatatcgagaaagatgtgaacaagtgttttaatttatagagaaagaggaatcaagaccaacatgttcgagagtataaaatgacctgtgactcctttatatattaaaccatgatgggatatgatgttgaatgatctgtgggcatgtgtgggatttattatatgttttaatgaccttttttgccagatcgaataattttgttggttgattctttttttatgttatttatcattatgtatgcgtatatgactattacaacctcattttaattacctttaatggaataaatgatacataactgaattattcagccatgaaccaaacacgaggaataaagaagaagaaaaaaaagacaaagcattcaagttttttaaaaggaaggtaagttttctgtttgtttttatgctggagattaaaagtgaattactgtacatagatggtttggttgaattatgaaaataatgctatgtttttgttatttatttaagaaaactgtcacaagtgtaatatattatacattgccaaagttcttcatttatatattgccacaagtgtaagaattccttgaatcatttttattttgatttagtgtatcatctaagtttttctgtctcttgactcacatatggttctaagtctaagtggatgcatatgaatccctactgggccaaaaataaagagaagtccatggagattataaaaaaagttttatggcccactggacaagaagacaagttcatacatggttccgctaatatatgaaaaagcacaaatttggtccggtatggttaacaattttgatcaaattgtcagcattttcttatatccaaagagttccagatcatttgaaagaccatttgaagattatgaatgttgtactatccgagttaagaacaaaaaaaatctgattttcaaaggaaacacatgtgagaatcatagacataaacatgcaacattgcaacaaatgaccaatcatgagagagtttgccaaataccatgctaaagattcgaaccaggacctttaggtatttagtttgagtatattatctcccaaatttgaaactgaaacgtaaggattatggaaagaaataaacggctggaaagagttagcaaaagcggctaaagtcacaatcaagcagaaaaagctagtgggcttttcacaacggcacgctatataggctgctctggatcctacaaattaaaattcttgtgtgactacttaacgctatttcctactatttatttatacgtttatatcaatatacacgtaatcccattttcacacttcatataaaacgtttatactccatctttatttttattttatcgacaaatttgtttctgtgaattgtttcaaatcttcaatccaaaagcagttcatacagaagtttgttttggaaatgtaaacacaaaaaatatttgtaacggacaccaataatttcaatagatattaattaatctgatcaaggaacaacagattttttgttttgtttaaggtagtaatgtttacaattcgaaaatatttgaagatttgtagtaacgacgcgtagaaacataagttcgtagttatttcataactttaaattgttatgattggtgtagcttgtagcgatgacttcatagtttaagaccactaatcatgctgtcattatgtccactcaaagccgtaattttaaataaaaccatactattaaaatttaatacaaatcatcatcatctccgatcgtataaatcagaagcgtcattttacaagttgattcctttgctctaataatattagtaaaaaaaaactttgcattgaattcaattcaaaataaacctttctttctttctttctttcttctctatcattttatctgaatccgcctcccaaattcaatcctttaattttcaactccaaatcgatccttcaatcaatttctgaaacttttagtcatcatcagctcaatttcggatctccggagttgtatttttactcctttgtcggaggtaaaatggctcagtcgtcgttggtggcggcggcggggagaagcggaagggttatcggcgattatgcggtgggtcgacaaatcgggtcggggtcgttttccgtggtttgggaagggaggcatcttgttcatggcaccgtcgttgctatcaaggagatcgctatggctcggcttaataagaagttgcaagagagtctcatgtcggagattatcatcttaaggaagattaatcatcctaacatcattcgctttatcgacatgatcgaggtttatatttctcttgttgtttctgggtttttagttttttcttattgctcttagtttctagctagaggatttgaatgcgatgagtctagatgtttaggtttgggttttggggtttagtgagttctctttggttgtctagtaaaatagaatcagaacagtcatgatatggaatgatgtagctcgtataagctgacattgttggtgggattctaaaaatgtgtcagctttgttgaatattacaacgaggaaaagactaggtcatatgttttagctggacccttatgtaggctgattattagttgtattggaaatggtaaatgtttaaactttatgaaacttggtttaggctcccgggaagataaatttggtgttggagtactgtaaaggtggtgatctgtctatgtatattcacaaacatggaagtgttcctgaagctactgctaagcattttatgctgcagttaggtacaagtttgaaaaagattcttcatcatttactgttttgtttggatcagtagaatcacattctcattctttgtataaattttcggtgtaatagcggctggcttacaagttcttcgtgacaataatatcattcaccgcgatttaaagcctcaggtatgtctgataactcaaacccagatttgatctttttatgtcagttagaccatgacaatacgtgagagctcattcttaaagattaatctctcgaagagttgaaaggacgccgtagaagggtattctgttaggtttctcacaggatatggtttctttccgagaaattctttcactagctgagataaagattttttctgaaattgaaattcgattgctaaggttctttcgttcttgaaacagaatcttcttctatccacagatgataatgatgcagctctgaagattgccgattttggatttgcaaggtattttagtcagcccctttgttacagaaacaatgagtgtaatgtgataatcagagttggtcttatatggtttctgcttttcttgtatctatctatctagcacttaaacatcacactatctagcctgtggtagcaccctttgagtttgtaattagcacttaaacatcacactttcttagctcagatcgttgcagcctaggggtttggcagaaactttatgtggttcaccactgtatatggccccagagattatgcagcttcaaaaatatgatgcaaaggtgcgactttttgtttctatataccacataggccattcttataccatatcctgcttaaaatcttcattgctacacaggcagatctctggagtgttggtgctatattatttcaacttgtgacaggcagaaccccttttacaggaaacagccaaattcaggttttgtatatcaagttttgaaaatatctagaaatgtaaatgtttgtgttttggtgaatgcagcacggctaacatgctctccatcttatgtccacagttgctccagaacattataagatcaactgaattacattttccagcagactgtagagatttgagtaccgactgtaaagatctatgccagaagctactgcgtcgtaatccaggtaagcatctttgtaaatatatttccagattctgttagcatatgtgggtttatctaattttgaagaagttacaagagaatgcgcaagtcagactattttcatttttgtcatggtcacagtttttgttttgtgaaaaattacggctaaaaatttgaaattgtccatttgggtgtcttaaacactctgggtattgatttcaaatggacgtttaccattaagctcctttcatggtccttatttgttagtgtttaacattttatttttggggatcttctgtccgacagtggaacgtttgacgtttgaagagttttttcatcatcctttcctttcagacaaacaatcatatgatttcacaaggtagatatggtgctaaagtagtttctttatcatttgtggtataaactgttttattgatgatgatttacgttgcaggagtagattagattcacgaactatgaacgattttcattcatcaggaagcagtccctcaagaaatatagaagaaatttctcaagaagacgggttgccgttctttttagatgatgattctagtggacctgagggaagcccttcatcttttaaacatacttccccgatgaagtcatcttacggatttagtgttgaaagaagggaggcagcattaagtcctttgaaaaacatggatctttcttccagatatagtagagtcagtcatagagcagaaaccaataatttcaagtttgagggccatagattatcagatagaagccaattcaaaccgtcaagcttacctgattccagatcatttagtacccaaggaagaggtaatcaaatttctataatttgcttagcccataaaactaaaattgtctttggaaaagatgcctcgcgcagtttctaatatatgttggttccggaagtaggggattctccagactcaatggatcaagattatgttctgatatctggaccaccggttgatataccatcatcttcatctggttctccgaagcctttcaattacccattcaaatcacattctcctcctgtagagttcatcaagagaaatgtaactaatttaacggctcctatgccaatagctagtgctactggcaacaaccttagtcgatttggaagcttggagagtcagaattgtatcccgggtacttcccatgggtctctggatcttgtagatgcttttgaacagccatcaactaacagcttgacaagaatccggtctttgcaaaagtgtgcagctgcaatagcagaattggttcatgaaagggttagcaacttcgaatatagtaaagttctgcacaaaaccttactaacttgagtttctgagcgttttcttttcacgtttcttttttcatagggtgaaaatggtaagcatttagaagctttctcgatccaactggtgattcttgcaatttggaatcaagcactacacatctgtcatactcaggcagtctcgggtatagaaggaagcctgctccaagacattaacagagtaggaagaaatatcagccacggaggatcagagaagttattgcctcagattcagaaagaatttgtccaggaagtggagcgtgctgaagaacttgccaagtttgttgaatctggtacgcattttcttgaagtaaccaaactgctgagacaatctctcgtttctttattttgattagtcagaatcgctaaagtttagtggctaaactaaaacatcattgtagataatgcaaagatgccggatgcaatggagatgatacttcaagcagctcttgctcttggcataagtggaggagtaagtttatatttccttgatgaacaatcccaaacgaatctggttattattgcttgttatttacatttcactcacaagtaggagtgtccaatccgggtttggtttctgtgaaatataagatcaaaaccaaataccatttggttaccagaagtctttaaagagtaggcaaatctctctttttgttgagactttggaatttgacaattgcaggtagatgaagtgatgggagacgcagagaacgcaggaaacctctactcaaaagcggtgcgtttgttagtcttccttgcagtggaggcgcagacgctgattctcaatccacctttaacactcacaaactcagtaaggtatcgactcagaacatatattgactcactcataaccagattgaaacatctgcaatcacatagaagaacttcatatcctcagaagcaatgaggaggaacaaaaaaatccgaaatggttctcgtgtttgttttgttcagtgtctgtaattgtaatcatttgattgtacagccaaaaccaaaaaacgtaattcttaattcttttggggttaatccggagggacttgtaacattctctttgctgtgacgctcatcaattgtttctatagatttaattttaatatatttgaaaagaatctggttaaatttccatgtatgatgttgtgaatcttgtgatattgaaatatatattgccaaatcggtgactgaacttttttcgttatttcatgttgtagcaaaacattggacgatgtcttattcgaaagctctattgtctaaactctaaagtctaaacatcaaaaagatagggacagaacgaaaaccaaaactttctgcagctacatatattaagaattaggaatccataaggaaagagatacaaagaccataaagcttggatcaatggaagagctcttgcacaaggcaaaattgttatcttgaaagatgctaatggaggagcaacaaattgtaaatcttaactcctaaaaactgcaactactagactactactatacactgacagacccaaaaaaactactaccaaacaaaggacaaaatgattgtctgtttcttaagcagaaagtagcttacactaaagtatataagacgttattaattagggacagttgataagagcttcttcaattcctcgaatgtcatgaaggcgatgccaacaccaggaaccactttgtagtattctggtatgattcctctgtatagccctctcatgccttctgtcttaaatatgtgtttgaatgttccaaagagtcctgtggtatacactctcgctcgcccaccagctccttccaactgcattcttcttctcaccaggtccaatgggaatgtcgctacaaaagttatcagtataatataacaaactttcgtgtaattttctttgggctaaattatctatggtaactagagagaagggtcagatcagatcaaaaacctgtagaggaaacaattccggagagactgccacaaccaagactaaccacggcatttgaatcattaggcctgaacaagttcaaagacaaatgtattacgataggataagttaagactcttattggacagatgaactcactaggcaatattgatagtcaaatcccaaaataaagaggcatttacctatgagagagccaaaatgttttaaaagtctcatacgctgcgaagctgattgcaagacttggaccgacaccctgcaatacaaaagatgtaccaaaaagcttcaaggcaatactagttggatgataatcttacagctagaacctagagcatctaagacgattccaagtacactagttctatattactactagaaaatacaccaaagaaaaacacaaacttaaactatagatgatttagttaaacttttaatactttacataacacaacacttcttaagtttttttgactatagcgtgttattctttttaaaaccaacaacttcaatttcatcatctttgaacttaaagatagattccttaaattctcaagcctgtagtgtgtttttaagttgtttttagagtggtcactaagtaattacagtctcacactctttaaagttcttccgaaatttgatcctgagcatgaaatgcatcatcgagaaatcatgtctatattcttaactgcttacacaacaattaaaattcctagtgcatatatcaggtgctttaacacctaatcagctgtttaaaccacctaattggacattaagaccacttaagacactccaatctaccctagcagcctagggaaaattgcactggaaggtattggctaaatggttacttataccgactaatttaagactaccaaggagttcattcagaagaacaagggtaggcaaataaaacataccaacaatgtcgcaccaagtcctttatatagacccaaaattccctcttctctgcaaatggtacggaaggcatgcccaacaccctgataatagattgaatttctctggaaaggatcaaagataatgtatttaggcaaaggggagactaaaaaccctttcttcttaatagttaaaattaacgttgataatacaattacctgtgcagaaagccgtgtccttacaagatcgagagggtaggtagctgaagcagctgttagtccagccaagccaccacttacaaagtgcacagaaatgtccacacccgcatttcctttataactctgcaagactggattcgagtgcaagaactgcaaacaaaaagcaaggcaaggcttagcatgaactactacagaccacactctaaaagagacttgaatgcaacttacagtcttgtattcttcatatgcatagaagttaactgcaccataaggaagccgatgagctacagtaaccaagtttcctttccaaaatgctctaaaaccttcctccttaacaatacgcgaagcttcatgccaaatgtttggactgctcaagattgcagcttccgactgcataccttgtatctgtcaatacaacaataaaatcaattcagcttcaaatagccttagggtaagtcaaagtttccaactttatatcataactggatccttacacaatcataccaagaatcaaattcagatgcctgaaaatttcttaaatttcacattaacttgtaaaaactatacctgaaacaagattgtaagacgagcaagaggagcggtgcatgtcttactaaatgcgccggcgattccaccggcgagaagacgctcaacggtgccgaaatggccttgctgctgattcaacgactgtttattactttggtgatgttgatgacagctttgtgtctgttgcgtctgtggttgttgctgtaaaagtttcctgtttccggcgtctacgacggtgttatgaacggcggtggtggtggctgtattaagagctctctgtcctccttccaccactacaccgactcgagcttccatattcaaatctctttctctctgtgagattactctgtggttgatgcggcggagatggaagctgaattcgcatcaattaaagcggaaagggtttctgaatttttgtgatcggagattgtcagattggagaaatcgtcgtggagaaggtaaaccctagagaaacccctaaaacctggtctgcgaaggcagaagggtgttttggtaaattatgtaaaatatgatgacgcaaacacatatatatagcaagatttgttccgacaaaacttaagaaaacaaaaaaaaaaaaggcaaaggaaaaagaaacacaaatttgatttttgggaattcgaattttcaaccgccaacattttaacaaaaatatggatcgtgtcacatcaacaacactaacacaaattattagactacttcttaaccagctatttaattgtaattgtttttttatttgtttttactgtaataaataaacaactaacatgtaaatttttggtaaatgataacagtaaatgtctagatcgtgattagtaaattgacatttccaaattttagtgacggatttgtgtttagattcgatactgtatatagagtatggagaagtatgaacacctcccaaattacttgcataagaaatgattaattggaacagctttccactaccacattagcttgcatatcattccgaagcacttgcatttgctcaaaccaaaagaagatggagctaaacaaaaataaactagcttgaaaaaaagataggtgtaacatgagataagaaataatggcatttctatcaaagtgctaggaaacaaagttaagtttattatagcacccgaagattaatccttattatgcaaattaagtttctagaagtgggtcatctcacctaggttctctcactacaaagtacatgtaaattaccattgtggcatggttgtaacttgcaagggataatcagattgaatagacgatacataaaaatgtaaagtcacggtaataatatatatcatcaaacctactcgtattttaactttgcgtgtgtttttgaacaatctcatatttaacttatacccgtgaatcttgaacggatcgagataggttcctcttgtcggactatatcaaggctaataagctagtccattccttacgactatatttaaagagaaagagagtgacaataataggattgtacattttgatacatattataagagtgacatcaattagaaatgggtcataccttttgagaccactggctgcagacagcacaaccaaaaagcttatcaactaatctaaattagggaattaataaattaatttaccaactaatcatgtagaagaagtatgatttatttttgttgtccaagcatcaagatgacgaaatgatattagaaaaaagacaagtatggagaaaaggtaagaaaaagtatacgttagccaataggactaatcattttatgaatggctgtgaaatgaattgagctgtagagcaaaaaaaaagttccaaattatagaaacctatctcgttatgtttaggtttatgagttaagtttttgaaatgaaaattacttttctaatttgtaatttggaccacctgcatatcaaagatctcttccccattttgtttttagagtaaatcataaaacccgtatactccaaagtttcatattaactgaaactattttaacaaaaaaatcattcaaaatgtgtttttatcgactaaaaaaagtagaaaaagttttcttttgttgattatgttttttcatgattataccttttgagcaataaagggggaaacttgctagttaattaactgaaaaatacgtttactaatttttgtttttacctgcaaggctctgcctctgattacaaaacaagatcgattgtgtttcctgataataaaaataccttttttttttttgtagtagtagtagtagtagtttgaagtttgaaccactattacgtatctcttttgttgaaatcaactatgagtccgcgggacccacatagcgtcgtacttttccgatcatcgaataataaatcatcacagataaatcgacggctgtgattaatttacagtgtacaccttttccccactctaatcttcttttaagtgaagcagaaagcttccaaaagcttagccaacaaaaaatggcagaacttattccttggtactacacttcagggtcagggatcgtacttgtacttcaaaccatttttctcttctcgatcgtacgtgctgatttaccaggctcatgggaactcattgtacaagacgccggtatagcttctatgcacacggcggtgacccggttcaacacggtcatccttctagaccgaactaacatcggaccgtcgagaaaggctcttgaccgtcaccggtgccggagagacccaaaagacgccgctttgaaacgcgattgttacgctcactcggttctgttcgaccttggtacaaatcagatcagaccactgatgatacaaaccgacacgtggtgctcgtcgggccagtttttatccgacggatcgttgctacaaacgggtggggataaagacgggtttaaaaagatacgtaaattcgaaccctgtgacccgaacgaaacgtgcgattgggtggagcttcaagataccgaattgataaccggacgctggtacgcttctaaccagatattaccggatggttcggttatcatcgtcggtggtagaggaactaatacggttgagtattaccctccacgcgaaaacggtgccgttccgtttcagtttcttgctgacgtggaagacaaacaaatggataatctctatccgtacgttcatctcctccccgacgacgacggtggcaatctcttcatcttcgccaacagtcgcgccgttaaatacgatcaccggataaacgccgtcgtgaaagagtatccaccgttagacggtggtccgaggaattatccgtcaggtggatcatcggcgatgctagctatccaaggagatttcaccacagcggagattctaatctgcggcggagcacaatccggagccttcacagcgcgtgcaattgatgctccggcgcatggaacctgcggacgaatcgtagctaccgcggcggatcctgtttgggtgacggaggagatgccgttcgggagaatcatgggagatatggtgaatttaccgacgggagagattctgatcataaacggagctcaagccggaagccaaggattcgaaatgggatccgatccgtgtttatacccgcttttataccgacccgatcaaccaattggtttacgattcatgacgttgaacccaggaactgtaccgagaatgtaccattccacggcgaatcttttaccggacggtagaattcttctcgccggaagcaatcctcactatttctacaaattcaacgccgaattcccaacggagctacggatcgaagcgttttcaccggagtatctgtcaccggatcgagctaatctccgaccagagatccaagaaatcccgcagatcatacggtacggagaggttttcgacgtgttcgtgaccgtgccgttgccggtggtggggataattcagatgaattggggaagtgcgccttttgcgactcattcgttttctcaaggtcaacggctcgttaagttgaccgttgctccgtctgtgcctgacggagtaggtcgttataggattcagtgtacggctccacctaacggcgccgtttctccgcctgggtattatatggccttcgctgttaaccagggagttcctagcattgctcgatggatacgaatagtttcttgatttaaaaccagaggagatatttaaaatgttaatttgttaaatagttaaacacatcatgtaatataaatattttcatggaaaaacttactccgcaaagttaaccatcttaatttgatctgattcagtttagacttttagttattaagttaaaatgactataaaatcacttttcaaaagtgcaacaaacagtaaacacacacaaaaaggaacaaaaaatggttatcatatgaccaaaccaatagctaaaagttacataaacttggacgtcgtcaccaccgtcaccaacaacagcttgactcggctacacactcttgtaagtgtctttcatgcccacgatcacataagcacatattagcaacggtcaaagtggctagcatccagtaaaagcggtccatgcagctgctattaaggtctttcccgaaccagcccttccctcgcgcccctcaaaggcttgcaccctaatatcttttcaactcaacatttttctcatgaagctttttgagagtttagatttttacttgttgccttattcttgtccttcagtataagtgaatcttgatttcaactgtgtgatgcttatgttacatacacgttgtcgagtatctaagtcttttgacaagattagatccgataatatagtctgtgcatgtttcctgtaagatgtataacatcatcgtactaagctggttcgttgggttgctcaaagtcccaaatcataatggtaaaacagaggtaatgtaccattatgattaattacctctgttttgaaaatacgtatatcataatttaaaaactattttgtatataaatttggacttggaattcagttctgtaagatgtattacatacgtttctaaaggctaacgccacactaatgttaaaatgactacaaaatcacttttcaaaagtacacaataaacacagaacataaaatggtcatcatatgaccaaaccaatagctaagttacgtaaacttggacgtgttattcgtccccgtggctgtctcaacgtcatcaccgccgtcagcaacaacagccagactcggctgcacagtcttgtaagtgtatctcatggccacgatcacaaagcagcatatatttgcagcggtcaaggcggctagcatccagtaaaagcggtccaagcggctgctattaaggtctttcccaaaccagcccttcccggaaatttcctcggctaaatgatcactaaccgttatcaaaagattgttgacaaagctagccgctccaagcacgctgaggtaaaacgctatgcctaagcttctcatagaatctgggacttggtcgtagaaatattcttgaagaccgacaagggtaaaagcatccgcaactcctaagactaggaattgaggagctaaccatatagcactcaaggtcatggtcttattcatgtggtgttccttagcataatctaatcttttcttctcaatcagagcagcaatgatcatagcgaataaggagaaaaccataccgaccccgattctttgtagaatgctaatgcctctttcgtttcctgtggcacgtctcaaaagaggaacgaggagtttctcgtagattgttacggtgatgattatggagagagctatgagagagaacaatgaagctggaggaactatgaagcttgtccctgtgatgtgtcggtccattattatggcttgtttgataaagagtgttgagctttgagtggcgcatactccaaaggctaatgtaaagaaccagattggaatcatgttgatgagtagcttaacttcttccactttcgtaaccgttgcgagtcgccatggactctgcttctcggctttagtgttctcgtttcggtcctcaataactgctgctttgtctagaaatctgcaaacagaatcggaatcacttacatgcatgtttggatactataatatgctttaaacggattcaaaacttatgtaattttttttttttgttgaatatttgatcaagactaattttaaacccctgaccgaaattgtaacaaatcgatccatattattttggatatatgctacttgtttgctattgttaaaaaaaaaactaaaacatccaaaccaaaacctaacttaaaccaagactaagcatccgagttgttatgcacttacttaagattctttgagctggaaagaagccggcctttagtatactcttcattagttaactcatgaagaagagaagaatcactgggacaaggaagatttcttttggcaatggcggcgacaaagacttgcaacattggggtcaatgggctaccagaaggtgctctataacggtaaaacggtttgccgatacggaagataaaaaacgaagtagccataactattgtgagtatgatgctagccacaccccaaccaatccggtcttcgatatagacaattacagtcaccgcggttaaaataccagcgcatagaccagcattccaccagttaaagtaagacattttcatttttcgttcttccggatggccatcttcgaattggtcagctccaaagctctcaagggatggcttatgacctccagtgcctatggagatcaagtagattgcaatgaagaaggctatctcgtgggctttccttggctcaacacacatgtcttcatgacatgctttcaatcccggtataaaccaagacaatgttaacagaatcaagccctgcaaatttgtaaattcaacaaattaagacaagaaacaaggaaacaaaacatatatcaagttttgactaatctcaaaatttgttgtgtgtgataagatatgaagttattagagctggtttttataatagtgtccaaaaggtactaccgatcaaaaccgacaacaaaataacaaaaataaattataaaatataaaatatagatatatatattaataaggtagatatataaatatatatttaaaattttgaactcatgatatttttgggtatcattgactcggttatgagagtatagaagaggtgtgtatatgtgaaggtctatctttaaactattgaaaaggatcgataatagtttttgagtattattatttatccggtttctcagaaattagtaccataaggtaaatggtggttgcaagtaggacagttccataacggccgagataagcatctgcgacgaagcctccaagaagaggcatcaaagtagtgacaccagaccagtagttcgtattttttacagccatcttgagatcttggtgaagaatggtagtcaagtagaccactaagttcgtggagatcccaaagtaacttagcctctcgctgaattcgatacctttatgcatatatcaaaccataagactataacgtaaaaaatacttcacacataaagttattttatagatataattcaaaaaaatctctttagaacgtttgatatatacataccaatgatgaagagtgcagctctccaagctccggtttgagcccgaagcggaatctctcctctactatcggtcgaagaatcgagaacccatttttgttgatcatcatatgaatcttgaggttctgtatcaaccttgttgtgctccataattttttgtgttaatgattgggaaagagagagagagagagaaagaggattgttgctgagtaagtgtgtgatgtgtttgtggagaagcttggtcctcttatataatggataacattcactatgtttgactcttcctccatagtgcttccaagattctttaaaaaaaggacgacacgttaggtttacaaatagaagacacataattacgaacttctcaacttccatttcgatttatttgtaaatatatatgacataaaaagctaccatttaatttcacacgactttctatttgatgattattataaagtctatataataatacagggaagaaaatgatagtgaagctttgatctaagataagtacaaatctcggtatagtggtagtcatttttttttccattcggtcattttcagataataacttgtgtggctttgtggacctaaaaagagacataaataaagttgaaaattccctgaactcttatgattaaaagagagtcaaacggatttgccaaatcaaatagagatggagacagaagaaacctcaaatttgttcgaagttttctacgaattaaaaagatttcatgcatgaatttccccatgagttaagaaattttattaaagtagaaatgtgatgaccaagttttattcttgttcaacaactttgagctatttatgaagccaaaaatgaatttacacctcaaccgaaagtgaaaccaaatataaagttatacccatagcttaaaaaaccttagcatgcatatttcgttgaacaaatatttttattagaatcttatagagtaaaacctttatatcatatgcgtttgatttgatgccaatagagtaaagattctctctttgggtctttttggagatatctccctcttggctacagccaaaacccaaaacattaatactaatgcctgagccaagtgacaaaaacctcttattcaaattattccaaagtaccaaagttttttttgtccaaatttttttttcaagattctggataaaccctctgtgtagccttctaggatctgatcctcgctatcaacaaattcttaaaagatttttttcttttctttttgtcatatataccacattttatttctagaggatatgtttttaatttacaatcctattacaaatgatgattttatcattcgtttacatatttgccacacttaaaaacacgacgtactcttaacattaaaccaaaaaaaaatataagacgtactcttaacattaaaccaaaaaaattatatacgaataactctataccaaacaatgaaaatatttgcaccacaaatatccacgatagccagttgtgcttgcatcatgtttatgatgtacatattaacatatgagtatatgacactacgtacgacgaacgattctacgtactaacatacaccatgctgaaatttatggtaaatttgacgtgttttaatatacatattttaaaaaaaattgaattatgaacctagtgtagaagtattaaataaactcttatatatagcctcttaaattaacttcaattcaataaaacaacaacttttccggatatggttttcattttttgaaaaccttggtctatttaccatattcgttaaaaacacaactccttaattaggtaatattacccaaaaataggtaagattaccgaatgatgtagaaccatttctgaactcccgtacgtatcttcttcggatcttacctaaaattcactattgacaaaaatattattgcgccgccacatttgaaatttgttttctaagatcatactaatatgatatcatcatctattaatcatgtttttaaacactaccacagtatattaaacgattaatatattgcattctagcaccaatataatcactcacgagaaaagggtaaaaaggaagaaacacacttaaacataatcatataagtctccaagtttaacagtaattataatcacatgattcacatttgcattaagggatcgatttatgcttaatactgtaaccaccatcgaaattaatgccttaaacgatcattatcatctagttctagagtgatcaatactgccaaaaaaaaaaaaaaaaaaatcaagtagcaaagaatttctcgtggatgtgtggttagggagtcatgagaccaatcaagttttattaaatgtgttttaagtgattattgccaggagaaagttgtgaatacttagtggatttgctaccaaaaccaaaatcatcatttccaaatcttttctatttaataaggatccaacactaattaaagaaacaattaatgttttagattatgagtcaactcttatcatgtctgaactaatggctatggttgaggaaagtggattaccttttcccatagtgctgctaccaccatttgactgacccttaagcaacgaaattgaatcagatcgtggatgatttcattggtagtttttaattttaaaattttaattagactaaaaatgaagatgatttataatataggcatatagcatacatagtttaaattattttgttaaatggaattattatttgatgtcaacaacatacatactgatttgaatatggatggtacacaacaacgacaacaatacaaataatcaagctacatgtactcggctatcaaatgaacatgtacgtacataaacaaatgtttacaaaaccaagtgaagtccccccccccccccccaatgcttcctctctctctatttttttttatttcttataactttatttaccttaataattatggaatgttttatttcttttgattgtaatatagactatttaagctaaatttcacaaggcttaccaaaaaaaaagctaaatttcacaagattaacaaatgacataaataggtgggaataatcaatcacgattggtaatttgcaagaactactttgggaatcgtaaagctaattatcattcgtgggttaaaatcaagcatcttgtttcatgtcctttttccctaacgataggaccaccgttgtgaggttactcggccgagggaagtcaatttatgtgtatagtacattgcatgcttcaacaacaagtcttgttgaggtctctatcaagaatctataccattgtgtccaaacaaagaataattatcacatgaagctcgtgcttgtttttctttttggcaaatctaatttacctaggagattctgctatgctttcatgaacaagccgtttttgctgcccgatttctgatcagatactcttgtaaatcttctcttattcttgtttgaaaatgatgtcagagagaatgagagagaggggaggaagaggtcagatttcacatgatgatctttgattgaaaagactacttaacttcttccactaagcgctctcgtgtaatgcactgataaatacagaaatagtagaaatcaaatggatcataagaaacacatgtgattatccaaatgaagcaccaaagtctttgcctctttggttaaaagagtcagatcgaacatcattaccttacgagaatactaaacataacttctgcaagaaaattattaccataactatcaataagtaaatgtatgttgttttaatagtaatttttcgtgcaattacctgcattttaacttttttgatacaattacatccttttagtgccatgaaatgaagataggtatttaagaggagtttttaattggtttatgagtttttttataacattttaaaatacaacaaatatttttcaatacagtgtttaccttcttattttaacctttgtatttttaacttgaaacacttgcaaatatgttcacatccaatattacataaatccattaatatataacgaataataccaaattttgactagtctttagaaattaataaacgaataacacattatctacgaaaaaacaaattaaactaaataatatgttattttcttttttgacatcatccttagtttactatccaaaagccattaacatatcacaaatggatctgccgactaaactaaagaccaaaatgtaccgagttattctgttattgaatacacttttatcctacaaactaacaaaaaagcaccagtggtctagtggtagaatagtaccctgccacggtacagacccgggttcgattcccggctggtgcaatttgttttgttttccaaaatctttgagatttaaggcccgttctatttattttgcagacgagcccaaaactgtttaaacgtaggcccaaatttgatctctttatttaagtcaaaggcatatatcacagtacttatagttttcttcttttccaagaccaaaatttgttggagaacgaacactctcgagacggaatcgatggcgaattctcagacggtgatggctatgatcaggttggctagacctcctttccgcaacaatcacgataaggttgctttcgctattcactcttctttcgtcgcttccggttatatcctcaccgccaccggacggcctgctttcgccgacgaggctctctcttcgtcttctcagagttagtattgattccgtttagttgtttttctgattttttctagggtttaggtttctgattttgtacgattttggaatttttagatgatgttggaatcgaaggatggaacgaattcgagggagagtatgcgtttgtctatgcgaatccgaagaaagggtcaaagaaaattctggttaagtgtttggcgatggatgataaacttcttgttgatgccatagctgatggtggagcagaacctgctcatcttgagattaagtaagtttctctttatttgtgctcgattctgattctttttgtgcaaatctagtaagaattttctggttgtttgtgcagagttggggattatgctgaggaaagcaatgagggggattactctgcgcagttcaagaatttggataagttagtgactgatttgcagagtgagattatcgataagcttgatggaaaaccaaaacctgttgcttcgagagcacagtccaggtaatttcccttattaagcaccaagaatttgatgcctcttagtgtttgatcattgggacttgcaacgaacatatgattgtagcttgtattgtcactgaactgtattggcgatgtaaacttagatttgctcattcgtatagtctttttgacagagttttaaacacactgaaataatgtgcagcagagtctctactaattttgagtctctcttttaatgaactaggttttgatttggtacatgtagtctgttctcattgtggaacttcgttttgtggaggcatttgttaattggaccagaatgatatttgtttcctaatactagaagtgtattctgagatctccattgtttatcatttgttgcttgcagctctgagactaatgaagagcctagatattacgatgatacgcctaatccattaggccctcagattcacccctcagggtatacatcaatttctactcttatgtgctcacaattatgatcaaaaactaaaacttatcggttattgacttgtgtatttcctagcgtggtagttcctccgatacctggtaatggtggttacagtgatctcttccctggcccaggtgctggaatgtaccctggcaggtttgttatagacatttatagtttctattatacaactgtatcactttaaatcatttataatgtcactcaccacatatattttctctcccaaggggtggttttggggatggaagcatgcttgtaggtatgtacgattcttcaatccctcttgagaagcaagatattataacgtcttacttgattataatttgttaaagtgattctgtttggttgcaggacctactgatcctcgctttttcccatttggtgatggttctgatcgacctggcttcatgggaccaccacacccgtaaaatcactctttctttcacacacacatagagatacacagccatagatttgaacacatgaaaagctctctaaattgtttctgacaagttaccatggatttttgtttgtggttttgacaggggtatgccacctcctggtgcgcgttttgatccttatggtccacccggtgttccaggttttgagccaggccggttcacaaggtagtaatcttatgcactcagtagtctccttactacactccacaatcataatctgtttcgcaaatggttctgattcttctttatatcaatcgtgtgtagacaacctccaagagggccaggaggtgggcatccagacctcgagcattttcccggcggttcagattttatatagtaaagtaaagccatcgccaaggaaatagagaaagtgtgtgcacaacttaaagtatggtagtaactacatatagacaataggatctatgtggtttgttttttctcagctgtttttttgtttggtggtgttgttggttttattccccagcacactttttataacttcaataaatatataaataaagacttggtttatttcgcttttaaatttccgttggccaagtcagaatcggtcgtcatatagattatagacaatggcttgactatatttgagaaattgaaaactatagcatcatctcttattgcttcgtgttagatgagtatatattggtgatagatctgacttgtaaactaagtcgtactagtgtttgccaaaacgacactagtttaaacaatgtcaaattttcaagcacaaagttggatacttgtgtttctgtaatttgaaatgtagagtggaatcatttttatatatttattgatataggttcaataacaacaatcacactgatacacatataaacattatcgttattcatatattataaggtacatggagacgtagtagtaaactccaagcttccacataaggcccaatgttatctccttcatccttctaatcgtcaacattttatggaagtgtgtatgctataaccaaagggaaaaaaagaaacaaagaacattagatatatcatgaaaattattaagtaaaagcataatataaagatgtaacagaaagtcacttacctccacacttgtaaccgacgggacggttagcgaaattgcaccgtttagggatggtaagggcaacctcaggatcgacaccggaggctttggccgtgtcggaaagaagaatggcgcagagacatttagggttttgagaaaatctcttaatctgagtacagcaacctcctggcacggcggagttagcgtcctgagctgcaccagcacatggagccagcttcatcgcctcattgtctggcgaagatctaccacactcccctgcaccgtcaacgactgttccgatgaggagaatcagaccaagaatgcagagaaatttcatggaagctgccattttgtttcttggagagattttaaatgaaccaagatttgtgtttttttgtttgttagttgtgtgtttgaattcaattagtgaatgtttggtttatatagcggaaaattgtgtggaaatttgaggcactgaagagatagtggaataagcacttgagttgagtgagggaggtagtgttcttaccaacaacataagttccaggtgttgatgtcttagggatcactgaacaaacctcataattcttatttgggattatcaaatcggatggtggatttgtgggagttgtgtcatcaccgtccttatggcttttaaaatggtgctaatggggtagattaaaaatgagttttgtattgatttttttattattattggttaatgtgaagtgaaacggatgaaacattcttgatctctatttaacaactttgaatcttggatgcttagtatcactaagatggtccaacactgtgttttagccttataggagaattgaatatgttagaccttctgagaagaagctcgaatttattcaagtcaaaaaccttgtaccacaagttaattacataagtataaagagcatagaggatgaaaaccaaagagagacagacaactgtgagactggctctgtctatctattgtgttgaaagaccaagatttgggcagagggtttggcataaactaaggtaaatcaaattcaaggactaaacaaaatcggttaatggtttagttgggttcgttacagaagcggattgcgttcttagtaatgttgataaagtttttgctctgtttccgttgaaactagaaattgggtttcaatcccaccggcccgtataacttcggcccatggttctgatatttcactttactttgttgtttttcttcttctgtcttgatgatcttctaaactttctacgatttgtcttgggtctctgtttctagtaagttttatcagatttcgaaatggatcgtgcaaaataaataaatataattaccacggtgatctatctatttattaaaaaaaaagtagaatattaatatttgatgtaaatatctttctgtagaatttttccttaagaaatattctaatatttagtcaatgatcaatgtgaatgaatccaacctgcccatgtgaaatctgtaccacaaacttatttttaagcaatatattggatatacaaactatttttaatcgagcccaccacatgttcaagcaaatcacatggagtgattccagcaaaacacaaggaatattaaatgaaacaaataagcaagaaactctcaaaactagaagatgaaaacactctgggttctttttttgttgtagtcaaattacaaataaaaccaacataaagattcttttattaataaaaactaaaaagcataaattgcgatgattatttggtaggacttataagataaagacagtttttttttttttttttttttgtagtgagaatcgtttattcgttatccttgacaacggtgacagggcaaggcgcgtgttggatcacaaagctgctcacgcttcccattattatcctgtttcattattttcaattattagtcactagatatttcacttagaccaaaagattaaagtttagaagaattcatcactaaaagattaccaatgataattgttacgttaaaaatatcaagaataaatcaaagacaagtgtttattcaaaaaaaaaaaaaaagacaagtgtgctaaaaacaaaggtgtaaccacaatcttaaatgtttgtttttttcttaattatgaaataaagacaaaattcaaagttaaagctaaacctaaaacctaatccatagctaaagctaaatctaaaacctaccattgtcattttcaactagaccttatccatttcgttgagaagtaattgtcatcaaaattttgaatttaccatattcctcaaaagtatatatgtttaattagatagaccaaaaagacaaaaataatttgtcaaccaaaattgttcaaagtaaagcgagatggtttaataaattaaaccacggattcaaaatcaaagccattggtattaaacattgccttaaattaggtaacgagcgttttttaatcatggatttgttccaacaccaaattatatcaatggccctattgtatctcacattttataatttcatatacagcaatactaaacagtaaacactaagcaataatggcattttggcaagaatataaaatggaatttattacataaaaaagaaaaagagagcaagaaattacctttgaagagcactgagtcctctgcttcccatgacaatagaatcgagtttaagatctttaacagcatcaacaagcttctctcttgcatctccccagtataacttggtcactacatgcacctttttatttcaacaaaaccaccattagttattgtctttgccaaagagtctttgaacaaaaatgtattgttgattcggataaaaacctctttctgcctcgaaccagtgtcgagcatatcaagacatgcgatgtcggttttgacaccgtatttctccataatctccggttccctaaactctgccaacggtatgagagctgcaagcaccaaattaaaccggattaaaccgacagatcatttcttttcagaatccataccataagaagaaagaaacttacgagaaccggatttgaaccagagggagttacgagattcatcgccagagagtggtagagtgtggatgatgtaaatcgtgtctcctttgtctgctaagttctcgatcgcccatttcagagcgttcttgctgctctctgagaaatccatggcgattccgatattcctgtctttaggcatctttcttgaccctttttttcttctcaagaaactttgagatggttttgtttttctgatattttctagagagaaatggtggtgacttgtgagaagttatataaaggatttggaagtttcgttgatgcttcttctgatgcaggatccattatgacccatttgttttcatctcaaccgtccatttttaaatcgtacggtaccaagctaaagtatttagatttttgtttctttataataattatttcaaaaaaatctttcttagaccgacataacgataatgagatcttctaatgaattaattcataattgtttctttagaacccgtactaagcaacgaatccaattacgtacaaacttgtataaaatttaataaattcatttaacgtatcatttttgtcttacagaagctagtaattgcttaaacttttatctctatatattttatttagttttataaatatcatttaaattttattaaaaactctgaggtgtttggatccaacaaattgatggccaaaaaatatcttatatattgatatgttttgtaagttgaatcatgatccgctaataaacaagtagcacaaggatctcattatatcagatgtctttcgttagtattacctgacatttctggcagtgaatttaattgtaaatgagttgtttaaccgttggattaggatcgacatgtgattgccatgaaattgcacgtttgatgataggattaaatttttatcatatgtatatgtaaaaagaaaaagaaacctcaagacttctactatcaagaagaagaaaaatgatcaactaatgacttaatttttgccatcattgtcgtggttgaatttcttttatcgaattttgggctgccttcatgatacaaactagaaaacatcgaggtactcatctatgtttctttattggtagcgatgtcctcaaaaacgctctcccaagcaagatatagacatttttcgttgacatattcttcatattaatgaattcctgttttgggaatatatggactgctttgcttggtatgatcattgataaatagtgccgacaatgtttagtattcttcaaaagaccaatcaacttatacatttgaaaattgaaatcatcctgcctgatcctgatggtttattactttatttctgtgttcttaaatttattttatggggctaatatgaatttttggaaatacctttgggctgatctatttatatgggcccttatatgggcttttcacgaaacccacgaaatgtgaattctttctataggtgcgggcgtgcggccatttgtaggtctaaaataaattcttggatgcgggattaaagcaactatgctctaaaattattttacatgtaatgtgtatgaaaaaagttgattatttgcgagtgatcatgctataaattgtgtgaatgagttggctagaaatgcatagcatgaacatggataatgatgagtgtgataattatcgacatgatcaaaggccggccacaacgattgtaaaagttgtaagtgtcaaatgacattctcaagaacatttgtggctgtgacaagggtatagtgtcaagtgataggggtcgagggtgtgttcgagggcggtatggtaacactaacaagagaaacatttcaaacattctcaataatgtgctcgaatgcttccgttgatgagaatatgtcatgatgcttcacaaaaccctagagtcaaagagctgcgtacatcttttattttgtagaacttttcatacgttaaataagcgtacattgcaagcaaaacattcgaaggtctctctctctggctaagtctaaagttttgaggaaattgggtatggtctgccgtgtatgcatgtgacagtggagcctacgcaagcgacggtaacatgtgcgatccaaccaagtataatcctaatttttgtttggcaatcaaagctgcaaattaatattttctgtcgttggcttctttatgttttgagtttataattcatctttgcgtgttctgcgcgagtccataatcaataattaatcatggattgtactttgtaccggacattatattcggtttaggtgtctgattaattgtgcggacgaatatattaattagttaattataacctactgtttgcgttccgggttaaagtacaatagcagatggattcgtgaatgtttcaaattacagtatcttttttatttttattttttttaacaacttcacatttcagttttttttttatatatttttttttataaagaattttgatccaggaatattaagctggaaattttgagtagagcatactaagaaattcaaaatgtttctgaaaatgcaaaatagttgttaacatattgttattgctaagctatttctttgttaattcaaaatccaaaattcccaaaatatatatagggttaggttagcgattatgatatatatactagtaatcaaagttgtgtaggtaattagcaagtaaggatcactggtactaagcaacttatctgatcaaccaaatacttttaaaatcagaattgtataaagaaatagttgaatatacgaggaaacaaagaaggtcccatatggttacatggttgggaatagaagctgcagccaattatatttttactttggaaacaaacatgaagtatataataacagaaaaagagggagacaaaagcaaagaaaagggaattatgaaaacaaacaggcttaagtaacctcccaaaatactaatataaaagcatttataatatttgatattctcaatcgtgaaattgttattgtcaccgaaatcaaaatggactccaccaccccacccagaaaaaaaaaaaaaaacaagataacgagaagtaataattaaaacaaaaaatcattggttaaattatatagtcaagatctcttgttcggttcagacagtctcgtgttgtccatgtgatgtggctttaatcctctgtatgtcaaataacatcaaaccctttcaatattgtcgaatgttttcatgttctttaggaaacaaatgtttttctctagacatcttttaaaatgttttcatgatcatattaactggccacaaaattctaggcctgctatagagaaactcaagttatatcttaagaaacaattacgagtcctgtcttttagatgtcatatcagaatgtaattagtatagttcgatgagtcttttatttatttatttttgaatgaatgttcgatgatcagtcttacattcctagctcacatcattattatagtattacataatgtgtttattttaaatattcgtttttggcattctcttaaattgggtgtttgccaatttaaaactagaatgcattgtaaaataaactagaataataatcaccatctacaactaaaagaaatcacctaactagtacttaaatatatgaatgatcatcaatctaatccttgttttgagttggaacccataacccctagaaaacaatttctaatttcttaacatacaactacgaaagtagttaagtacacaaacaagaaccattaataatagtttttccacttattataaaattttgcaacctaatgagcaaagacgggcaaaacaactttgctgaaccaattttatgttaaggtgtgtttttgcaaaagaaataataattctttgggatcgatcgacggcgtcttcgactttattatcaacatacaaagacaagaaagcatgtcatgcacgttttatgggccgggaataatgatctatccacaattatatatgtatatttgggtcacacataacggtgtatattgtaatattttcttattaaaggttcgaagactgatttaattgtatcacaaaactaagtttaagagcctttttttttatggtttaaggctaacatacgataatggagtgggagtattcacactaattaaaaagcatggtcaacaataatatgtgatttagtgagtataaatagttgttattatcgtgataagtcaaggaagtagaaaacgatgttgtaataacttcgtttatctttcggcgaaaaagagaaattgttagcatttaggggaaattcaaaatcgaagctctctctttctgctttcacttttttttatttgcggaaaatgtgttctatgatttcggaaagtttgtggaaggccaatcatagtaacattcattctcccgtcagcacaatccaacacatcatctactctaaaagctttaagcaatttaggtatgaagaatttaatacatcatatgcataatgcatcttttatctttctttttttgtcacacatacattataccaaattacatgtatttggattatccaaagctaacccacatagctaagaaacttataattgatgtctatgatgtaaaataaataaaacatggaaacatttttgccgtaaatgtagagagtatgactagtaggaacataaaagttcgtagtgaaattgatatttttagggaagtggtaaagaaatacagtactcttttgcatagacatgatattgacatgcagatgtaaaacgcatgtaaattcctctctattattatgtttcatacgtacataaaacataccatccaactagataaacatgggaataaattgcaattttcattttcctctcgcaattttgtgactatcttataaaaactaaaaaaaattctcgtgacatctcaagtttatctcatgtcttagaggactaaaaacttttatccatcaccgaataaatataaatttaacaaaatgattattcatattagctttcttaaactagtgggaaaataggagataacttgtacgcgaagtatcacaactcgttctctggttatgccaagtggatattagatggggcaaatgtcgccttacgacactcaacaaatcaaactttgccacgtcacaccatcgtacagtgcagttgagttgtttttattttcggcaccgttattaaacccaacagaatttttgtaacttacaatgggtaaacccgtcatttgcacccgtctcgagaaagtatccattaaaaacttgaaagaaacgcgctttccacgacggtatgtgttaatccttacttaaatgacaataatagccctgtctctctctgctaatcatttcagttattagactttcatcatttaaatcacaataattgttccacgtacctaaagaaagatccgacttgtgtatcttaaataggaaataaaacatcgtatactacgtatcaaaaacattcacgcttcacattaaatgctaactaaaattacaaaagggataaaatcacaattgaatcctaaactccaagttgtaaggataattaagtaaaataaaacaaggcacgtgccagtcaaatgacggttataaccctatcacgtggtagtcaactcgctttacagatattccgagagtgaggtcccacaaagtcacttgccattaccctctctgtattagttagtcgtagtagtctagtagtagttggtagcgcgtcaacttcactttctaactgtaagcgcgtgaagaacgaaaccttttccccaccaccaccaccaccacctctctatactacttcttcttcttcttcttccttctacaaatacatgacagtctctttccctcgtcttctagtatttttttgttttctgttatttttcgcctgagactgggtccctgagatttcacaaaactcgttattgaaacttaacaaaacagcaacctccgttattaaagttcccttctcgatttccgtgaaaatttcactttagccatggaacctcctagtagcgtagtcgacgatgctgagttttggcttccgacggagtttctcactgacgatgattttctcgttgagaaggagaataacagtgtaggaatcgatgactccttgttcccgtacgagcctcgtcatggatttgggacttttggctctaccgttaagcctaacacggtgaaggaagatgacgaggagagtttcttagccggattgactcggcagatggttatgtcatctctcaaagatgatttctccggtggagtttgcggtaatcacgcttttccggccggtaatgaccacaaggtagtttgatttcgatctaaaaccaaattcgttctcaatcttctctgttttcgttggatttttaatttttgggaattttgttctccgtggttgttcaggcgtgggaaatgaatcgttcgcctccgtgtgtcgccggaactggctgttgttgcttgaatcagcggtttaaccagaaccttaattcgcgagtttcttcatgggatctgtactgtgctgcggagaggatgagtatcaacgacgaaccataccatagtggcagaggacttctcggatctcccgcaaaactttccgctaccgtcaaaaaccactctaacaacggcaccggttactacaacaatcatcaatctctccaataccagaagctacaagctatccaggtaatcaatcacaagcaaaactctcttaaacacttgatctttgagtttttgtgtgcgattgtgctgattggtttgttttcatttgtcttcttgtgcagtttcagcagctaaagcagcaacagttaatgaaacatcgtcgccaattggtgcgtcagaacagaggagtaagagttaatggcaacaaaaatgttggtccagtggatttgtcgtcttctgcatggtctaatcagtttccgaggcgtgatgttatgagagctgtattcatcggggaccataccggaaaacgtggctcaaccggaaccggtgtcttcttacctcgaagtgttaaccatacttcaagaactgagactcgagagaagcctagtaagttcctaaaaagctcaattccccaaatgtcaatctttggtatattttagttttatgatgagaactgtttttactcttgggtttagctatatcgacggttttggttccggctagactggctcaggtcctgaatctgaatttaggcgaaccggtccggtctacggctactctcaacggtataccaaattaatctcaacctcgagagcttatttaagttaattgagcggtcaattttatcaccagttggtttaatttttttgttaatttatgtagatgtgtcgtggagacagaggagcaacaatggtgggttctcgagccagatggtcggtggcgtgagggcggagcagtcagtgcaagagcctcggttaccatcggagtgggcttattgactgattttatgttcgtaacttttgggtgtgtttagggggaagattttatgatgggtttggtttgaagaaagattagagttgatgacaggtagtgaaatagtggaaaaaaggttagggttaatgtagagatagtggaagatttggaagaagaataaagaaagttggaagtgtggagaggacgaggttttggatcgtttaaccaccattgatggcttgatagatgaagaaaagagctttgagacagacagagataggtgactctcttttctttttttttgggtttttcttttttacttttttactgggaaatgaaatgtcagtctgtcacggggctgttcctttagtgtcatccctctctgcctctcttttgttcacacaactcttaagcaatggataagtaagtaattagtaaaagaaaagtttgttatatgattttgattcccacatcaggtggatatatatttcctaaaatctttgcatgcgaaatcatattttgatgaaaaaatcaatactaagaaaacatgtactctttttttttttttattgacagaatttgacaatctaattttagaaaagaaattctcacaaaccgagagataacagtaataagtaacaacaacccataactgggtaacacaaattgacgtcaaaaggcaaaaaaaaaaaaggggggtaaatctgaggaaagaacatcctaaattcctaatcaatttggtgtcaaaacacaaattagtttcacaagtatgtattatcatacactataatttcgataaatattagtatattacttactaaatccactaaaaaaatttactatgttcttaagaaaacttaccattgagactactactgacagtctgacagaagtaaccaatacaaaaagataaaaaggtgatatgtactatatacccaaaacctaatgagccttgttattagcaacaaaactcaggtcatatagtagtatttaaacaagtgaaatggtaaaatcgtatagaaaggaatttggcaacctattaattaatggatcattaaatatttagaagcacacgagcacttaaataactcgatttttgattaaatgctgaaatgctggtcttctttgtggatcaacgtgcagagtttgtcctatgccatttgttactccagattaataaatattgacaacttctattagtattgaaatttgagttgtggcagctgtttttagttgtattggttttctcggtgtttgtttccaacaactagtaccaaatcatcatgtccagtttttttattattactagtagtattttctttcgtcgacctatattattgtttcaagttttgtaaccacataatctaattagcacagtaatgtagtcatcaaataacaattcgtcttgctcgagtcctgaatccaataccctgatctaaaccattttctatgggagtatgggaatgggactcacattttcatgtgggtgtttttgtatgttgactgcttcacgcggttcgtatcgttctactaaattattggtaattgttcggatatataacatttatgaaaaccatttgcactttcacatgactcgcattaatgccactttcctcattttccatagttcacataagaacaacatagtacatatactataaactatgtgattgattactattttgaagaaaataaagcttgcatacatacaggtttctgtattcacatttagattttcggattcacaagctcgaagtattcatatttgtattttcaagttattttctctgtgttatactcggaaaccacattggcctatctaattaacaaaacatatgatatgcttaaatggcattaaatgctaatatgaaaaacatgtcctatggattattggtaagtgcgagatttaatgaaagttacaatgcttgatttcttaaaggttacaatttcgtactattgaagacaaactatatttgcaagagaagaaattagctaccaaaattaatacagtatagtattccctcttctgtcactatctgttcactgcttctgcaaaccaatattaaaacaagttgacctatttgcaactatctgtctccaattatgtttcaatttttgtgtattttggattttctttgctcggcctttttccttatatggattctgaatgctaggaaaaaacagaatagagtgaattggttctcacatgcatagaagaattttcaagagaaacatatttgctcaactaacaactaccaacccatcaccaaattttcgtttcatttgttgtacaaattatagacccaaaaatgttcatccacaatcgattgaggtacctcatgtacacctatattaaacatacaacataattccaaaatggtttggatccggtctggttttttactttgaggcaaataacattagattatttaagattgaaagctcacaactagccttcttttagggcaaagtacacgtaaccaattttttaattttcatatcgaacttaacaaattgtaaccatttgcaaaaatgaagcaaacaaaaagtacaaaacagattacatggactattatataattggaagcccgtttggccttaaagcccgttaaaaaaacatatgtgtattttttagcaatatgtctgataaaaaaatttaaaaactaatcttgtttaattcagtaagacatttactagacttttcacaattcaacacagttgttgttggttgagctacccagccagtatcaagagaggaaggtagagaggagtgagagagagctttgggatcgatttcatgtcgtagatctttcactctgggtttgcgttccacaaaatcctaattcgcggaactctggatttgatcggcgatggcggtaggcgatcagacggagcagaattacttgccgaagaagaagaaatccgaaacggaagatgataagaggttcatgattgttttatcttctttgtaatctatgtttgaatcagttgattttattttgttgttgctgggagtagtgagtagatcattaatttgagaaattgaatgtggaataggaggaagaaaattgttcccgggagcttgttgaaagctgtggtgcgacctggaggaggtgattcgagccccgttgatggtgatcaggttaataattttggttttgtttttgcttctcgtggtcaattttggttgtttatgagtgttttttcgtcaggttatttatcactgcactgtacggacactggatggtgtagttgtggaatctacgaggtcagaatctggaggtgagattgattgatgaaacatttctcagtagggtgttgcttttagctttttgttaggggcatcgttgaatgtgttgtttgatgttccttcagggagaggtgtaccgatcagagatgtcttgggaaacagcaaaatgattcttggattgctcgaaggaattcccacgatgcacaagggtgaaattgcaatggtaactctaaaaactctttaaagatcagtgtcgcctcaatgataacgtttgtgtctctttactcggctgcgtagtttgggttctgaagagggtcttgttgatttacctcaagttcaatgagtcgattcgccaaatcttccattagctatttcaacttactttcttgattctcaacggctgaaaagtctttatctttttccttttttcagttcaagatgaaacctgaaatgcactatgcagagattgattgtccagtctcagctccagaaaattttccaaaagatgatgagcttcattttgagattgagttgttggatttttctaaagccaaggcgagatctcatcactaaccaagataacagtgcattagttagccgaaagactctgaaattttgcatttcatctgttttgacttatgctttcctttcctttgtgttaatttccagattgcaagtgatgatctgggggtcatcaagaaggtaggacctgattttccatatatgtagacatatcaaatgggtcagggatgatgtatttcttgttcgtactgatggctcaagcattgctttccttttctatgaaagattctaaatgaaggtgagggctgggaatctcccagagaaccctatgaagtgaaagccaggtaatttattcttgatcattcctgcattttgggtcaaaatatatttaaccttgtttttccatttggggcaacgttgagtgaagttttaatgcatttctgtggtgtatattagaatatctgctaaatccggtgatggacacgtgatcttctctcacacagaagaaccttatttcttcacatttggaaaatctgaggtaattgttaagtttatggggcagtttttactctctgtccatgcaaatccattctagtggaatacatttctgactattgctcgtcaattaggcaggtgcctaaaggtcttgaaatcggaattggaaccatggctcggaaggagaaggcagtgatatatgttcgcaagcagtacttgactgaatctcctttgttgcatatagatcaagaccttgaggaagttcattttgaggttgaactggtacatttcattcaggtaagaaagacaaatgcaatgcaataagaaaacagtattttgtgcatttaagaattgggaaactgagcgactgacattcaagttctcgctttgaaggtgcgggacatgcttggagatggacgtctcataaaacgtcgaattcgagatggaagaggtatgtttcacactttcttttcaactgtctcttatctgtttcaacatggtgcgggtttttgttcttatatatcttgctggggcatctgctagattccagctcttgtttatagtttatccgctagactattctgatctacaacgtttgaccaacttattaggcgagtttccaatggattgtcctctccaagatagtcgtttaagcgttcactacaagggcatgcttctcaatgaagagaagactgtcttctatgatagcaagattgacaataatgatcaaccgttggagttcagttcaggagaaggactggtcagttactccaacgtttataggaaaacctagtggagttctttagacgttttagttgaaatatatctctacgcacggactggttaagattattctgtcgtatttgcaggtccctgaagggtttgagatgtgtactcgtttgatgctacctggggagattgctcttgttacatgcccccctgattatgcatatgacaaatttccgaggttatactcttaactgtgtaaataacactaacacgatagtgtataaactgttgtcggagaaataaacgcatttcatgttttcttttctgatagaccacctggcgtgtctgaaggtgcacatgttcagtgggagattgaactccttggtttcgaaacgccaagagtaagttggtctagtgttgatacttaccatggaaattgtaaacagcttccgtttcttataagtctagagattctgtctcaggactggactggcttgaacttccagagcatcatggacgaggcagataaaatcagaagcacggtatggataaaatattctgctaccatttataatttgacctatagtcctaaatttttatcacttcagaatttgctattagctaatcttttctgcaatcaggtcacaccagatctattaatttatggttcttctctccttttggttatactatgaacttcagggtaataggcttttcaaagaaggaaaatttgagctcgcaaaagcaaagtacgaaaaggtaatagaagtcatgtgataaccaattccagtattagcatttgtttcattgtgtctgagcggtaaatccaaaaccaggtgctccgggaatttaatcatgttaacccacaagatgaagatgaaggaaaaatatttggtgacacaagggtgagttccatcttctcattacgtttgtagttgcagatacgtctagatttgataatattagaagtattaagtactaactagctctcgtatccttgctctgctgatatttgaagaatatgttacatctgaatgttgcggcttgcttgcttaaaatgggagagtggaggaagtctatagagacatgcaataaggtagcattcaataaacaattctcttaagaaggcttgattctggaataagaggttgggatttctgagaccttttgtgcaccaatttccaaataggttctagaagcaaagcctggtcatgtgaaaggtctataccgccgcggaatggcttacattgcaggtggagagtatgatgacgctagaaatgacttcaatatggtatattatgctaaacctgcatatcattatctagtgaatagattcagaaatctgcttactcactgacttatgtgtctgtgttttagatgatcaaagtggataaatcatcagaagctgatgcgaccgctgctctattgaaactgaagcagaaggaacaggtcagtgtttgaaaactatctcaaccaaatgtccacccgaatcgagttcattaaggctacttatggtttgggcttgttttgccaattttgttacttaatataagatctctgagttgttttcttttgagctcacaggaagcggagagcaaggctagaaaacagttcaaaggattattcgacaagagaccgggggagataaccgaagttggttcagaaataagagaggagtctaaaactatagaagaagtagatgagacaaaggataatgatgatgatgaaacactggaagaagaaggagctacgacagtgagcacggaaaggaagaggaaatggtcggagaaagcctggccgtttctgaagaacgtgatgctccaaatcggaatccagcttggtgttgttctgatagggattttgattttccagtttgtgagcgccaaatttacatgagagagatatgaatgaataaacaaaccaacggcactgtagactcagaaaatataaaactaatggattaaacgttaagcttaatgtatttttgtttggtttagtttatgaaagtagttgctcaaagatggaattatttgcaccactacacgatcctctcttgcttcctcaagtgattggtgtttgtttgtttcattcaaattctacgagatgatgacaagaaagaagatgttaatgtagaacatgacttaattgtataatctcccaaaatttattcattagtcatctttttatcctataggtaataggattatcctactgtatagattgttgtaatgattagtgttaggtttttgttgaaaaacagtatctacttttctattttttctacttttagtataagatgttttgggaaaacgaattattttacaaagaaaatgttttgtacatatgcaaaatatgtatataaatatgctttaacgaattttatgttgtaggaaatgtgtgattatataaatcaactttagataacacagagtaattaatcccacccaccaatcatccactcggctgaataaaatgtcgccacttttaaaaacaaaaagaaagattaaaccgttttctccgtgtggaactcgcgttttatcgtacacccaaaacgttgcttaaattgattttgcaaaacgctgattttgcttcttatcggagatttttttgggggcaacggagaaatttgttttagggctttttgcttatcatcgtcgtctcagatcctgctaaaaggaaaaatcttttgttctagatttcttcactctcgtcttttgatctcttgggtttttccctgttggtgtcaccatcgttctcgtttcttcgatcgatcgttgagtcaccggcgttaagcccgacttgagttccttagataattttaagattaggttgtaaaaatttgaatttggtgggtttggtttgatgatgttgacccaaactgttggggtttgaagtaatatggaagtggaagattaacaaagaagaagataatgacgctttatattcgccgcgaagcttccaaggttcgtcgttttttttctttctgattttgcttccttgcgatcatatttgtcgtaattggctgaattgtggtggttttgtacatttgtagctatggaggagattttgttcggaaataacaacggagattggtctcctcgctgagaactggaaataccttcttgctggtcttctctgtcaggtttccatcttttaatctgaattcgacagctttttgatcttagtgttgaatgattatggtttgttatacctattgtaactttaggctgtgggagagattaaagcacaagacttgaaatttaccctatttgttttttgtttgttagttgttggggtgtatactttttaccaacctttatgggttcttggcttcagtttagtttcccatttttgacacttttatgaatgaatctgttatgtgcagtatattcatggtttagctgccaggggagttcattatattcatcggccaggaccaacgcttcaagattctggcttttttgttcttccggtttgtctcgattatttcagctggtttggttgatccctttactcttttgaatatcatacttaagctcttcttgctttgtttggggttttaggagcttggtcaagataaaggcttcataagtgaaactgtgttcacttgtgtatttctttcatttttcctggtgagtttcctcaggatttatgtctagttctgttctggcgaaacagcgttatatgaatggtttgttttgtgttaaaaattgcagtggactttccatcctttcatcgtgaaaagcaagaagatatacactgtgttgatatggtgcagggttctcgccttcttagttgtaaggactctttgccctttgctacttaaatgcaatttaaagcttgctcgtcttgaagtttgtttgccaattctatccatcaacaggcttgtcagtttctccgtgttataacattctattcaactcagcttcctggccctaactatcactgtcgagaggtaaaagctaaataaaggtctattaaagagggtttcatccatattcatgtgtttattctggtgagtctcttgtgttaacttacagggttctgagcttgccaggttgccaaggccacataacgttcttgaggttctcttgctcaactgtgagttctaatcatttctccttcccttaatacaatttttggacgtatgtttcttctagttcgtatgtgatgatacgctgatcttttcagttcctcgtggtgtgatatacggatgtggagacctgattttctcatcgcacatgatattcacactagtctttgtccgcacttaccagaaatacggttctaaaaggtacaaagtttctctagtcacatcgtaaaacaataaccggacaaaataatagcttgtaaatgtctctctcacaggttcataaagctgttaggttgggtcattgccatcttgcaaagcctcttgattattgcgtcccgtaaacattacactgttgatgtggttgttgcgtggtatactgtgaacttggttgtcttcttcctcgacaagaaattaccaggtctgatcttttacttgagtgtttacttgcataaaacccacaaattttcttatatgattttgttttaaaacagaattgcctgatcgaacaacggcattgctccctgtgatctcaaaagacagaaccaaagaagagagtcacaaactcttgaatgggaacggtgttgatcctgcagatcgggtacgcatttgaatttgtattcagtgataaatccgactgaaaccccaataattgatgttaatgtgtataaatttccttgtggtatttcagagaccgagggctcaagtgaatggcaaagacagcaatggaggtcacactgataatgctactaatggcacatgagatctctgctcgactctagttttcaggtttttgattgttgttaaatgttgatgacatcattattgatccagaaaagagcgcgatgcagtctgtatagttccagttccttgtttctcaagcaatccgatgtttgtgtagtagtggcttttagggatttcacaatttgacaaaggataacatgactaaaaacagaaacataaccattttaggttaacatcaaacgttcgcttagctatacaatcaactgcccaattgggacgatgacttttttctgtttattctagtcataaattcatcccaaatcagaatttattagtgtacgtgtttttttggtttgtctataattatgaaaccgcctacaaagatcttaatctcaccgtctaaattttagttaacaatccaaacctatatatacaaaaagagatagttagggggtgaagtttgaacaaacagaaacaataggggtgaaaaatgggaagaaaatgaaaatgagaatgagaaaggaggtgggaaagagggaacgtggagtatgtcggtaaggaatgtggtcaaaggcacataccatgtgggctcacatgtttcactatactttgtcatccaaaatctctctgtctctttcacgttttttcggtgctcgtacaatttttagttagtccctaaaatccatctagccaaatgtgtattctcggatattttgactaccttcatgatataaaagtaatccgattctaatttagaagttctaaccgtttcgtatgttactaattgaatttgaaatgaagtcgtaaccgataccgatgtttattaatgtatgtgtgacaacttcaaaatacaacatgctaattgaatatattcaaaaaaacaaatgtaggatagaacatgctaaatgatagtccaacatatcacttgtgtttacaaatactctgatattttggtaatatagatcactagaaatgttataaaattctcttaatagcttttctagttactctaccgatcgaataatatttcggacccactgcttgaatgcatatatatttgaatttgataaagttgtcttctttctgttgtaggtggatagtgtttcttaggtttcggtgtcacattctcaaagattatgtggcgcttgacaattggcttgaagatacaaacacactgacatagagatgtatataataaacatgtatggttggtatgcatgcaatgataatgatcgttaattaattgttctatgtttcacaaacgagtgatttcattttcatgagtcatgatgccctttctttttggctggaaaatatttttctttctttttcactttttctttgtggaattcttctaattattgttgtagtattcgagtgattatgataaagagggtcctttggtgtgtcatatatgggtagtaaaatcattaattcaaaatgcagaaagaaaaagacattatcattataacaactgtctggatatggtgttgttttatgaagttcttgattttcaacctttattatcaccactttaattaatgagctatatttatcactcacgtttggacaaagcatggccatgggggctctacatatatcagagaccaatcgaacttaagaagtttaacgtggaaaagttatttaacggccactttacccacacacacatgcagtaataaggtcgagatattgtggcctcaagacaattttcaattatgtgtttttgttcaaactatatatacgtccttttcaaaaaaacatcttaaatcatttccaaaattcagaaatgaagattacgtgtatatgtaaaacatttcttcacgaaaacgacaacttttgaatcagtgaaagttgttcgcaacaataatggaaccaagttcatgtatatgaatatattttttcttcgtaaaaagttgttcatgagatttgatatatatgtatgaaccaagttcacatgtaaatatgtaatatatatgctcttcatatcatatacatctccaaggtttgatcatttgcaagtttggtgggtattttgcttgatctacaatcagaatcaggatggagatcttctttatattcgttagcccaaacaatgttagacacaacaacaatgtcttttttgagatcgtacatattaaattatagtgcttgaagagaacggaaagaatatatataatgtcagccattagagtttttagttcatcgttatacatccgttaatcgtttgctcaacaaccttaacatatatatgcttttataatagacactacttttataaaaatctattttcataaaaaagtctcaatttttaggacaagaatagcactatgcaacttaataataggtgagttttcctagttgaaatatttaatataagatttgtgatatttttaatttcattacaaagtatgaattc

SEQ ID NO: 1083 - DNA, 100285 bp, Arabidopsis thaliana
gaattctccggcgacattagccgtctccaatatacatcttttcccggaagcggatattgagaacgagcacatatttgttggcagattctcgcaaacaatgttttcccctacaatttatagaagagaaagaaaaaaatacaataagaatcttaaaaatcaaagattcgtatgagaattaacgctttcttttttcctatggttgatcttatatctttcgtgtaattggtcaaactatgaaaatctagggttcttcctatgctgatctaaagactgatgaagattttcaatccaagacgttttgatgaatgtaaaatatgaatatgtttgtacgtacctatagccgcatggagaagacttgagagaatgagaaagattggcaatttgagggaagaaaaagacattgtttctgcgtttttcttttctctcttctcctctgtctccttttcttgatttgtaggggttaaagattttgaacctcgagatgttttcaaggaaaaatgtaatatagagagaacgtggaaataggacgcgtatatgttgaagggatgttgtggggtgtgtgtgtacatatatacaagaatgatttgttaaaaatatttgaaaaaagaatgatttgtatttactatttaatttttttgctttatgacattctctatctatggtgttactataatagtaagaattgtattttcttttgtcaacagtaaagattacattttgtatagtaattgcaaaaaaaaattcttgtgttctgtaatttttctattttaatgtctttgtaatctaattgatatttatatgcatattttgtggaaatcacaaaaaagtcatcaacttggacgtgggattccaaaaaattctcattttgttaataaaataaacctaattctagtgtgttcaaaggttgacaaaaatttgcatacgaaagatgatttatatattgtcgagttgctgctatggttaatcaacgattcaatgaactagagctttttaatccagattaaaatactttaaatgatattaacatgagtcattatgtattttcaaacttttttttatttacttttttttactattcagagcttattagtattttggtcacaggagacttttgctcagattctttgaaatcgtctacatgatactacttaattaatcttttaatgtttggtcaaacgtaatcaaaagttttagatatattgtaaaagatttagttggattatctttttcattatattattagacttttcgggtgagggtgttacttggaaacaaagcgacgtgcttacaatacatgtcttcacgtccgtatttgtctcaacgcgttactattattgtttttacacacgagctctatgacttgttgtacttcaaaattatacaaattggtatagtttcggttgaactagtaacttggaaactcaagaaattcatcctaaatacattatatctgacaagtctaattataaatcagtaataaataaaaaaagtcagattaacatctgccactagctggttatctaacttctaacgtaaacgaataactaatgttttgatgcagagcacatcagccagaataataaatttcctagtggtgtagtacatgcatttcatcgatcaaaagccaacattctttgacttttttctaggattgcattcatcaattctacaatgtacttgtttttaattctagagcaagaaacttatccaacacctacttgtaggaagctggtcaatttcttcggtttagtttggtttatactttatatggccaatttcctttgggtttgcttaaaacaaaaatttacatcaggcccaactctttattatctttgacctgccattaacaaaacaaaactggcctatgcttaatggcttaatgcttatctttttgtttaggtccgtaagagcaaagccacgtgtcataacacaagataagtggaacccacatgaatcgaatccttcgtccacctcacaatccgaatatccgatcctctctccctcctccaaaaccaaaccttccaaagtttttttcaaaacaacacagaaaaaatggcagcaaccgccgcaacaacgacgtcgtctcaccttcttctctcaagctcacgtcacgtggcatcatcatcccagccttcaatcctttcaccgagatctctcttctccaacaacgggaaacgagcaccaactggagtgaggaaccatcagtatgcgagtggagtgaggtgtatggccgtagcggcggatgctgctgagacgaaaacggcggcgaggaagaagagtggatacgaacttcaaacgttgacgggctggttgctgagacaagagatgaaaggagagatagatgcagagctgacgatagtgatgtcgagtatatcattggcttgtaagcagatcgcttcacttgttcaacgtgccggaatctctaacctgaccggagttcaaggcgccgttaatattcagggagaggatcagaagaagcttgacgtcatctctaatgaggtctcattctttttacacatgctctgcttttgttggttgaatttgtgataaattagtgtagaccacatagttgattcatgggaatgggtggatgtataataaagattgagtggtggtgagtgcaggtgttttccaactgtttgagatcaagtggaagaacgggaatcatagcctcggaggaagaggacgtgccagttgcggtggaggagagttactccggcaactacgtcgtcgtgtttgaccctcttgatggttcctccaacattgacgctgccgtctctactggttctatcttcggtatctatagccccaatgacgaatgcattgtcgacgactccgacgatatctcagctgtatactactcttccttccacttccatatatctttaggagatagagatcctacaatgtaaattaggtgaccttttggcttataatgttgttgcagcttgggtcagaagaacaaaggtgtatagtaaacgtgtgccagccagggaacaacttgttagcagccggctactgtatgtactcgagctcggtcatcttcgttcttactctaggcaaaggcgttttctccttcacgctcgatccaatgtacggtgagtttgtcctcacgcaagaaaacattgagatccccaaagccgggagaatctactctttcaacgaagggaattaccagatgtgggacgataaactaaagaagtacattgatgatcttaaggaccctggtccaactgggaagccttactccgcaaggtacattggaagtttggttggagattttcacaggactttattgtatggtgggatttacgggtaccctcgtgacgcaaagagcaaaaatggaaaacttaggctgttgtatgagtgtgcaccaatgagtttcattgttgaacaagctggagggaaaggttctgatggacattcgagagtactagatatccaaccgactgaggtaactcaaactaaaattagactagtttcactctctactgctaagtttacatctaaaattggtgtcatcagactaattcttatgtttggaatacttgacacagatacatcagagggttcctctatacattggaagcacagaggaagtagagaagctggagaagtacttggcttgagtcatgtactaaacataagccatttaatttctattgtaagccagtttctgactacatggtatatgcaaatagatgcataatggtgaaagtcctattttgttgtcaatatcaatatagagaagaaatcagctgttaaaactatagaccaagaaaccaagtttaattaaaactatagaccaaaaaaccaagtttaatttatacacctacatgtaatactagttaattataagctacgttatgggatagccttttcatatttcacagatcattacaagaataagcactagcagcatagtaaggagaaaacagaggatcttgcattggtggtcttggagtcaatcatagtcttcaaaatcagtcaattgtctgtcatgtcactctttgctttcaaatcttgtctgtgttaagagaagaatggctcgagttagagagaggatcaatacatcttgaaatctagaatatgatacacaaatgaagcatcaagaatgagaatgagtgaaaggggaaaatgtatatctataatcaaatgcagaacagaaaatactcacttgaatcacatcagtcacggttgatgtatattccaaaaagggctggtcagactcgagattacaatcccctgattcaggagacgacctgtgatttagtatagcgtatgatcagacatcaagaggtaataatagctatttacaaaaactgatcctacaaaactaaagtacataccctgaaacagtttgagtgggttgatttggggtcagtgacaagcaatgatttgcacttccttcacaaccaagatcgaaatcaactagtagctccgagaaatccagattagaaaagtccatgtcaaacaaatcaacttctggctcagacccagatggagaagttgaaactaaatctgcagtggcaggtgcctctaagcacgtttctgtgtcagtgtcatcaaagttgagctttcctttcacatggtctctcttatttgacatcttcaggttagacttgaccggtgaagaaaaagaaataagatggcttctttccactgaataagaagtaatttgcttgagagggctgattgtgaatctctcctttgtaacaattgtgcagtttgtatttgtaggagtaacttctttctgggaactgttggacttatcactcccagaagaagcatgtttttgtggtgtcctaaagcatgttgaactagtaggaacagacgaatcagccttattgaacaaacacttcaccacacttgacccattaccaatcaactcattacttgcagagtttttagccactgctagtgtttcagatgtgaaattgttagctgctttatcagcttgtggcaacttattagtccctggtccaaggaaaaaaaaaagtcacaatattagtttaagagctacatcaaatgtaataaacatgtaggcacagaaacataccagttgctctagtgatccttgatttcctagataccggaggagctgttacagaaacttcaggaccttttcgtttcccagttatagactgactcgtcgaaggtgtggaaaaattcccaaaatctactcttttgttaccaagcaatgatactgacataccatttagtgtgttgtactgagataagcctgaaaaataagagcactgctcttttagttctcaagtgacagatttggattctaataagcctaatatgtgcactaagatctaagaagcaaacaagagctagagctacttcaatcaataatgtggagaaccaacctaatcattccaatttagaacagcttaaaaacaacaaaatctccaaacctgaagaagagatactgtgatttttctgttgagaagttggagctgaagccggaggaggagcggtgaggctagcgttgtaagtattcatcacattttccatcccctgcaacagattttgaaccctaattttctcttgatccaatttcagtttctcttgatccagactcactttctgcttctttagagatacgtaatggttcaacatagcatcaagagtcatcaaactattcggaacctgcgaatgaatccccaaaaaaacaaaaatgtaagaaaaacaatcaaaacccatagatagttttcaattgactaaacaagcaattcgaatacatacattgcgaattggggaatcagagatgagagaagaagcttcagatctaaagagggctcgagtttctgagaatcgattgtcgtggagatagcgatcgacgataaaagcaacttgcgttggggtaacttcacctttgccgatgagattcgatcctttagatctgctcgatttccccattgctgtgtcttctgaattaatcgaaaaccctaattaacacgaatatgaagcaaagagagagagcgaagttgaaaagacctgaagaatctgaataatgaatgggttttagtaaaataagcagcgggagattttcaaaacatcctttggaacgatgtcgttttcttaaaattttgccgggatactgttttcacctgttcgtggcggtaactcttgaaattttaaaagacgaaactccaaatttttaccgttaatcattcgaatagtaggatttccttccaaactagtcgatctcttctaggtgaaggatacattgacgtttaaaaagaaatcttaagtagataaaagtgttccattgtgattgtcaacaaaccaaattatcagatagaaacaaagaaacatgtatatttaaaatttacacaaaaatgaggttcagtgaatagaaaacaaatacacaagatacaaatatctatagtacaattcagagcgttgaggactctatatctttagacgaagatacggatacctcttttacgtccaaggaagagaaacatagaaatatagactgagcgtagagtgttaaaccaaaggtgaaaatacaagtaagcaaacgtgagagccgtgagagaagcaaggcaagagatgaggactaagctcaaggaagctttttcaacacggatcaagatcatcgagaaggtgaaggcaagaatcatagagatgatcgagataaacaatgccgaaagtccgaacataagctttgttggtaaatcataacgaaaatcctcttctgcgtaccgagaagtgaagatcgataaaaatatcacgatagacatcatcgatgagaagagggcaaccgaatctgataaggtaaatatatcgaacaataatctctttctaaaatttgggaagcccaacgtatttgctttgtcacctgaatcatcatttccacctggtatagtaatggctgctgcaaagaccacagttgctatcagcgttgctccgagcatacatgctgtcgcggtttctttcatccatctctctccttctttgcgtaagttttcgtgttgttccgtgaatatatcatgcgctagttcgcccttagtgtttttggtttcgatgtatgaacgaggaactatttctttaacagcctgtaatgtaatttgaaggattttaagactacctcaaatagtaacttaccaatataacgagaataccaggagattttctaccgaagtctaaaatatgttatattagccattactaaattgtatttggcgtaccttgaaccaaaggagctctttttgcatatgaagtgctgctcctgatccaacttgttgacgattcataggtggtaaccgtgccacaagatgcaacaaagtatctttagattgtttttctttataagatgctatcaaatccttgatgcctccaagttcatagattaggctgaagatattttcatgacgatataaagcagcaacatggaataaagttcggttattattatcaactatccatagcagatctagatgagaacgaataagaataactaaaatctcaacatttcccaattccgcagcatcaaagagtagccctgaaaatgacttgataaactctataaaattttccgttggcaaaaccaaataccataacttctctaccagccgatgagctaaggttctcattttttgatcacgaaagaagaatcccttagaaactaaaatcaaaaaatgaaaaaaaaaaaagtttcagttgtgatttcaatggacaatagtatcatatatataatctttcaaattgtttatttcttctacttacaagaacttgctacttgctgaaacaagttaagctggcttttatgggaaatggcagaagtcttgcgagccaacaagtgcaaggctttgttactatttggataaagggctagttcttttctatacaaatccactctttccaacatccacagaggtacatctgcaaatacacctgagtgagatgcaagaccaaacttgacaaaagtggaaaacaaaaagacaaaaagacaaaaagctctttgaagggtagattatatatttaccataaatatcagctgatatcatggtatgaaagagattcagatattgctgatcattgagatctttgatgcttgttttggagaaaagatattgaaccatttctccatggccgtacaaagcggcgatgtggattggtgtcattgttttctcgttcgaaatatccggaagatctcggatcatgtttattaacatctcagcagtctcaatgtctcccaacgcggcagcaaaagacaagggtgtgttgccgtctttgtttttcagtgacaagtcagggggatccatttctctgagtagatttctcacaaaatccttgtgctttgctgcaacagctatgtgaagagcaatctcagaattaccagtaatttgctccacgacattacactcttttctcgatattaaagtgctggctgttttccaatctcctgtcagaacagctttatacattaaattccggctatgtggttttgtaactggagaaagaaatatgaaaatagaagagattaacaaaagaacacaaacaaaaagtggaatcaataaataaagagagcttatatgaactgttgcatatataccatcttctgaagtatgatcctcaacattgggcagtgaactaggatcttcatttggagatgacccacttggctctcctacttccactattacgtcttcttggtgaagctgtttgcctttatccaagattcccataattgtagattgagatctcattttggcagcttcacactctaatctccaaattggtcagcttccctggattatcaacatcacatataattatttagtttacagtaaagagatcatatatattagaaaagagtctaaccataccttcaatatcttttgtcgtcgggtaagacaatgaaattaacaggtacacgaaaaatatcgtacaagcaggtcaatggtggtagcacaaccatagatgatgcttataagcaactcgatgaacatggtgaaaagttcgtcgatcaatttctaattagtaattacaaattgaacgatgcattgactatttttttgttttactttgagtacaaaaactatgatatgcataatcacgtaccatctttagcctaacttaataacatgttggaataaagacgcatacaaatttgagatcagtttcctctcgtcattactcaattattatcgtaacaattaaaaaaaaaaaaacagtagtggcgccggccatttgaatggagccaaactgaaatgttctattattggtttttatatgggaaaaatatcatttaaattattattttaccattttcgttggtttaaagtttgaactctggacttggtaaattaaatcctcaattttatgttgattttcaatttaaattctcgttaactaagccaattgaggcacaaatttttttttttccggcatcgtcggtcgatttaaagacgagagattactttgaattggaagaagaagagaaaattcgaagaaaatgagagatttcgaagaaaaagggagaaaaaatcagaagttttgtaaaaaaaattataacgatgtgctttaattggcttagtaaacgaaaattcatgattaaaataaaagttaacataaaattgaggatttaaatcacaaggtccagagtttatgctttaaaccaacgaaaatgattaagtgatgatttaaatgacatttttctcgtttttatatatctcaaaactaaataacccaacaaaacaactcagtccacaagaaacagaagtttttgctagggaaaacactgacttgttaccaacttctagaaaaatacataaacttttgttattcacttccaacttatatgataaaatatacatttttgtgagactttggataaatttcaaattgatagccgcgtttgccatgaaagatgatgtgcccttcttaatttgttctttgacatagttgatgtggtgtcaaaaagaaaacaatatataatcacggtttggagacgatgttcatgtgatagagccaacaaccaaatgacgacccgtagtagattaagtcagcagcggcaatttccgggaagatttatcacactaagaagccaccctagatactctcataagtggattcaatggacttcgtccatgcctttactttacttaatactaccacagtaccactattggttccatctagtattttgtgctactaaactatttggcatgtcgagtttgtaactggagttaaataaaatgcacttgagtgtaattggaattaaatgaaaaagataagcatttttggggttttacaacagtgaaaacaaagatagggaaaaactcagaaacgagggagacaaaagttgacacctttaacgctttttcacattgtccaagtgcttgacccatacctctctgttcttcctctctctcttcccccaccacagtcaccactttactcttctccatcaggggtccgatcccatctccaattttaaaccctagaaatcaatctcaaaagcaagcgtgcttcattaatggcgagcttcattctctccaggtcattactcgttctactcctgtctctcaccgcattactctccagcatctcgatttcggaagctacctcatcgttctcgttcacaagctccggtaaaaatgcgagctttgagtccgaagactttgccctgtacggcgacgctaagctcgtcgacggcggatcttcgattcagctgactgactcagtgagtcacggtggtgggcgagtcatctataagaaacccattgagtccatgaacaatataaaattcgagtatttcaccggattctctactttcttctctttctcgatttctcctagtcgtggtgggagactcggatttgtagtgtttcctgttaatgaaacgtttgatcactctttattccaagtaaagttcgatacttttgacagtttcacccaaattggagattctaatgtcgcggtgattgttgatggtgctacggtgtctgagaggattcgcaatttcacgatcgcaaacttggagaagacggagaaggttttgttgtacgcttggattaattaccaagctggtggcaagttcttagaagtccggttaagtaaatctaaaagctttgaatctgttcttcctctgatgtttgatcagattgatttgtcacaaatgttgagagatgaggatgagttcatggttgctgtgaattcgtatagtgggaatgtaaatcttcattcttggagtttagaagtgagacactccgagtatgagcactcttgggcgccggtgcttttggaggaacaacttagaaaagaggaacaacttagaaaagaggaggctgcgaagaagaggacaagtgataggatgtgggaggttgtcacttgcttcgtcatgacctttggatcaacagggcttgtgttctttgccatgatgcatatatatgcagctttcaaaaggaacaatcttgcgatggtgatgcaggaggaatgtgggatcaagaccaaggagtttgggtataagaagatggagaaaatggaagttgtgacgagtaatgctgatgcgaaacaagaaaggaagtgaagtcatgtttggtgatttttgtgtgtttaggatatgtgaactgttaatgtagtcaagtagattcttggtaactagttatccacgaggttcttcactggctaatgtaaccccttcttattttcatgtgtgtaagcttgcaaccttgttaccatttggcattttagtttgatttggcatgtaaaaatatgagaagaatgttgtagaatgcacaccaaacttgagtgcgagggatgacaaaaacaaattccaactcctacacaaaatagatttgtaactaatcacaatcatttgaagaacgcaatgtagtttatcttcatctacacaaaatcttcaaccggagataagcttcaagacgatgactgctgtgttaatgagcatgaggggtagcctcatgtactggcaggcatggatcagaccaatgatttggcctttgggagagtttcttctatcggtttggtggagttctccgagtgtccatcctcttggaacaaggaaacggtcttcgttgaggattgccagtgcatttgcaaagagcagcagaccttttaacaatgtccagaagcccattcttttctgtgatgcatagagctcaaaatgatcagaatcagggaaagagagtggaacaaagttatcttttaataggtttagaaacaaaatgaatggagactaagtgcatgcaaatgtaagctactgatgtgttctgtagatctaaagcgcagagaaccatgaagatagcagtgcaaaatcttgtttctaacacatcaaaaaagccaccagattgaacttattcctgccttgcaataatatctagaaatctaaacaatggcaggacggtcaccgagttagcattccaaagagccttaacctagacatattgtatatcaacacttctgaggatatgctaatcacataagcaacataagtatgcttcacgagaaaagcaacaagctcgatcaaccctaagagcactagatgagattttcttgtggatctgcttcaacaaaagtacacttagtcaatcacaacatcttgaatgaaaaaagaagaagagaggaatcctgagacttcccagtttcagcaatcaaaagattactaagtttcatcacaattcacaagtgaagaagacaatctatcaatgaacactttgtctaaaccaaaatgtgaaaatagatattagagcaaatgcataccgattaagctaagcttggtacagaaacagagaatacacaatcccaattttaagctatgcaataaattacgcaggaatcataaaccttgaaactgctgacctaaacatgagatcgagaaagtaaatgaagatccaaggttgctaatagaagaagcagccaaactaatcgatcaattcccacaaggaagcgaaaaacccaaatctagcaacaaccagtgaagaaaaaatcaaaatgaaggagctgaatcgagtgcaagattaccgtaagaaaacgctccggcgatgaagacggcctgagaacgagagaattgaatccgtcggtgaggtttaatttgtttcttctttagaaaattgaactgatttttcttcttcagcattaagtaaaaacccgaaccgggttaggattgacccggtttgaataaaagtcgggtcaggacccgatatgtttttttttgaagaggaagaagatttggataaaccctgacagtggtgtcaaaaacccatcaatggcttcacttcttattttcccccaccttcaccattttgattcttcactggaccgtagagaggtactagtagttcgccattcacaagcatcaaggcgatttctcactccgaaagcttcaattaatggcagcggaatcacaaacggagctgcagcggaaaccacctctaaacctagtcgcaaagggaggaagaagaagcaaacatcgacggtaattgagaaagataacaccgagactgatcctgaattgaatccggagttagctgattacgacgacgggatcgagtttccgtacgacgatccgcctcttgtgtgttgcttcggagctgtacagaaggagtttgttccggtggtgcgagtccatgataatccgatgcatcctgatatgtactcgcagtggaagatgctacagtgggatccaccggagtttgggagagctccgggaggtccgccgtcgaatgtggcgatctctcatgtacggttaggtgggagagctgcgtttatggggaaagtaggtgaagatgattttggagatgagcttgttctgatgatgaatcaggagagagttcagacgagagctgtgaaattcgatgagaattcgaaaactgcttgtactcgtgtcaagatcaagtttaaggacgggaaaatgatggcggagactgtgaaagaaccacctgaggactcgctatttgcttcagaactcaatttagctgtgcttaaagaggtaacaatctttcaatctatgaggaacaatctagggtttaagaggaacaatctagggtgtatgacattatagctcgagcataatcatgaaacagagcacctagggtttaggaggaacaagtttagtctagggtttatgacatgaaagctcgagcttggtttcttatgcaaaagtctctgtctttgagcataaaggataagatttggataatgaaacagagcacttctctgcttggtttttaagctttttgtttgttactggtgcttctaatgcaggcgaggatttttcatttcaattcagaagtgttgacgtctcctacaatgcaatcaactctttttacggcaatacaatggtctaagaagtttggtgggcttattttctttgacttgaatctcccattaccgctgtggagatcgcgcaatgagactaggaagttgatcaagaaagcatggaatgaagcaaacatcattgaagtttcacagcaagagcttgagtttctacttgatgaagattactacgagaggagaagaaactacacaccacagtacttcgctgaggattttgatcagacgaaaaacagaagagactattaccattacacaccagaggaaatcaagtcattgtggcatgacaagctgaagctactggttgtgactgatggaacacttcggcttcattactatactcctacttttgatggtgttgtgattggaacagaagatgtgcttataactcctttcacctgtgataggacaggttctggtgatgctgttgttgcagggataatgagaaagctaacaacttgtcctgagatgtttgaggatcaggatgtgatggagcgacagctcaggtttgcagttgctgctgggatcatagcgcagtggacaattggtgcagttagaggtttccctactgaaagcgcgacacagaatttgaaagaacaagtttatgttccatcaatgtggtagaatagaagatgaagaactgaacttgtgtactcaatgtttttgaacaatgtgtgagttgtatactgattcagatttgtaatccagagaaatgtacaatcaatttttttagttcaatctggatggtccaagtcttgatgcttctcatgaaaggagaatcgattctacaagctgtcttgatcggatacaatcatacaaatggaaaatgaatcgtacttttttagtgctatattactcctaattctaattacaaaacttttcaacagagaacaatgcaatcagatcttgcatttacaagtgttcacggactttttgaacaatgcaatcagatttcacataatacaagccaaatatttaataaaatatcaaagatttttgggatgtttacttatttgaaagagatattgggatgtttacttatggtgatgtcaaagaaaaagcaaacgcaaagaagtttttgggtggtaacttccaatatctcagtttgtgatgtttcccagctttgcttggtaagatatgtagttagagccttagagggacttgaaatgaatgttaataacttcaatatttcagtttgtgatgtcaaagacagtttgtcaaaattaagtatgcgttgaaagtgattaaatcaaataaagactttataagtagcctagcttagggggatgggtaagttatttttaaaattgttcctccattagacatgatattttcttgagactttgagagaatgataaattttgtatacttcatactttttaaccaacgttagttaatttttctgcatgctaaaatcgtctagctacatattgcattagataccactggcacattcattctgattttggttgatatcattgaagagagagcagacaaaataaagtgaatgtagcggtaatcagctcacgtcttattgaatcaaacctcttggtaattagttgatttgtagaattaatatcataaatagatttggctagacatgttttctatatatatatcaagaattcaaaagaaaaatactttgtaatagacgtatacataataaaaattctttgtccagttaatgaacatatatagcaactgaatattatttggtatcccgatacaacaaacaaaacaaagccacaaaaaaagaaacctaaaagagtaagaaaagacaaaaactaaaacataaaataacagagtagaatctaagctgaacagctcctgcatgttcaaatcccccataatagaaagacgtgttgctcgacatctttgatttgtagtagtcggattttggatacttgcctcgtgtcctccaatgactctttccgctgctccggtcttatgggaaaccaatctttccgccaaaggagaggataattaaaagaaggttgatctctcgtatggatgcattcaataatgtctccatctggactctctctagttataaaaaaatatagtatcaatataagttgaataaagaagtcacatgaacagtttttagaaaatgtaggataagtggtcatgagtggtttacaacgtgctttgatggtcatgagtggtttataaaaaagaattataatagacaatttatacatttttaaaaattataatttctaaactaattattatggcattaaaaataatttattactactttttgctatggttttgcttatattttgcttctcttttgcttttgttttgcttgttgtcttcaaatatagttcttccaaaatttctacttaattgattcttaaaagatgatttcattgcttaaattatgtttacatattttgtttgaattttttattagaataacacttactaaaattaaattattaatattaaaaaaacattactagtttgcctcaaaatacaatttttcaagccactagaattttcgataatatggaaagcaatagtatcccaccacaatagttttgtaaaataggcttacattaatttacccaacttgaactaaatagagcctaataactaaaatcttccactcacacgactgtggagcgattggacaagacgaaaacgattcgatctgttaatttcaagggccaaggcccaaagggatttctgagaaccaggtttggttctaaaataaatgtcattttgctcctaaccataagtatgagggttgttaacaatttctctagaatttatatgtttatgacaatataagttaaatttcaaaatcttcataactatttatatcatatatgcctagcgaacaatattcctaattatcagatctagcagtatagaaaaatcgtaactataatatcactctttttcatataaaaccttttatggttgtctatcttaatcagtaatatttcgaattaaaattttcaaattgaaatccaaaacaaaaaaattttgctcgtaccgtccagaagataaacaatctcggctggctgtcccatatatctgcggataaacctgaatatcaaaataaacaaacttacagttatactaaatttacatatataagtctttttttaatcgaaatacaaaatctgataagatattaataataacgttacctgccagccggcctctatactgttgaggtcattgttttcgtaggacctaacaccagccatagttgacccaaactgaatttcgtagcgttgttgtcaattttccaatgtcatacattcatagtgactttagttctgtatatcctaggtggattttccatagaacaacaacatactatatccaaaaaaaataaaaatatcctgattagttatttttagttttgtcattgaaataatgaaataataatatcgaaagttagttttgaatgaattctttaacatagaaatccaaaatagaactactattctaacattagcaaaatcacccaaacgttatctaccattacgaatcaaacaattaattagtttcaaatacaaagattgaataacatataacaaaaacgcagaaagatccttgaacttggggattttatcaactctttaaataagttaaagatatgatttcctcgaaaaagtttacacagttttatatagttatattaccaaaagattatgttagatagtactcttcttaatttcttataatagatccttaaaaaatatattctttttcttgtaatatactcagatcacttggacgtattgatgaaaagttaaaaagatataagaacctgtggtcgaacctactgtggaaacattattttcttagcattaaaacaaagaaaacatatggtggaaacatgatttcataaagtaaatacaaccggttgggcctaaacttttttttttttttttttttgggcctaaacatagtagagacagacgaaattggagaattataacgtaaaatctttaactatagtttttcatcttatcgttaaagcttaaatcttgtcgtcattcaaacttttcattttatatatttgttttgtttttatgttatgtaagtttacaattttgatatttttaataattattatgttttgtcaaataaaaaacattataatattagattttaattttctttttattaagaaatctgcttaaagactgcaattccttaagcgcaaagagcaaagctctaatctgtaaaacatgtgagaaccgtaattggtagatctcatgaagagccaatcttcaagcatcacacattcataatgggcaacttcaatctcaacaacaaaaaacataaacgcaaaaggagagggatttccaaggatatacggccggaactggcccaacaggctgcggatagaccgtacgtagctatgggaatgggtgctaccagcgacaaagctacttacattccatccatgccgataatcgaaattcagatgctgcacagaattgggtgacttcttgtacacggaactgagcaaatgaccattccgaggtgaaatgttttggcaaaatccagcagcattgtatgaagatattaggtacataacagaagcatgtgttcatccccatacgcacaattataaatatgaaggaaatcaattcctgaatttgccggttttgaggagaaatatgaaatgcaaaaactattactctgcaatatcgtcctcacgtctaaaacacatttcctcactttggtttcttatggaaagtctctgtctggaaaatctcattgcaaatgactggtttcttgttcagtatcacaaggatttttcatttcagttcagaagtgttgacatctcctacaatgtagtcaactctttttaaggcacagacaatggtctaaaaagtttggagtgctgtataatgattcaaatttgtaccaatatagtaatgtacaatcaattttggaggtcacactgataacaacgatatgaaagaatgaggaaaaactgttttcccatgatatctctcttttgtctacacagcttcccgtgcaaggtcacaaacttgctctagctgacccaagtcatcatgctcctgtatggtgaatcgatcctacaagctgtatgtatcttccaaaaactcgggttacctctgtttcctatagtgtacaaagactataaactcgacgcagattcttctatgtcttgatgcactgtagcattcttcaatgtatgacatcggaatcttgactgttttcgggtactgtatcactgctatcttaaggcactcttcttccaactctttgagtctgtccttagacttgattgtttccgcagctgctcaggatgagacttgttacagatgcaatcaggttgtgggttcgcatagaagttctcctctagcctgggaagtgcagcaggcagtctcccatatgctgctccaatcctgtctctatttaatctcttaacctcagaagaaaactcttcccaagatatgataccctcatcaaaatgatctatcagtctaacaaaattcagcctgaaataatcacacagaacaaatcagcacaaaaccagtgaaagaaactacataatctcgccaaaatgaaaagctttattccatggtaccatacctgtctggatttatggacttcctaaacccttcaaactttctgtgcccttgtaccgccttagccatattaccatcatatgtatacacaaaaacatcactttcaagggccacaatgtagtccaacgcagcaaggcgattctggtattgactgaaaggctctaactcttcttcagtcgcaagggttgaatgagagaagacatttgggtactctgcacggaaagcatccatactctcgcttccatagatttcaccagcaactatatatacagtcgtggaggacggatatcccatggcttttagaaatatagctgcttctcgcggagacattggacatccgccttgaatccgtctctctcggctatcaatctctttctccttccaatgtttgacactgtacctcatgattctcagctcttctgcttcctcagttgtaagattgtggttgcatcctgtaaaggcaagcatgtccttctcatatctgcaaatccaaaatccatttgatacggaaccaagatccaaactatttcccttgttgatgataaaagatatgtcggatttacctcaaatgcagagcgatatacggctcagtgttgtttcttaaccggttaaccaaaatcttccctaggtcctcaatctcctttgtgtatagcagtgcctggtaattagcacgacatctcagtcgttggatagatggtggcaggccattgttagcaagccgtgagtccgtaagcgtgaactttaacaccttgtgacgtttcaacaatggcaacatttcgcttctgtagtaactagcctgtatatcagttgtgaatttaagaatttacttctcattgtgacaagcccttacatatataggagaagagataaaactctggaagctaacaacgaaacctacactaatatgaacaaagcacggaccttagaccaagaaacaggggccttgagaagaggtttcattgcggcatactgaggaggcaagtactcgacaatgtcaacatcgtgtttcagtacgttcatgaagtttctccagtcaaaaatatctttgaacgtgctgcactcaaaacaatatttattggcattctgcttcatttttagtaaatatcttgtggtatcaggtcaataagagtgccaagatatagagagaagacctcgggtcagtccagaaagattcatggtcaagcagaggaagaacaagagttgcattcataatcttggcaacagcgaccatgtcacatatctgcatattggtcaaaaccaacaaagaatagtacatcaaaacacttgactatggagaaaacggagatcaataccctctaatatccttttgaagtaaactcaccccagttctcatctgattcaatcctccatttgcgtgtactacaagatacccattggtttggcgttgcagtcctagacaaagacataaataccagattttgaaaaatcagaactgcaaacgagcttgaagaagaactaggaattttaagatagcaacatactcgtatagttcttagggcgcgtcacacattggcgataattcccgctttcaggtttctgccaaatttccggaatctgtgagaagagacaacaaaagcataaatccaaatgaccaagatcctcgaaaatgaagtcaaacagaagaaaaaactatcttccttacattgcaaaaacagaggaaatgataaaaaaaaaattagttaactatcaaaacatgtaagacctccgattacactgatcacagagaacttcgcgtactttaaatatgttacttaacgaatttaagtcaagttacaatttaactcaacaaaacaggttagacactaacacagattaaaccatatagtcaacggtaatgaactattaatcaaaccaatatcaacttggatccttatggaacttcaagattacatattgcagagctagaggattataaagagtttcaatttcaagtcttcacaaactagaacacaaaatgttatggattctgcataaaattagtaagtcaactaaaatggtaggaaggtattatccacacatcgaagccgcctataattccattgactatatattgctcgtcaaagtctcaatccaatagcaaaaaagtaaacctctcataaaaatcgccaccgagatattgattgttagaaaagctattataattgcacaatgataattcagttttgcaatcattaaagttgttgccagaattcatcttattacctaccccactaggccactacttcttcttcttcgtcccaaaaggagacactaatccaaacattgcaatctgtttacactaacttcgcaatcttaggatcatttctaatgaactgttcaacaaaaccctcaaacaattcagcaggaacaaacacataattaggattgatcccaagtagtatctaactaactaaaaaaaatgctgaatttgatcacaaagattgaatttttaaatccctaaatgtttaaagtaaagaagatgaacaaactcacgggaagcttttcgagaacacgcattggctgagaagaagcttggttctctgcaacttcacgttgagccattgaccaatcatcacgaagcgttctaacaacaacaaactccttcaaacgagcgtgatccaccacgcggacaccacccataaggtagactctaaggaacacagacgcaaccacaagcaacattagaagacccaagatccgacgacccacgtttctccccgatctaaacccttgaccaatcacaaccgtcgatgcaccaccataaaacggaatccagaattttcggaggagaaggtaacgaatcaccggatgactgtaaaatcggtggtagtgatcgtgatggtaatgagatccagtagatgaagcagagctttccgaagatggtgacgagtcttgaccagtcgcatctcctccgtctaaatctgttgatccaacgatgggttggttaattgtattgcagtaatcagatgaattcgagggtcgttcggagataacgtctagagaatcgccaacacggcggcgagtggtgggtgcaattggtacggggttaatcgctccgacgactgacatatcgtcgccggtgaaatagggaattgaagattagacaaaaggaaagagatagagaaagaagagagagggttgatttttaggttttggaggaagtagttgaccatgtatgtatcttctggtatagtcaccgtcaccgtgaaattcgccgaagctgagtttttgttttcagaattttttatattcgccagtgtgtctaattatatatttatgtgactgttctaatcattttttttgtttaggttttacattttttatgtatgatgtgaatggataattttcaagagtttgtcacgtttgtagcacatctttttatatgaatagttttttggatgttagtgtataaatataatttgtcatatcgtttagattaaacaaatataggcaaaagagtgattaacgtgttcttttgaaatagctaagagatactaacctatgatgattaagtttatgatacttaaactttttatcatcgagggcactctgcattgtgacgaagatgtgaagtagacctagaagatgacgcactgactttattgccactgctacaaagctaatcaactttgtaccaaatatacaaaacttcgacctctcacgatgttaaactaatggaattattagaacttaaaaaaatcggattagagattaaaaagaaatgaaattatttagagaggtagttagtaaaagtaaattcgatccagcgtggtgctgtgtcatttatttgactgggaattttcttcagacagtgaaagcaacataatcgatggatgatactatttaacaaaacaggtcgtcacacacgtgtgtataaataagtaaagcgcccactcctttctcatttcgtagcgcgcagagagagagagagagggacgatcttttctataactgaaacactactcgaggccaagttgctttagccgtaatcgtcgtcgtccctcttcccgatattatctcttctctgttcttcgatttcgaaaccctaacctcctctctttaattcgcgttttctggatcgaagatggtggcggctggtaaatccgacctttccttgcccaaaactttcgcctgcagtgccttcgctgcttgcgtcggcgaggtaatcgccggattcctcaatttttcatctcttttaactccatttttcttatcgctgagtatgcttcgattgtaccggaaaactatttgttcgttcgagaaatgtgtgtcgcgatctagactttgttggctatacgcggaaatgtattttcgaatttcgttggtatttgtgaagttctgatcaggttgatctttgtcttttttgtctttatcatcgtatagctggagaattttgattttagcttctatagtgtttctccagattacgtaattccgatagaaatgatttgatctcggaataatcggtcagatctgtggctagaaattgaattttggcatgtgtagtgttgttgatttatgctttagatatgattttgcgaaacattgaaatgattatgagacttgaaaatggaatctatttgatcattgtgattgctatgcaacgcaactgtataatgtttaattatcctcagaacaacatgtatcttctctttggctgtgttgtttcgtcagataattctgttcttatgcaattaaactctctggaccaggtatgcacaattccattggacactgctaaagttaggcttcagctccaaaagtctgctcttgctggtgatgttactctgcctaaatatcgaggattgttgggaactgttggtaccatagcaagggaagaagggttacgttcactatggaaaggtgttgtacctggattgcatcgtcaatgcctatttggaggtcttaggattggaatgtatgagccggtgggttacaaattcttcttctttcatgctccagaaaagtgcttaaactcagtgttttcctagttactacttaaagccttaaccaatttattctactcaggtgaaaaacttgtatgttggaaaagactttgtaggtgatgttccattgagcaagaaaattcttgctggtttgacaacaggtgagcataacgatagaccagcttagaaaaaacacgtaatatatatttcctctttatcacttagttgggctgtttttgttgtctaactctcaggtgcactgggtatcatggtagcaaatcccactgatcttgtgaaagttaggcttcaggccgaaggaaaactagctgcaggtgcgccaagacggtattctggagcgctgaatgcttattcaacaattgtgagacaggtagttatcccgacttggaagttgagattgtgcataagttgcttcaactctacttcatatcttattaatgtggctctgacaggaaggagtccgagctctttggactggtcttggacctaacgtagcaagaaacgctattatcaatgctgctgaattagcgagttacgatcaagtgaaagaggtatgaaactaatatgttctctgtctctctttctaaataagagatcctgatatttgaagcaaccaacattcctttttttttttgtgttcagacgatcttgaagattccgggtttcactgacaacgttgtcacacatattctatctggactgggagcaggattctttgctgtctgcatcggctctcctgtcgacgtggtaaagtatttactcatgacattgaaccttgagtttattcaccacgtttcctgattgtctacttaaatcttgttgtgtggcaggttaagtcaagaatgatgggagattctggtgcttacaagggcaccattgactgcttcgtcaaaactctgaagagcgacgtaagcaactctgcttctgatacctccattgttctagatataacccagaaaatgttacaaactctttacggtttcctctacagggtcctatggcattttacaagggtttcatccccaactttggacgccttggctcatggaacgtaatcatgtttttgaccctcgaacaggtaacaactgatagaatttttattttatcgcaatcgcattcgaatcggtcacgcaaagtcttctttctcattttctaatccgggttcttaatactctaatccaggcaaagaagtatgtccgggaactcgatgcgtccaaaagaaactgagacacatagttttaagcagagggaataagagcaacattgttttcttcttcattttcggtgattgagagaggccagaacttggtcgaatattgttttcggaatagagattcagttttcgagtaaaactgtgaaataaaatttctgtggattgctcatatattggctgtaccatccaacatttatcaaaaatcatacatttttctcctttctttccacaaaaccgagaaaaatcagaaaaagaaactcctgaagaagaaagaggtgacagcatctcagctcagtttcttattttccggattagcccatatctcgagtctaaggtaaagctctctagttttgttgcagataaactcaatagagccaacaatgtaatcctcatatctctcatagaaagctggaaccgtcataaccaccaaaacgcctgccaaattaaccaagaacaaccacaaaatgaatatccagctcaaaagcattccaagtctataggagttttagaatatctacttactggtgtggcaaagtgtctgaaaatccatgagacttccgatcaatgagagaagaaacagtgacactgctactttggtatacaactctgagtctcttgccattgcaatgtcatgcgaaacttggagtagcttgttcacatgaatacgtaaccatatcgaagcttcttccgccatcgcttcacttatttgaaactccggtaacggcggtgatggcctgaagagccaagaaattgaatcagaaatgaagtaatattagttacaagtgaatattaatatacctgttgagaatggaagcagatttggaccagaggaagagaatagagagcaagagaagaagaacacttgaaataagagtaaagatagtgtaagcaaatgcctcaaacaccatccatgaagctattgtcactgtaactataccaacactcacattcttcttcctccacagcatcacatctgcaactgcagattcatttcataacaagaaaaaaaaaaggctatagaggtgagagatcacctagcttttataagttttggatttggtaaagaaatgtattcactaaccaatgcctcctcccagaatctcatgtattgtcctgtctctgttgaacaacttgtccgaagaagaactcatttgagaagaaagatcagagcaaacttggattcagatttcctcagatgatcagatcccaaaagtaacccagatatgtatatctttctctgaatgtcagaaacagatcattatgtgaaaggaaatcctaaaggctcgaatcgaaggaacctgatgtatcacaaagaaagtaaaaataaaaagtgaagaagagactaaagttgggtcatcaccatcatcatcaaagccatcaactttgaatatacaaataattaattaataattcaaaggctatgctctgtttagggaaaaagaaggtgtttgttgtcctctcgatgtttttatttccagcctaaaagtgttatccttcttgtttttttcaaactgtaaaagttcgccagattgtacttagagatgaatcaaattttacaccatccttttatattttccatagaacacatttaaattggtcattcatctacttttagtcaactgaagtaatttatgtacccttttcagatgtagtttcctatgaattcgaaaaggtcgaatctttatcctcaatttaagattgtcagaagaatttaatatggtaaaaaaatcaaacaaaaacaattccacaaaccatttattatcctctgttttctatctttcgatgtaagcttttttctttctctgttctgtatgtaaaattgttgataactcttgataacaaaccaaaacaaagaaacaaaagtgaatatcccaccacctccatcaataacacttgttctctattttctctgctacttttgtttctcagtttccttttcagaagtgcccacagctccgagattggcctcagcagcagaagcatcaagcaaacttgctgcaattgctgccttcaagtcatcatcttccatctctgaaaaagcctgcacttcctcacgtgacaatgcctgattccgtctttgttgattaacattgtcattacttctcttgtttctggcagaagaacctgagctcgtgttctttcttattctctctgcgtcttcaggagaaagccactgcccgaaactattggaagcttcagaagaagacgacatgggacattcctgagggaagtttcctttcactatgaagatactccatcctgcgcctttgagagagtctaagaacgcagaaaggtagaacttcgataaatgttgcggggcagcaaggagactatcaaagttataccattcgccattcactttccttatacaaaaccaatggtcatgcaagtggcagataaaggcgctttcaagctcagggtctatctgcgcaggctctgcatctggacaattgagtggaattacttgtagatcccacacttccaaagctttttgcaagacctgtcaatcaaacagaagcattctcagttaaacgaataagcaaagactagatcaactttgcaagattaaaatgctacaccaatcgcataaaccctctgtttgcagtgttttatccgcatccaacttcaacgtaatccgttaaaatagctttaattttagatatctaaaaatgtgatgtaaaacaccatactatacccttgaatctcaatacataaatcttgcaatcaaacctgacttttgtagcaacctaatcaaatatcaagttatcaaccaactcggtttaaagctatccaagaaacaaaagatgataattgaatatacagaacctcactaataactaacatatccaaaacaattgagtcccaagataaaaaaaatcatctcaagttcctccatttatcagcatagcaatgttcgcacaatgaaactagccttcaacaaatgagttttaacccaaagtaaagatcgcaaattcacaccattactgatctcaattcttcttgaatctatctaaaaacgaatccaaccattcaaaagtttatcacttcagcataaacacagcaatcaaaagcaccataaaatcgaaaccctaattttgcctaaacttccaacaacacaataacaaaaaggctttacaatatataaatgttgaatgcaactcaagatttatcaatttcatcgcgaattcgtacctggatactaaaatcgccgccgagggaaacattgtgcgactcttcagctaagaaatcgccgggagcaaaacctccaacggcagcaccttcaagcataacctgacgctccttcccgtctagatcggcggcgacggcagccaaatcgaattcagagaagaaaggcccttgcaacaccgtgttgacgcagtgtacggcgcacagatttgactcttgaacctcgtgatacaacattcctccgttgcttgttcgttccatcgccgattaagatttgaatatcaaaattcactgattttgcgatgaatatattattattgctccgatgcaaaagtctcaaagagattgtgaagcgaagatgaagatgaagatgaagaaagaagaagaagaagcaagttaacagattatttaaataagaaaatgtaagggacggaaaagtaaatatacaataaaaggatgccacgtgtaataaccgactttctaggcctttttcttattttgcagacgagcccgatactgttttgagataggcccattatctcaaaattgacagaccaacttaggttccttgcttcccaagatttctggtgatctctttgatggcgacttctgataatgtgatgggtatgatcgggttggtttatgcctgcatttcgtaataaccacgtctgagagcactaatacagagttaggaattatactactgagagcactagcagcaatgtccgtgaacagtttaagaatttagataagttagtgacagatttaaagaatgagattctgtataagcttttacgccctctgattctttcatcaaggtaatacatctactacttctacctgtttgttctaaactcttattatggtctaaatttttccttcttagccatataattgcaaggctagagttgattatactttgttaaatgattaggtttggtttcatttccagatagtcctgctggctatttccgcttccgctcatttagtgaccaaacctggcttcatcgcaccaccacattcgtaaaatgacaaaaaaactttctctttttctatgtgcatatagttgagctcaataaaaagcttgtttctgactatatatatataaaccatgggttttactgaacaaataaaccccagaatcaaaatctgtttttgacgcttgcttgtctcaatcttgttagacaacctccaagaagccaagggggcttccttatgcatcctgatcttgagcattttccaaacagttcagatatatagtcaaaagtaaagacatcttcaaagaaacagaagaaaatacttgatctctttgtttaatgtctagtagtaagtttacatatgtattgacaataggatcctatgtgctttgctttttgttaagatttcccatgctgttgtttagtttttgattttatttcccagcttattgcttataacttccaatgtatataataagtttcttaagagcaatggcaaaatataggaggacatattatcagacggtcaaaaagctttaagcaaaaagctcataaaatagttaccaatagccttttacatataagtggaagactggaagtattcagaaatacataagcaaaaccaaaacaaacctaacacaccaacaacaactagaccacatacaaaaaacatttacaagcaaaacacttttcaaacaaatactgttaactccaaatatcttccacaccagtttcttgatcaatgtgctcgaccaacagctttcttgtatttgtagcgttttgaaatccagaggtacactaagaagttgaggaaactgagagttgccaacaagtagaaaaagtaatcaagatggcctcggttcaagttatccggtatccaacccggtttaccgttcttcttcgttatcttcatcacaaccgtcacaagaactgtgctcaaatagttccccaacgcaaccgtggtcaacgacaaagcagagcagagacttctcatggcatcaggagcctgatcatagaaaaactcaagctgacctataaaggtgaaaacttctgcacaaccgataagtaaatactgcggtatctgccagaatatcgacatatggatctgtttttggtcatatgcattgtgagttttgacataatcaagcctgacaacctccaagactcctgcagtgatcatggcaaagatggagaccacaagacctatacccatacgttgaagctgagtgaagcctcgttcattgcgtgtgaactttcttgccagcgggataatgaactggtcatagacaggagtccagaagagtacactgacagtgtcgaaaagtgagagtgaagctgatgggatttcaaagttttttcccatgtgttggtccattgtgtttccttgtaacacaaacattgtgctcatttggctgtacactgtggcgaagactattcctgtggcccaaactggaagaagtgtgattattgacttaagttcttcaacttgagtaacagaacatagtctccatggattgacttccccgtctttgatgctatcagattgactctcaaccgctgccttgtcaaaaaacctgagatgttttcaaaactttagatttgaaaacagagtatttttgaagttaggataaagattcaaactttagtttcttactttaagttatctgtgtgcacaagtttccggctacctttgatgttactctcatcatctgcagtttcaaagagcagagacttgtcctctggaaccttaacacttatcttccgaaaagccgctactataacctgaaagatcctagtaagtggactccctccaggtctctgaagtctgtaaaaacggcttccgaagaagaaaaagcaaaccgcgataaccatcgcgactgttggaacaccgaaaccccatccccaaccaacattcatttgtatccagacgagaacagttgcagcaatgagagctccaacattaatggagaagtaaaaccagttgaagaaagaacttttcttgatcttctcattctcatcattctcatcaaactgatcagctccaaaggacgaaacacacggctttataccgccagttccaagagcaatcatataaagcgcgacaaagaaaacagcagtctgactagaatttggatgacaagtatcagcattgcagttacctggtttaagtccaggaactgaagctgataatgtcaaaagagtcatacccttcaagagaaaaaacaaacttaattagttttaaccaaaagattcacatttttaaccaaaagataagaaacaagtaaaactcacggagacatagatgaaaacaaaagttgcaatagtccaatatcgtccaaggtaagcatcagctataaaggctccaatcaaaggagttatataacatgttccagaccaattcgtgacgttatttgcagccgtagcattgccttgattcagacggctctcaagataattcacaaggttagtgcccatgccatagtaggccaatctttcacagcactcatttcctacacaaaacacataaaactggttaatcttatatggatagatccaatcagggcccaagctatataataaaaaaatataatggccctttctttatttagacaatttttttgaagaaaacagagcagattttaggtttataactcttttttcatagtgatcaccctacaaaactaaacatttccaataatattttaaattttatttgttctctatcattcaatttgcttttaatcgtatataatctctttttaatcattacatttattatttacatgtaaatgtttttagtggaccttaaaaaacaggggacacgagaggccattacttaagctggtccaggtcctatacggcaataatgaagaaaaagattggtgaaacgattagaacgttaccgagaatgaagcggcaagctttccaatttccggttttctccttgtttgcaggatttttgtgaatatcaacagttccatcttgcgtatacacatctttttcttccatattcctaataaagaaaaatagtttagctttttcaagaaagatgtaccaaacacatacctaaagatccccaatttagagatccatacttcaggtataaggttatgagaaaacccttaaaaatatacgtgaaagaaattgactagtagatgcttagatcgaaatatgcagatgaagcaagcaagtacgaaattttcatgctctgaaattatagtttatgtgtgaccagatgaggttatggttgtaacttgtaacgaaaggaaaactcataaaagacttagaaaaaagggagaaacctttgtcggcggcagctgaatcagcggcggagacgagaggcaagaagagaaaagagtagccgagggcgaggaattacacggcacttgtcggagtaataatgagcatgagcttataaaaaagacttgcagagctctggtcccgtacagcttttatatccaaggaaatagaaaggagcgttgctcacttttcttctcatgtttgcagtttaaccctttgagtttttgtatatttcagttagagccgcaaggcctattgtgctatcagattttgatattatcttgttttgactccaaagtgtaaatagatcaatatcgaaggacgtgttaatcatccaccaaaactttagtggactctttttgttttttatccgatattacggaattgacattaccagaaagataacaagaaagaactcctactcaaaacaagaaagatacaagtgtgaatacaaacactttggtcaataagatgatttggagttttcttataaaattgagttcatactctttctttttttatttgaaacttgtgttcatactctaaatatcagattgtcgattttgaaaaaaaaaaatagttaggtttattaaatttggttttggttgatgtttgattttggatatgtgaaaataaagccaaaaacatcactagattcaatattcaatttggtggttcagtctaaatccatttgattaaatctctaatcactccctcgattaaaaacattgtttcagctttaaggtctcagtggatcttaaaatataaactagggtagtgatattagaaagataattaaaggtgtttgatttggttatgctaaaataagaggtgctaatgacaattagtaataaagtaaccgttgatctaaagattcaccgaggacgaatattaaaagatgcatgtgaatcgacatatgtagctggatcctgtttatctacgaggatttggctgtttatcgacttagttgttggacttgaactctttactccaaaagcccaacaaactaaagagacaaaaccaaaagtaaaatttgatgtttatgaagctaaatttgaaaaagaaaatatatctgaccaaatttgatatttataaagaaaacatatttgatgtatttaacaatttttaaattgatgacgtttagttgcaaacaaaataaataaataaataaaataggtaaaaaacagtgtgctttgattgcttttatttcattggaagtcttaccacggcttccatactcttgtagtcaacttttcttacatattcgtctaatcagttataccaatatatacttttgaagtacactaactagtttttgttttttttgttaaaacattaactagttgttgggatgtgacatcgagactatgatgtttcaaggtggattttgtgcaacgtgagtaagtaatctttgatcagtggtttgaactttgaactaatcattatatcatttgacacattttaaaatcaagaactaataattaactataaaacttcaacgttgatatgaaaggttgttgcgaggtccaactttaatagaataagtacgaaaattgttgtcagatctaactgaaaatataagtaaaagataacacttgatagatccacaaatcaatgatgtgcaattatatagaaatttggatcactcatatttgattattatttcacgggaatcatagtagttgaccttttgattctagtctaatccattgattcttcaaatccaattaagaaaaaccaatttgtgcttcaattcaaagcattcttttttttttttctttctgaaattaagatcaattctctaagctagctaaaacgtatacttgagagctgtttgggaagataactctctagaaagaaaagctaaaaggtaatctaggtatcatcactatcgacgacaactttgtttgccattaactttttaaaaagttgtaactaatctcacaacagatcaaacctgaaataagcgtgtagttttattttattttatcaaaaggttagataaatgaattaaaaattccttatttttgggcgtcaagaattcacatccacgaaaacattatattatgaccgctaaagaaaggttacatctaggctttttttttttttttttttttttttgttttgtgtatggtgaatggaaactccaattttcatttcttttcgccaccagatgtttccattttacataaagtcttcaaaattttctttggaactcccaaatccaataattgacatactcaacatgaactttattactcagttgtacaaaaaccaacggctttaatacggaataatgaactgatatccaaataagagttattgctttctcaaatggtttaatatctatttttggttaaaacctgtaatgagtactaaaaactgacgatggtttatctttgcatgcgtcatcttcacttgtattttgtttcttactttgtctgtctccttcatcggatggttgtggtcttttctggtttctcccaacctccgtttcaagcaagagacgacctttgttagacagtacttgatcagattcgaatttttcttcctgttcaaagacaaattgtaccaaaacctaagtaataatagttgatatttccttaaccaaaaaaaaacactagttgttattttagtgtaaaaaattaagtatattttaacgtattgaatgattgcctaagatgttgtagtcataccggaatttttccaacaatcatgtgagccttgtagaaaacatctttcacttgggtttcatcaccccaagcctcctcaaatttggttattagatcttcatttataagctctactcctttttccttagccttcatcgcgggctgccacgatctcaagaaccctataaaccctttaagcgaaagtttatgcggaatgtctagagtaataggctttccttcggaacccatccctatggtctcaaaaggaaatgtcaatgtcttgtaaccgtcaaatgctaaattcataataggagttctaaaaggtagagtagagtcgacaaggcgcttcattatgggatcgatctcatgcgagataatgatatcgttgtatacccaaacggcgattaggcctccttctttacgaagaacacgttttgcaacattgtaaaatacgttgaggtcgaagaaatggacagcttgagcagcaactatgagatccacggagttttctcccccgagtagatccaccatctcatcttctgatatcgttgttggagtgtgatggtaactgattcttgagtgtttgattgctcgttgaagttgtgcttcgtttatatcggtagccactacattctcgtaatgctccacaagctgtaaattatagatttcatggtattgtcaagcttagttcacctactatattctatatgtgcatgcataaacatcaataggcaatctgcaagaggcgagttcacttaacttattttgacaacatatatttcagtttataacttgagtggtgacgacagtaatacttatcactaggttgcaagtcttgaacaaattcacttactatacattatatatgtatgatatacccacaattccacatgcatggtctcatttaccgttgatgaaatattaatgttttgtgaatctagtaaaacaaaacaacatctaagctcagttttgtctttaatttacattttcttccaaatcagtctaagctcatttgctaaagactatataagttacgtaacttcatttttcctacctctttttgatgtaaatatttttttaaacattattttaggttaaaaatatctataaaaaattatgcatatattaaatacgtaataaaacagcaaagatcgttgactaaaaagataaaaataacaagatcaagaggctgaataacaacaatcaaatttgccgcaaccaagtttgactaatctttagaatgatagacatgatcacatgatgattcactgaaagaggccctcctaagtaaattagctaccttgttgctagatatttatcagcaaatctcagtatcacaaatcatactaactagaacttcatactaaaggaaaaaaaaaaaaagaaaaaaaaataaaaaagaacttcatactaaatgaaggttttcagattttcccaaatctaaattagaagatatatagtattataaagcttaccccaatagcagcctgaccattaccagttccaacatcccaagcaaatttgtggtcctgtgtccgtgcggcaattttcttaaaccaatcgatcggatatctaggccttgcgtcgagataagcttcagcctctttctctgataaggcagccattttcttctacgtacctctctcgttttctttccttggtttgaatacacaactaattcgttttctatttaaactctctcgagtcttgaatagtcttgtttctattaatatattatgaaaaagtttaaccaagtccaacttggcgtgaggtaaagtttcactgcaagtccttcctaagacgtcgtttaagacttttttgttttaatatattttttgtcgaagacaaaatagtcagtatatagttgtaaaccaatatgcaggcaatgcaagtttccacgaaatggtagagaaaaaaatgatttagttataatcaattttctttcaatctcgaaaaaggaaaattgtacatataatctgtgttttatctgtattagtgttaggcccaagttcattagctgaagtttcaagtcataatgggctcaattttgggcttatctcttgggtttagtttttacaagataaagttgataaagtgaagactaaaatgaggaaaagagagggtctcgagcgctttttactctttcttcttcacgagagcagtgtcgttgctctgatcttgtaactgtaactccggcggattttgccgtttatactggatttttccggtgtagtatgtgattcctccgatatagacgctaaaatcactgttcaccgtgaaactcgtacatcaaatttcgtcaattgcgtttctttatcgcttttgagtttcgactacaattcatgaaaccatgagtgagatcgtgagagttcaagagatcgtttctaaactctggaacctaaacatagcctccaaaaaatccccgaatctggttacgatcatatcgaatgttggttataatccttcgtttgaaactaatggaagcttcaaagatttcgtttctcgattactagctcgacgtgacagttaccgtataaggagattctctttgaaactacgttctttggaatttgattcagctaagtaccatcttgtcaacgaatgtctacgcaatgtgttgaatcgaggtgttttggatcttgaattggacatcaatgtcaatgaagtttacaaattgccatttgaggtcttcacttgcaagaaagttgtgaaattgaaactaggttctgattttgttattgacaatatccctaagaacgctttgcttccagctcttaagactctctttcttgataaagttcggttcattgataaaagtggtggttgtgcgtttacaaggcttgtttctgcttgccctgtgctagaggatttagtgatatataggaacaaccgtgaagattgggaatggtctcgcattgtgtctagtaagatccttaagaaacttactattcggcgtgaagactgggaagatcttgatggctctagttatgagtcaattagttttgatactccgagtcttgaatacttcgaatactttgatgttctccgagatgggtatccagttgttgatctcaagtcccttgttgaagctaagctagaacttcctctttttatggttggcgatacctacgatgttaagaatctgattaagggcttagaaaatgttcagattctgagcttaggcgttgttgacacgatgcaggtaagtgatcgctattgtttctctttaatatgttactgtagcttaacaactagtagagcatgaggaaatttaaatctaggaaccattgagatactaagatcatatcaatcttgctagtgattagaatgtttgctcaagtaatgactgacttagttgtttttaattctgtttcaggtgttttgtttcttcgaagaagcagtaccagtgtttgaaaacctgtttcatttatcacttagcactgaagtagatttctgttggaatgttctaccaattctgcttgagaaatctccaaatctaaagactctcaccattcaggtatgacctaagacccccaaaagtatattggacaaactaaagagtcaaaatcttcaatctcaaaattcctgtcttttctaggctttgcattatactactaatcactatggggatgagaacactgtttgcgattgtttggaggtgtattctttcttatcgtcctgccatattgaggttctaaagataacccagttcaagggagatatcggagagatggtgcaaataaagcatatcttggagaaattgccgagtcttgagctgttggaaattcatggtcaggtaaaaggagatgacaaaaagctgcagatcatgttggatctcctaatgttcgaaagagcttcgtctgaatgcaaagtcgaggtcaagtttccagtttgttttgcctcagcatgaacttccatatctgataagagaaacaaatgagcttccggtttgttgttgacatgagagctggtttgtttagtgtctttcttatccatgcaatttctgtatataacagcttgacatttttgtcatctttggctccttgttgtgtcgtttcttcgtgcctaattcacttgagtttgtaagagagatgctatagctattagctatcagctacgttaggtctactatgactcatttgtgctgtatgttattgttactttacagtttacacagtctatttgacaatttggtaaatgggatatgatttgactgatgttgtttgtttcggctctagtaacattgtagtttatatgttttatcaacgagctaaaaatatctcagtatatgcaatgcgcagagaactagaacaaagcttgatttaaaaaagaaacacatcataaaccaacatacacaagaactagatgattatggctacaagagactaaagttgttatatagattgtgtccagagatacaaatacaatacacacgaagtcattaagcattgacactcaattgttacaaaacccgaaaccatcacacataaacgtagccatagtcagataatgagaagagaaacacaaatacgtagccatagacagataatgagcagagaaatatagttgaatctcttttttttcacctagtaaataatgaaattgctaacaaaaaagggattttatttgtattttagtcaaataagtaatctacatagtatttttgcaaaattttttgtcgggatgcatttagatcaatttggtatccgcccattttaataattttgttcattgagtcttagttgggtcggttcaaataaaactcgattctagacctgttttaaaaacttttacaacggatatttccagattaaacaatattaataattagaagatttggttaacatttaaaactataaatcttctttcatctttgtttgaattttttaactgttttaaatcaatatataaaattaaaaataaatctcaagtttttatcctacatatattgtgattcgaaattttaaaaatggacatatgttatctaatggacgaaaaatgtgtgggttcacggttcaccgtttcacatcagctaaaattaaacaatgatttaaaatcatatcataaataagttcaacattaataaaataaataggttttttggctagacgaatttaacgaaacgggtttttaaatcaacattaataaaaaagtaatatatcattaattcactgttttaatacagattaaatccttaatttattatttttaacaccaccaatattaaacatatcaaatcagtttgaatagaaaatattgtataaaacaaaaaaaaatgttccgtactataatgttacttaataacaattataaattataaaatataaatatttcaaaaaataatataatttgtaaacttttatccataataaatagccattaaaatttaaaaattactatttttagaaaacaaattacgaattagaataagaaattacagaacatgatatattttggaacagaataatatggcgaacgattttgaataaatatttttaaaattttaaataatattaatatgccattttaatactagttaaatcttcaatttactatttacgattgtctcctgaacacctgttataccattagtaaaaaaacggatccatgaccgattgaccacgttctcgtcttcccccaaatctaaaaccctaaattctcaattgctcgtcacacttcgtcactccaccagcgacaatcgccgcagaaacctctacgaaacttgctacaatggagttttcatcacaagacgacgattttggaggagacgattccgctgctaatgccaccagggcttcaggtcccgacattaatggatttctcttaattcatggtttttgtttaaggttggattggacattaatttctcatctgtatcattcaggtaatagaagaagcttcggtgatcttgaagacgatgaagatgatattttcggatcaacaacggtagcgcctggtgttagaactgggatgattttgtctctccgaggaaggttattatccaatcctttcttcatgtatgagaaaaatctttgatgtataattctaactttcttttgctttttctctttggcagtcttaagaattgtaaagatgatcttgcttcatgtcaagtaagcattgttactgttcatccctaatctgtttgaattctataccattgctgtttatggttgcttcgcttttgcatctaactatatcgttttggttagaatgagctcgagtcagcaaaaacagagattcagaagtggaagtcagcgtttcagaatgagtcctttgttcccgctggaaaatctcctggttaacctctctttctcaattttgttttgtacatttgtatatgcgatgttaattcttgagcattcaatatgattctgtttggtacttttttttttccagaaccaagatttttgattgattatattcaaaacctaaaatcttctgagaaatctttgaaagaacaggtttgtacttgagtaataacttgtgtgtatatatcaatatgaaggtcttgattttcaaataaggtttggttgttgtttctctcttttcagttagaaatcgcaaagagaaaagaagcgtcatgcattgtacaatatgcgaaacgggaacaagaaatggcagaattgaaggtaattctcgagaaactcattgcctaccactttgattcctgactgatgctatcacatgttttcttgaccattacatagaatagatgtcgctaaacacagtcttgtattttgtatttctagtcagctgttcgcgatttgaaatctcaactcaagccagcgtcaatgcaggtatatagttctcccaatgttttgattctggaataatttatacaattgtgccaacaatacaaatcgtgaaaaaagttagctgttgaagtaacttggacttttctaggcatagtccgctttttatgccgtagtgtaccttttatgacggtcatcctcgaccttgatgcatgtagagggaaaccttttccttgccttttagatttcagtctgaatacgatgataagcgcatgtttcttgtaaacctttacctggcatctgaattattaacaagtctgaatagaagaaatggctataaattttgaattgcaatggtcatttagcagcttgtcatgatcagatagcagtgtagattatttattctttgtttacctttgtaggcgaggaggttgttactggatccagcaattcatgaagaattttcacgtctgaaggtctgcacctactcgtttctatttacccttagactactttttcataaggatgtatttgtcgtaatatatccttagataatccaaactgtatctacggaacaaaattccgctttcgttatgaatggcctgaaagaataattccttaataactgatagctgacactgtcgtagtagatacagttgaggacgaacattcccaactttttgttaatgtacatttgttgcagttaagtaaagagtagatgaagtttgattccatgtttctattatgcagaatctagtagaggaaaaagacaagaagatcaaggaactccaggacaacattgcagcagttacttttactcctcaaagcaagaatggaaagatgcttatggcaaagtgcagaaccctgcaagaggaaaatgaggagattgggcaccaagctgccgaaggaaaggtatagtttgttctactctcagtcttcaatctggaattatatgaattatatagtaaagcagtagtcttcttcaacctttgtaaaacatgattccctgaaaagggtaaagaaattgatgcttgcctatgttcatgtggaatggcagattcatgaactagcaataaagcttgcaatgcagaagtctcaaaacgcggaacttagaagtcaatttgaaggtaagtcatatgttgatattaagttatagcaaagatttttgtagagtttgcaatttggatttgaggatttttgtggaatgcaggactgtacaaacacatggaggaattaactaatgatgttgagagatcaaatgaaacggtgttgatccttttctcttatctcttaattcctcaagatttttcttaaaacggaagaatgattatggttttgttggaaatatgtgactttgataaatctcaggtgataatattgcaagagaaactggaagagaaagagaaggagatagagagagtaaagaaaggactggaaattgtgtctgagctagtaggtgacaagaaagatgaagttgatgaaattgatgaagatgcaaaagaagaaattgctggtggagaataggaatttgtagctttcaaaaaatgttttgtacattttgaagttcaaaatcacatttcttcattcgttatctgtttcatgaaacagaaagttctaatcttcatcttctattaatatgttttaattcgcaccattggtgtttcgatatcgatatgtggcttcccgatataactcgtgaagaatttgaactcgtcaactcacgcaaatcatctgagtagatatcagattagaccaaaataagtgagtccaattagttttccccaaaaacattcacagaggtcacgactttaggttaatctgttgcagttgtcacgaacgaattcaaaatccaaaggagcgggaaaaacgaagtgacgtggaagtatcttagcgaaagcatctctctctctctctctcacaatccatcatcttcattaatctgatcaaataatagggttaatcaaaagtccagaaaccaacacagttcaattttacgaaacctctcagaaatggagaagtacgagaagctagagaaggtcggagaaggaacatacgggaaagtctacaaagcgatggagaaaggaactggtaagcttgttgctctgaagaaaactcgtctcgagatggacgaagaaggtattccaccaactgctcttcgtgagatctcgcttctccagatgttatcaacatcgatctatgttgttcgattactctgcgtcgaacatgttcatcaaccatcaaccaaatctcaatctaccaaatccaatctctatctcgttttcgagtatctcgatactgatcttaagaaattcatcgattcgtataggaaaggacctaatcctaagcctcttgagccttttttgattcagaagttgatgtttcagctttgtaaaggtgttgcgcattgtcatagtcatggtgtgcttcaccgtgatcttaaaccgcagaatcttcttctggtgaaagataaagagcttcttaagattgctgatttgggtcttggtcgtgcttttactgttcctcttaagtcttatacgcatgagattgttactctttggtatagagctcctgaagttcttcttggatctactcattattcaactggtgttgacatgtggtctgttggttgtatctttggttagtagtctcaattatgcttttatgtttttgaattcgtctctctgcgatgtgattttgtatttatgctgtttcaatctttgaatttgtatagctgagatggttcggaggcaagctcttttccctggtgattctgagtttcagcaattgcttcatatcttcaggtattttgaatttaccttccattacttcttctggttttgtcctgtttcagtgtgaattgcatcactgaatgatatgctagcttaccaattgagaacaactgattctatatagtccaggtttctttgaccaattattcaatggatttagcattcttgaatagagactatgatctttactaatggttcctatttggttcatggaggttgctaggaacaccaactgagcagcaatggccgggtgtttccacactgcgtgactggcatgtttaccctaagtgggagccgcaagacttaactcttgctgttccttctctttcacctcaaggagttgatcttctcacggtaaataactccctgatgaccatagctttgttgcaaagttgctctaatattgttacctcttgcttctgcttccctctttttttcctaagctgaattgcttggttaaatctttctgattgagcttatgtttgtacaattgcagaaaatgctcaagtacaatccagccgaaagaatttcagcaaaaacagcacttgatcacccatattttgacagccttgacaagtctcagttctgaagttcattgctgtatctgttgtcatcgtcttggtgaatttaaacatttgatctatctttgtttccgacacattagtgtcttatgtttggtttagagatttgtagtctttcagaagaaactggtaaagcttgtattctcaagtgaatgtaaaacacaatggtgtggtagcaatgagatgattttctatcaatcgcttgtttttgtgtaatcatacaaagttgatgctcaactatctgaatcaagtcaattttgaaaattaaagtgagaccttacaggtggaataaagggtctttcatagaattgtcaaaacccaaatgttacgtacaatggtattagtgtacacaactggcattctgacgcgcacacttgcccacaaatggtttacaacacagatggctgctcaaagacactaagttaaaaagatttatcgctacacacaattgaaggaaaccaaatgatacattcgtagtagtagtagtagcagctaacgatgacgatgtatgtgaaatcaattggaccacacatgaacaaggccgtgtctgtttcctgtgtatatctcattgcgttcttcgtcgtagaaaagagcggttatgtcttccaaagcttcagctacagcgtttcttctttgctttgagttctttcccatacaattactgctgctgctctcatcatcttttggaggcccactgcttggtgttattttagctaagcatttcccagtcaatatattgctgatattgattgatcccgctggatcatcccacaaaacaccaataatcaatatccatcaatgagatttgttaggttataatatctggttaatattatcttgaggggttatttttcttaccatttccttctatccactgatcttcggtatctgctttgcagtacgagatgatcagatcttgatcacttgtaatgtagatattattagtgttacagtctggatgccatagaagatggtcctcaaaggaagtaacgagctctccgcgaaagttccacacagaaacgttccggttcctgaatgtcagaaacaactggttctcatacagaaatatgaatgcagacggtgtcatgaactcagctctactaacttccattagctcagcatttctgacctgaatttgtaaatcagaaaccaacttgataaagaaaacaagtaaaacaacagctaaaagattgattgaatcagacaaaaaatcaactcacgtcaagaatttgaagattctcattctcttgcttaacaagaagtttctcattgaattgttcaatgaagtcaactttcttgtttcggtgaagcaaatgattgaaggacttgagaacagtgccatcttctatcgacagaatcttcagaggaacatgactggcagctctcttgaagatcaataacattatccctggactgatgcagggaatcaaatgggcacaacagttagaaaattcacaagtctgtcaatccaatctagtggacagcacagttagaaaagcagcttgctcaatatttgcaaacaagaaacaacaaaagggtcaaagaaagatggagaaaagttacctgattttaatttcctggacatttttatctgatatcgaatatagcatggtgtagtttttcagatcaaacaccttgtatacactgcagaaacagctatcaggctcagaggatgaaacttgtcgtaaaaaaaaatttaggctgtgagactagaaaaataacctgtcctgcgcagaataagtcagcacctttccattgacatcatcaaactcaacaaaaccaggccactttaatgattcagactcaaaaagagcaaaccctgcatccggctgacctctcagaatatacctaatagttgattacaaccagaaacacacattagtttgaataacgcaacagacgacatgataccgatttggtagatggtagaaaacttactcaattctagtggatctgcatttcaaagagctgaaattgtctgaagcataaacagaaactgtgatgagagaatcattgttcttgttgtagaacaagctcctgatgacttcatctggactaacatttaaaaagcatattcttttgttcgactctgcagtttaaggtaaatcatactatcagtcacatagacacaaagctgagagtaagtagtcaagttacgataattacctctactaaaagctgcgcaaacaccagaatgtgcaagcgcaaaaacaatgtcccttgcagcaacaatctcaataactttagttctcttcatcaaaaacggtaatgcaactaaacagtgccctttaggatcgtgagtatcatattgctcctgaaatcaaaattcatcaagcaagagcagcttaaattagtactcaaatcaaatcccaattaagagagagaagcaatctctagggtttgggaattagggcaaattacaaaagattgaaaattcagaacataccacgagacgcatgttacgaaatctctcttgggcggtgctaatagagaaagctcgatctttacgagaagagatttctcttcgttgaagctttttaacactgttgacgaatccatcgggtcgagaccttttcttagccacaattcttcttccactacaaggtctagggcttgccgtaatccttcttccttccatctaattcttccttcttcaagcccaaatatttccaagtaggttttgaatttttgtggaaaccctaaaggatgaagaaaccctaagaggaaaaagaagaagcgagagagttgggtaatctctaggaggaagacgagaagtgacggctactacatgggagtgtgacgtaagacttttttgcagattcagattggaattaagctgatttcaatgattcagagctctttttttctttcaaaatctcaatttcgagcacgaaccagccgaaccaatccgaagcatcgtagatcgtagaaagataaaattaatattgaatatttttaaaacgcagcgtttaaggggttgaaagaaattaacttttatgggctgtgatggatggcccagcccaataaaccttgtgacaattgattagtttgcttgatagaattcttcgaaaatatttaattattttgttttactattagtatttttaaaaaattcatgagtcaactacacgaaaaaacgtcatcacatagtcacacatgtaagtttttttaattatacgaagtattgctttcatatacgaccatcaatcatgtttacaaacactataacaatcttacaccgttattttggttgtcaaaatccggcatcgacttattattttggaattggatatttatgtttatttgttattttgtttaccagccatattattttataagtaaaagtcattgattggttatccaatttgtaagataaaaggtttagaaatgaaacatcattaaattttgttctaatacattggactaaatcactaaaacaatctatttgagaatttgaatatgttctaattcatatgctattgttcaatgcgttttggtaaaaatactatagttgactttcaaaattttctaataattttttttaaaaaaactaaaaaatagagtaaatgtttaggtaaaagtatcgtaaattattggaaacttacttttcaatgatgtgattctaataacttctatcgtgggattaaaaaaatgtcagaaactcaacagcaaaaagtcaataaaacaaatgggcattcaaatgcatgatgaatttaataagagagacagattaaacgggccaaaatccagaagtcgtcccgtgtaaatgaagaaatgggcccagaaaaagacggtgaattagtcattgaatatgttacgtaataaccacacgaaattaggcaaaagcgacggatgatgcatcaagcatggtctctttacaaaagccatgtgaagtatttgatttctaccgctaacctcactttattatttttatcatctcccttcttccacgtccagctgaattaattaatgcacgtcttcgaaacattattaaaaatggtcaaatctcaactcaatcaataccgattttaataaaattcaactaacaaccatttttataaagagctgtctttacgacgttcgacgaacattatgtatgttttatacttttatccgtttttattttatttttctaaatacttattttatgaatttagaagtgtgttacaaaattaaattgagattccatttacagacatacaccaaaaaaaaaaaaaaaactagtatctcatcaaattcttcccaatttatgaaaatgtaattttcatcaattaactatttttttaaaaaatatactcgtggaaaatcaagaaatattaaaatgtaaaataacaaattattaaaatgaaatgtgtttgagtcatgtaattaaaaactggtaacgaatccgcgtacaaatagtggtctcctcctttataggataaaccaaaacccctgagaaactcaacagcgagagaaccacaaagcgtaacaaagagagtaataactatgagtgatttttcaatcaaacccgatgataaaaaggaagaggagaagccagcaacagccatgttaccaccacccaaaccaaacgcttcttccatggaaacgcaatctgctaacaccggaaccgctaaaaaactgcggcggaaacgcaactgcaaaatctgtatctgtttcactatccttctcattctcctaatcgccatagttatcgtcatcttagctttcactctcttcaaaccaaaacgcccaactactacaatcgattccgtcaccgttgatcgtctccaagcttccgtcaatcctctccttctcaaagtcctcctaaacctaacgctcaacgtcgatctctctctcaaaaaccctaaccgcatcgggtttagctacgattcgtcgtcggcgttgttgaattacagaggccaagtgatcggtgaagctcctcttccggctaaccgaatcgcggcgcggaaaacggtgccgttgaatataacgttgacgctaatggcggatcggttactctctgaaacgcagcttttatctgacgtcatggctggcgtcattccgcttaatacttttgttaaagtcactggtaaagtaaccgttcttaaaatctttaagattaaagtccaatcgtcttcttcgtgtgatctcagtatctctgtttcggatcgtaatgttacgagtcaacactgtaagtattcgactaagttataatcagatctgtagattctaccacactttgttcttgttttgttttttggtatttgaattggtttgtatttaatctctatgtatgttttatttactttaatgaacagagatttgattttgttctttttcgtcttaaaatctttttgagataatcataattgattcaacaaaattagtaaaacgtgttagtcaatgtgtcatatacaggtagatattttcttcaacctttttaaagtagaagaaaaagtcagataaagaatcaaatcagattcttaattactgtcacataatttaggcagattgtaaggaattagttggcagctcaaatcgcatttaaaacacttctttctctactttgatttatatttcttctataagtgtggcttcaagctctccaaatatacaaattaaaccatccatacattatagttttgtcatgaccaaacgtatgcgtaaatccagccggtgcggttgctgcacagcttcctgtatcatcttaaccattctcatcctcatcttcgtcattgtcttactcttggttttcgaagttcacaaaccgaaaaaacctataacgcagatctaatcacacaccgaactaggcgtcgtatatccttaccatttgatgttcagctcaatttcacacttattagtctccatattctagtcaagaatcgcaacaataagtttcaagcacgagatagggaagacattagtggtacacagagagaagcaacttggtgttgttgatcttccctcgggtacaatgccggctaaagtttcttcaattctaccttgtcttcttactcttcagagcgataagcttgtttcgacataagtggtatcatgctagatatattgggtggaaagattgtgttggaaacaaagacacgaaaagtcaagttgtttggaatcttcaagttgtaaaaccactactaacgactgtatttttcatccctactctctctctctctctctctctcgctatatctctcaattctaagttcaactccatctgaacatttctgattcttgaatagaaataacataagagagactaaatactacaacactcttaaccagaatgaactgaagcatcgatagtttcaactctaaagaaagcatttttaccaattgaagctcacaaaacaaaatgatctcatatctgcatcaacaactgtttttcaatattacagagcaaaagtgaaacaattgagcaaaataaaagagatattgaccttagacaagctcaatgtaagccattggagcattatcacctctccttggaagagttctgatgatcctcgtgtatccaccgtttctctcaccgtatctatcaggaacctcagcaaacagagcgtgaacaatctgtttctcgtagatatatcccaaggcttgtcttcgcttgtgcaacgaaccgtctttagccaatgtaatcatcttgtcaacgaacttcctcatcgcactagctctagctcgagtcgtcttgattctcccatgcttaagaagctgagtcgtgagtcctcgcagaagagctttgcgctggtccggtggtctgttcagcttcggaacacgtcgtccgtgtctcatcgcgtagatacgaccaccaccgtcaacaattttgaatccattctcaaagctttgccaatctgcgttcgaaattcgaaaaccctaacgactttggagattcaaattgagccaaatctctatgaaaagtggaaatttacctggaagtccgattgagaggagaggattgaccggagagagaccggagaaagatgggagtgaaggagaagagattgggagacgaagagtaaccggacggcgagaagacgaggaaggtaatcggagtgatgcggtggagggaagagctgatttgagagaagacatactccagactctgctcacggaatctgtaggagtcgccattgccatggacattggaatcgccattagattgtgatcctctgcaacaaagcggattttgctggtgttgaatggataagggatagaggaagaggactttgtttatcagaaaccttttgatgggccttaatgggcctataaactgtaactctgtagcgctttgccaacaagagactttttaaggtttttgttgccaaacagatatttgcatttgggctatgtaatgttagaattattttataatgtatgctattgctagatattgtttaagtgcatttgtgatttacaaacatttcatttttattttggttttaatgagcatttctattatagagactttgatgttaataaatggtgttctaagatatattaaaatattttatatactttcttaaaattggataaattttgggaaaatccttaatatcagttaaattgaagataaagagtattaaaaaaaactatgtagtaaaatacatttcacattttttgtgtataatagtacatggtattcgttaagatcactcaaaaattaacaaattaagtctaaaagggcagaaaagactattcaaatatggacttggagaaagacattcagctttttacgctgagaaactttcatattgagccgtgtgtttgtgttgtgaagagaagtaataaaaaataatttgaagtgaaaaaggagaagaaaaaataagatcgtagaaagcgtggatggtttcttcttgggttcactgccatgcgattattaaattggccatggggctagtgtttgacgtacaaaagtctaaaaattgtcagtcaaacaggtccaaaactttgtaagaaaaataatataataatagcaaattttctaaaaattgttaaaaaaagaacaaaagggaaaagatgaggatgcagatgaaagcaaaatgtcaaacactagtttcagattttatcgggaactggggtttgacagttggtgtatgtatgtaatggcctctcatcaaaacatgtgcatctttttccttttttgttatttactgttttagctctacgtcttgtccaattcctctcaagtaaaatgcctttaatatgatactaatatacaaggggactaatgctttttcccttttcttatccttgttttgtctaaatctttacttggattcctttatttttctcctctctttagattagtacggtttaaggaataccatctttctaattttagcacaaaattgcaagttggtgccccatcttagtaagcacatcgtaccacactttgattgtgtgagagacttcttcatcccatctctcataccaaacctaaatcaaatgactagtggtgcaacctgctgactccatatgaccataactaataaatcggtttatgaatccaactcatgtagctctatagaatagaaacccattcatttcacataatgaactgaatctgacattttatttacatcatttactactcaattttgtaattagcaagatcatctttttcattattcaacaattttgatattccataatttattaactttgtcatacatcataatattctgaaattttgttatatattgtaccggttccacgaaatagagctctattattatagaccaaacaaacaaaatattatcttcttgtggttagttcgagagagaggtcaagaagaaacgaaatggatcggcaaacggaagacgtcaaacacacaacgacgaacattttccgatcacccacctaatctcttcccatttttattatttttcaaaactcaaattaattaagaagaaaaaaacagaaacagagagagaaagagttaagatgaatagagatagaaagagtcattaaatgtacgaagcgacattcacaataattcgaaaggtggaagacgacttagatacggccaggcttcactgtcctcctcgtcctcctcaattacccctaacccctttttccgggattcatctccaacccacatccttccaaattctcaccccctcactgagtttttgctttttctcctcatcggagatcgtgaagacgatcaagtaatttaagaatcccaccattgataaaagagtctagcttttctactaccaaacctttttctgtttggaaattttcgattttggatttaacccttttcttaccttatttataaccatgcaatctcacgaccaacaacccttcaatctccatggcggaatccggcgatttcaacggtggtcaacctcctcctcatagtcctctgagaacaacttcttccggtagtagcagcagcaacaaccgtggtcctcctcctcctcctcctcctcctttagtgatggtgagaaaaagattagcttccgagatgtcttctaaccctgactacaacaactcctctcgtcctcctcgccgtgtctctcaccttcttgactccaactacaatactgtcacaccacaacaaccaccgtctcttacggcggcggctactgtatcttctcaaccaaacccaccactctctgtttgtggcttctctggtcttcccgtttttccttcagaccgtggtggtcggaatgttatgatgtccgtacaaccaatggatcaagactcttcatcttcttctgcttcacctactgtatgggttgacgccattatcagagaccttatccattcctcaacttcagtctctattcctcaacttatccaaaacgttagagacattatcttcccttgtaacccaaatctcggtgctcttcttgaatacaggctccgatctctcatgctccttgatccttcctcttcctctgacccttctcctcaaactttcgaacctctctatcagatctccaacaatccttctcctccacaacagcaacagcagcaccaacaacaacaacaacagcataagcctcctcctcctccgattcagcagcaagaaagagaaaattcttctaccgatgcaccaccgcaaccagagacagtgacggccactgttcccgccgtccaaacaaatacggcggaggctttaagagagaggaaggaagagattaagaggcagaagcaagacgaagaaggattacaccttctcacattgctgctacagtgtgctgaagctgtctctgctgataatctcgaagaagcaaacaagcttcttcttgagatctctcagttatcaactccttacgggacctcagcgcagagagtagctgcttacttctcggaagctatgtcagcgagattactcaactcgtgtctcggaatttacgcggctttgccttcacggtggatgcctcaaacgcatagcttgaaaatggtctctgcgtttcaggtctttaatgggataagccctttagtgaaattctcacactttacagcgaatcaggcgattcaagaagcatttgagaaagaagacagtgtacacatcattgacttggacatcatgcagggacttcaatggcctggtttattccacattcttgcttctagacctggaggacctccacacgtgcgactcacgggacttggtacttccatggaagctcttcaggctacagggaaacgtctttcggatttcgcagataagcttggcctgccttttgagttctgccctttagctgagaaagttggaaacttggacactgagagactcaatgtgaggaaaagggaagctgtggctgttcactggcttcaacattctctttatgatgtcactggctctgatgcacacactctctggttactccaaaggtaaaataaacattaccttttaatcactctttatctataaattattttaagattatataggaaagatatgttctaaaaagtggcttttttggttaatgattggggaatgaacagattagctcctaaagttgtgacagtagtggaacaagatttgagccacgctggttctttcttaggaagatttgtagaagcaatacattactactctgcactctttgactcactgggagcaagctacggcgaagagagtgaagagagacatgtcgtggaacagcagctattatcgaaagagatacggaatgtattagcggttggaggaccatcgagaagcggtgaagtgaagtttgagagctggagggagaaaatgcaacaatgtgggtttaaaggtatatctttagctggaaatgcagctacacaagcgactctactgttgggaatgtttccttcggatggttacactttggttgatgataatggtacacttaagcttggatggaaagatctttcgttactcactgcttcagcttggacgcctcgttcttagttttcttctcctttttcacaaacaatgtgcccataaatagatttacctgttttttttttgttatgtatcaaaaagagaggattttttgaagtcaaattgttctcactcacactctgtattggctacctgattggtggaatacatagaagttaatcatgaagattagaacacttgatattgaagaaaacacttgaaaatggtacatcaataataaaaatgataacacgtttaactgaaaaatcatttacaaatacacaattcttttgaaggctaccatttttttttttgggaattgttatgtattttttttttagcaacttgaattgttttggtttacttttttccaaaaaaaaaatatatacatgttgttttttatttttgttatggcaaagaaattgagatgtttggatttttcaattaaaaaaaaaaaaactcatctacgccttttcatatttcgcttgaacaacaacgaaaccctaatctggttaaagttggattcggccaagtccaccaccgtggagctctgaattcatttctcttgtaattcatcgatcgctgttgaatattttcaatttgagttcccacggtagaaaccattccgatttatacggctacttcatcgctcgagctctctcgtttctgtatcgatcgcagcgtatctgatttgtcaccggtttcaggcttgtttctctgacctctggttatcggctccctgattttgcgctctatctattaatcaatctcttattccaagtctttgttccgctgttatcacagctcatcttcatcttccattcactggtgtctttggtccggcgtcgttgtgctgctttcagttcatcacaggtattctcatttttacctgtttcttttttattgaggatttcgtggatgtgaccagttcaagttttttgtatgttactttgtatagcttttaagactcgattactgagaatttaggcctaatcgtcagctgaaaatataatgatctctactgttgtatgcattcttctcgtgcttttgttacttcatcgccaatgcatgtttttctactctgagagtgagagaatctctagctagttcctacaaagtctctttgtgatcagtgttgggaattcttaattatatatgcattaagatatacctgtctcagactctatacgtgattttcaggaaagagctttaaatattaagctttgaatattctctcagaccatcaaagatttgcttggtgcactggccggaaatggatcctagtcgatatggtcgtcagcaagaatgggataataacagtgtaattgtggttttctccttacatatatgggatgataaacaagatatttttagggatgttatgaatctcaactcatccgtggagtgagagacttgggagagtgaggatgtggatgggatttggctaatgtaatatccgtcaatgatgtttgttgctgacatagcttattctcttcaattcacaggctccggagggttatggtactcagcatgatccaaatcatcggtgagtgctagtaaaatggattacattgatgtagttgttaatttgttattgctcatgggggtatatttattttagctactgtaactaaattgtatttcttgtactttatttggtttggttacttgtgccgaaatattcatgatagttcatatttcatttttttaatatcttttctgtacctatactacattgctcttacaggtttggcgtatcatatgatgacggatatcctgatgaaaggttgatgcgggatgatgtctacaactatccacctggacataatactctgggtgacttgcctcaatctagaaagcgaaactatgaagaaaattatcccagtgaacttcgcaggcaagaaaagccttacatcgattcaaattatgctgctgactattatcatgatagtgaagctgggagtcgtaatggacattaccgtgatcatgaacacgaaaggtcgtccagatatgatggctgcgatgactattcttgtaatgataacaactatagatcgaaaaattaccatcatagcagagatgatggtcgtgaaaaagattatgattatactcgccgaagttatgattctgagtatgaaagggccagtgtgagagatggcagtcgaaagagccgtgatccgcaggacagagaacggaattctcgagatagagaatgggattcacgtgatagggagtgggacaaaagatgttacagccgcgaaagagatgagagtcctcataagagatatgagaagtcacgatctcgatctaccggacgtggggagttctctagatcaagatctcctagaggtcggagccatgggcggagttaccgggaggacagctatgagggggatcactggaatgaaagtgagaggcgaagagaatatgaagatagacataaccaggatcatttttctgctgtataaaatattctctcatccctggtctatattcttttgttgcgaagacatttaaaaaatccgttcctatatttttatggtttttgctagaccccatccgccactgttgttgtgaagggtctctctatgaaatcaacagaagaagatctataccagattctggtaaactcttcatttttttgaatctgtatgtcctcaggtttaaacaatttttcatgcatgacttcattattcccatgtgcatgctaggctgaatggggtcctttgcatcatgttcgtgttattcgggagcaaaattctgggatttctcgtggatttgcttttattgatttccccacggtggtatttgctttcaactaatctgttaattccttgcgctttttcttgtgatttcttcaacactgtgtgcatttatgtattttgtctgagcaggatgccgcacgcaccatgatggatagaattgagcatgatggtatagttttggatggaaggaaacttatgttccattacaggtctttttttaaataaacataagactttgattgatttagatattacctatggagggatcatagaattactacacatttaaattattgtttcttgaccgtttcagtatcagagtataacattcttacactaaattgcgtgtgttgtagcagccaacctactggtagggctggtgtgtcccgtaggcaggaacatgcttctagacgcagttatggtggaagtcgaaacatgatagttcccacagattggatctgtacaatctgtggctgtatcaattttgcgcggcgaacctcttgctttcaggttggtgcattgttttggatgaaagttctgtaaatttcattgtcaggactagagtataaacccatctgttaagaacagaaattacatatatttaattaccggaagaactactcattgtttggtgattctagagtctcaaacaaagtgataactactcatgatttggtgacgacaataccttaaaaaaaatagaaccgataaaactttcagaatatatctgttttttgctccttagagattatttgcagttccttttggtgacgaatatgtatcatcaattgacactttgtttgagactagggtggcatacatattttggtagtaatggtaaatgaacattttaatttaatgtcgacacattgatgtccatacctatgctagaatgtatttgtttgcatatacaatagtttgtttggaaatagagaaatttccatttttcaaatgtcaataaaaaaagaagtcaactaaaaccctttaactgatcttttttgatgggtttttaatttatctttccttctatttacttaaactctgtgaagtctttatcaatagtttaatcttgtggtggacaattgtatctgtagcccttctttgccatgccgctgtctgtgtcttgatttatgatagaacactcaaaagtcctaagttcagttataatatggaataacaaatttgtggccattgcataaatgtctgtgatctctgtctccttatgcagtgtaatgaaccaaagaccaaggattctccttcagcggatgtaggtttatcaaactctgcagcaggaaaacgaatttctgagacaggttctgatcagcatttttatttaagatgttttaaatttctttcttgagtcagaaacagtcgcaactgttaaggccatagtctttgtacttttctacatgccatatatacctaagatacattctgcttattttcttttccaggtccaactcatgtcctggttgtacgtgggttggatgaagatgctgatgaggaaatgcttcggtatgaattttccaaacatgctcctatcaaggttaacaaaaacccttttggattcgttgtctattaagatattgtactttatatgtcagttgacctggttttcctctttccgccattttgtaggatcttcgtcttgtgagagacaaattcactcatgtttcacgaggatttgcattcgtgcatttctattcggtagggtctcaaagccaagttggttgttgaacttactccttaaactctctcttctgcttcgcttttcccttactgatgatttaaattgcaagtgtgccttttgatcaaagatttattcgattgtgtagaaattagaaacccagtctagatgatcagtaccacctggtttttattctgcttgtgaagagtgattatgttttatagttttttttttttataaatgtttaagtgtctctttagtaatcatgatctactagttttgtgggtatttttggcaatgtttggtggtgagcgcactcaatcatttattttgtcgtacttttttataatctacattcgacaaccaccttttgcattgacttgtaaaagctcttgtagtagattatttatttcgtcactgattctcttaccaatttcatatctgaacggtgatcagattttgtagtagaactgcttgatatgtccaaatatctattttcccccagtttatgtgtgtatttgacttttttttaatccacctaccaacttgaaacagaagattatgattatgttcgtgtaggttgaggatgctactaaggcacttgaagcaacaaacagaacagctcttgaaaggaatggtaaaattcttagagttgcgtatgcaaagagtgttcatggttctggaactggtatatcagcaccctcgcactccaacaacctcgctgctgctgcaattgaagcagcaacgttttctcaacaggtacttgaagattgttttgatccagtttccctcgtttgtattggtgatcacacattgatcatttaattaaattttccagtatctttagatgaggattgtcattcttatgattcttctactccatgtgccctgacactcatgttggtccttattagtatgacggtgttggatgggctccaaaggaatacaatactggtgagaaacaaaacactggagggcaggcccagggtgttggggaaattgaatcccagaaagggacttctgctccacagtctggctatgtgtgggatgaagcatctggttattactatgatgcggcttctggatactactacgatggaaattcaggtcggcatttacttatattgttatttatttctttgaattgattgtatggttgggtagctgcagctctaattcccatatctggcattgcaaaacatgtaatgggcaaaagtaagattgatcctgttggctggttgtatagtcctgctatagatgtattctattataggataacttcttggcaaaaataagtcgtcagctctggtttgttcaaactatcctgttcttttttatgattgtggaattcttatactatgtatgcaccaaactagcaaacatcgagatacaatcaatcaatcatacaagtgtatgtcttaattagacttttaaataatggctgtagggattcagcaagtgttatatgattactattatggctgctgttggacttccaatggaagttttttcttttagttattgctgagttatgccttcttatatatgtgtatgtgccttaaaatttcgcatctgatatggcacaatgatagactgttttaatgatcttggttatcactaggcacctcttcttggtgtgtggtgatgggaaacttggtttcactggtataagaagtgggtaatattctctattaatcgtatgtttctaaatatacaggtctctattatgacagcaatagtgggctttggtactcgtatgaccagcaaacacaacaatatgttccttgtcctgatcagaacaatgagagtaaagtaacagaaaaccaaccagactctgccaagaaggagaaatccagtcaacaaaaggttattatctcggcggctactacccctaatgtagaaaaagttctgtccttaccagatgcggttcaggcggctgctgcagcagcaattgcatcagagaagagagagaaagagagagtgaaagagataaaacttgcatcaaagactagcctactcgccagcaagaaaaaaatgagtaacgttttaacaatgtggaagcagcggagccatgaaacccaaatacaacgtccctcaccctcacttggtgacaatccacctacagtttcggctgaagcaaggtcgtctttctccactggacaatccatgggcaaactgaaatctgatgtaattattgcgaaggagagaagtacctccaatcatggagtttctgccctgacaactgcagaaagctcgagcagcagtacaacaggaggaactttgatgggggtgatgagaggttcttttggaggaactttgggtggagcttcttcttcagctagtgtacaaatgccgccaatattaccttctgcttctccagcttcggtttcagtttctgggagtgggagaagaaggttctctgaaacaccgactgcagggcctactcatagagaacagcctcagacatcataccgggaccgtgctgcagaaagaagaaacttgtatggctcatcaacatcaagtggaaatgatgttattgattcaagtaagagcccttgactctagacttttctaaaaatagaatcctgaaatgaggtttttattgttgttataattgggaaaatggttcgtttaaatgaaggtgaggatttaatggggttgaggaaaggttcatcggatccaacaccatttcctcctggtgtgggtggacgtgggattacaacaagcaccgaagtcagtagtttcgatgtgattacagaagagagagcaatagatgagagtaacgtgggaaacagaatgctgaggaacatgggttggcacgaaggatcggtaactttaaaaaccagaaatttgattgatgggtaacgtttatatgttaatggtgattgttggattgtggtcagggtttggggaaagacgggagcggaatgaaagaaccggtgcaagcgcaaggcgttgataggagagcaggacttgggagtcagcagaagaaagttgatgctgagtttgaggttcagcctggtgacacttacagaactcttctccataagaaagcacttgcgagatttcgtgacatgtctgacaataattgactctctctgtgtgtaaagtcagttggaaacttctaaattccgttgtgcttaaactgtgaaagtgattttgattttgttctttttgttaaattattattaatgaaaagagacagattagtactacttgagtttatatggaccttaaaacctttgtattattaatgtatctggaggcaacaacgacccgaagacaacaacagtatttaaaaaacttaccaaaataatatatgctttcaaagcttttaattacgaaagttagctcacaaaaaatatcagataaatacaactgtttttgaaaatttcagaattctattttgttaatgaataataattaattgttatttcatgctcatgcacattaataacctaaaaagtattgtttgcaggtgttcgagaagaatatatgcattgatgtatatcaatttctaggcattacttttttttcatcataattgttagtaaaggtgacatgtaaaactagttaatctcgtgtctgtcattggctcttcccaaaaacagattggttaatacgttagttggaaccattgttataatggctgggtttagttgctgccggctatttccggataaatgcctcaaaagatctttcagtgaatccaccgtgatttgcgttgtcataacgtgagatgcaaatgaagagcttttctctgttaatttagtttttacacaaccctataaatatagttttacacttaaaacccataccaattatttttgaaataagttggtattgcccaacttttttatcaaggttttttcaacatgaagaaatgtgagtttttgattgattcaagtaaacgtaagttttgcaaaagggatgaaggaaatgtgatcactgatttattgatttgaatattttgatagggttaataacaggagcagtggtaatagtgttgattggattaggggcatgggctattgtttccattacacctccacctcctaagagatgcggaaccccaggtggaccgcctattaccgcccctaggatacgtctcagcgatggccgttatttagcctatgaagaacatggagttagtagacaaaatgccactttcaagatcgtctttatccatgcattctcgacatttaggcgtgacgctgttatcgccaaccgtgttcgccctgtaatgatttgatatctttctctcttactatttctcttatagagtatttctgtaattgcattgtttgtctctcagggctttctcgagaaaaatggcatctacgtggtttcatatgatcgacctggttatggagagagcgatcctcactcgagtcgcaatgaaaagactttagctcatgacgttgaacaacttgctgaccaactacaacttggttccaaattttacgtggttggatactcaatgggaggtcaagccgtttggggtgttctcaaatacattcctcacaggctcgcaggagcgacactgctttgtcctgtgaccaactcatggtggccgagtttcccagatagtttgacatgggagctatggaacaaacaatcaaaatccgaaaggttttcgatgctcattactcatcacactccatggctactctactggtggaacaatcaaaagctattttcaacaacagctgtgatgcaatcaagccccaatatgttctctcctcaagatcttgcactactgcccaaactcgccgcaagggtgtcttacaagaaccaaacaacacaacaagggacacacgaatcacttgaccgagacctgattgttggatttgggaaatggagttttgaccctatgaagatcgagaatccgttccctaagggtgaaggttcggtacatatgtggcaaggggatgatgatcggctcgtcccgatacaactacaaaggatcattgctcagaaactaacttggatcaagtatcatgagattccaggtgctggtcatatttttccgatggctgatgggatggcagaaactatcttaaaagaactcttgcctattcctcaatcatcttaaattcaattttacatatgtttagataatcaaaaaaaaagttgtacagtttgtctccaccccaaaaaaatagtattgctctgttcctcatgaataaatttcatttcattttatttttttgcgtcttttaaagtatttactgcagcgcagtaaaaagatttttctctggtaaaacaaaaccaatgaatttcttttatttggaaataggaaagctaatagttagatgacaacgtacctgcacctattctgccacatatatcgtatcttaaacttgcagttaaaggagatgctaatcataataattagtttgaagcagagagaatgctcacttaggaaggcctgtttcaggatcgagaagggcttgagtttggtcgtgaagcacgatgggaccttttccaggtctagtgcagataaaataactgacttctcctttttgatcctgagatccaatgttgtctttaatttcaggtggaggttgcagattctctacaccacttgctccatctaatcctgcttcttttagaattgaattatcgcccactacgtaactggtaaataaagaaaccaaaatcattacaaacagctttttagtcaattttaaaactcatagaaaaccgcagttaaacggatcacacattgttctgtgtctcacctcttcatatcagtgtctgacttagggggaaaatagtacagaagcccctggagcaattggactgcgacctttctgttgcgtgcaatcagtacagcatttggaccagcatcaaatgtgtaagcaacctgtacagatttacattttgagttattagttgttttcaaaaggttgagtcaagacactagaactttacctgtggtgtcccttcagaacggttccacttttcaactaagctaattattctggaaaagcagataacagtttgatatattagaataaataagggtttgataacaaataaactgaagcagcatatagaaatatgtcaaaatagagaatacctgtgtgaagtgtcattcatgtagaatatgggtggagatgtatccagacaaacagcatgaaactgattactatctgtacatgtcaattgtgtaaacgatgcaaagtctcgattttttatagcttcctccatttgcaaaatccgttttggcacaacttcctatagatagagaaaaaacaaaggatgaagtttaataggtaatacagaagttcattaaacatcaagaacagaacgtacttttgctctatgctgtaaaagcaaacttgtctcaacactttcacgcattccggaggtactgctcgtttccttctgccgtgaactcacctgttataaaaagtttgaatgaaggcactaaattttaacagatttctgaccattcgaacttgtccataatgctatattcacacgttgaaatagagcaactcaaaatcttgtcgtggaaatacttatttatatatctcgttcaatcaaatagtatgacgacagtaaaagtaacatatggttaatttgaaaaacagcatgatctggaagatgggagagtcggagtaatcctgccaaaaagtcacaatattttttaaaagagccataccacagcaatgatgataacaagatcatcccaatgcttctcatctgccagttgaactgcaacgctgtcacttccatcttctttgcttcccattgtccacttgacaaatccaccaaataaactccggcaagcacttcctgaaccttgcctacatgagcaaacagaaatcaaaccatgaatatcagtaccatttaattcctagaggagtgtcagatttcacttcactatcacaactcatgcattagtagatgactatacataaatcaaagcattgatatatagtgcaaggaagtccactacataggtacctggctattgcagaaagatggcttggatcttcatctacattcatcaactttgcaagagaaaaaactgtaggcaaaaaaaacagtttgacataaactacaagccattctcaagctcataatcatcaacagagagaaaaagcagaatacctagacaagcaaatccagcagctgaagatgctaagccagcagcagtagggaagttattatgagaagcaatatgtagattcaatttctcccaatctttcttccttatcttgatccccttttccatgtcttcaacatcaccagcacgacctcgtatttccctcaaacaattttggtacctacttccagaaagagatatttcctacactaacatgaaacaacaacaacaacaaaaatctttgtaattcgataattggaatctcagcaaaaggagagagatcgtgatgggaaatgaagcgagtgtaccttgccattgagccacattcgatcccgatcaaaagcaggactaacggcaacagtggtgactgtgcagagatgatcaggatcaagagttacgctaatgctatcgttaacggggagaatccgaacctcatctctctttccccaatacttaatcaccgcaatgttcgtcggagtttgcgccgtcaccatgaacacccatttctccgtcgccatgtgaatctccaaaagagatctgcagcttcaaagtagttgaaaatgaaagcgacggagaatacgacagaataatgatgactcattgcctttacaattttaaaaatattattttattcaaaaattgagaacttcactaactgtaaaactctaatcaaatggttattgccattttgatgaaaacaccaaaacttaacctaaaacgttttaggaaaaaaattgagttaggtaagaaataaccaaaacacgaaaatcattgtgatgcatgaactttatgcttaaaggcctttgagttgtcttgtctttgatattgggatatttgttagctgggaaaggatatgtaatatataaaccactgattcatataagtaacaccattgttcatgagtaaaaacagactcttattatagctcatacagcattggttaagataattgaagaaagcatctcattccaaatatccgggacaccgggcaagcaccaatgactgcaatctgatgaaggtccagcgatacgatggtgcttctcttcctcgtgcattgctctcttgaacaccgaaggatgaccgtctcttctatacgcagacattgttgtgatatcgtataaatacactcggtatttcattgtccttagcactttgttcaacactcttgactgttgaggcacgtggggtttggtggaagaagataaagaaggcaagggatgtttctggttgtagcacatctgaccactctctctgccaagaatttatgtacatgaattaatggtgtccattttgtatatatgttgagattaagaggagaatataagaaaaaacctcggtgagacagtgcggaaaatgacttttgttttggatggatcaagatttatctcaacccatttagcccatgtggttagtcctctctcataagcaaccattgggtccatagctttgaagatcttattcccatccatgtaataatcccacctaaaacatcaatagcttgcgttactgtcacaaatcccaaatctgatgtaaaatgagacacaataacaaatacaatgaacatagacgtctatgaaccgttatacactaatcatttgcttttgaaggaaagatgtaagtgtttattcagatgacttacgaactccatctctgagagtgagtccaccagtgagcggaatcgaatacaagaacatctacaccacgccaatatctagcattgtcttcgattgagtccaaatgtaacacccttttacggtcaactcctctcttgagttccacaagcagaggagcccaacaaaactcaattgatgtctcaaaatcctgtatagtaaccaaatttaatagttgcatctactaaccaatgatgtatatgtgattcaaaaggagatttgtgattattaattaccagagaatggaaagacatcgtaggaccattgtaagtgagcttcttacgatgagtgggaagaacagactgtactaagcagacaagagattcccactggtttctcatcattgaatctccaaccagcattattctttttcctctcattttcccaagaaatttcaatgcgtcaaacctaaacaccatcatggaaagagccactattttggttaatattaatgtctctttcccatttttcattagtcaatttattcatcttgcaattaaccatgcaaagccaatataaaccaacttttttacttgatgagacagaaattttaaaaagaagtaatgtaagaagtaagaggagtgtggagtgtgccttggtagtgaacaagccttagggatccatctccatttctggtaataagagtcgggtcttccatttctttggcaacttagtgcagaactcagatatggacagcttgaatcatagagcggatacgtttcatcgaacgtccatttccccaccgagtaatcacacctctcctctcttctttcacgcctcgtctgcaaggcgttgagtggatcatcgtcccctactagccataactcatcaaactgagacaaaactactttgccaaggatgagacacaaagataagaacaagactcgagtctctgaggtagccatttgaccaggaaactgagcagtgtgggcttggagaaagaaataatataaagaagatgggcaacaaaaagtggataaagtgaaaaagggcgttaattacggaaagtggtggtaattagtaattagacttatgcttgaaatcatgtcccgtgacttgcgtctcctcttctctccatcatatcatttttttataaaaacagattacagtatccaaggcgggatttgtgagtttggtggagcgttttgtatatggtttaaaaaatcgaaatagtttctcaacaaaaacaaacagaaatagtagaaaacaatccatataaaccagaaaaaagaattgcaaatcaaacacaatggtaggttttgtaagactaaagaaatgtaggttttgttgtagagacccaaaactctccctgccctcaaaaggtcatgaacagaccaaattcaggacccaaccttccttattaatagttttaagttaacccaaatatgtaaaaaagtattaatgaaacgaaaccaagacatggcaacaccttcttcagcttttagtatccttcatgctttatcaaactcacaccatccccaaacaaacataacacaaaacaaacactatgctctttggttagcttctgtcccaaacagatgtcatctttagtatgtcagtcgagattaagataatcctttagaaaatccatttttcttgatcatctgaagaagattcatctaaccatgattggtggatgtgcatccacgtcagcctttgcttttcctcctttcaattttaacccattttcagttatttttttccaatattatttaaccaatctaatcgtttgaaatcttaaaaggatcataaatcaaggtttaccttataactcagtaagacttttgttgaacaagaccgtacttttccctctgtaaacacgagctagacattagaacatggaagcaaacttctacagtatacccttatgatgagaaatcaaacaaatcagttgatcgtattttctgctaaatcatttcctagctcgataagtcacaagtataagccatgtaattgaagaacaagatttcttaccagataactcatgctttacaaattttgcaagccatgtatctgaactgatatgagaagacgtaacattatccaaccaaatgcgaaacttcttttccttcccatcaccgtataaattttccatctcatctatccattcatgtatcggtttctccactccagacggatgaacaaaaataccaagtggactctgaaacattgcaaaagcataacaattacgtcaactaataagtctacacaacacaagcaatcaagaacatcttcaaaattatcaatttgagcacttgaatttccattacgttagatgctagagagcttttttttgtcaaataaacacacttacagagagcgatttcaaattctgcaagtacttgtcagacttttccacctctccacaacgccatctctcataaaacaaataaaactgaacaacctcatgagcaggattcaaactttccccatggaaattttcagtgtccataacatctctaggagagacatttggtcccaaattaaacctctgaatagcttctatcataccagctccacacctctcagacgcatgaaatatttttgggttgtcctttgcattttcttcataccattgcaataattcttcatgcgaattgctaaccttaaacagtaaaaatataagcacaatcactcacgcgtagtcaagtatgatcgaacctaaaaaaaagtagttgggaactaaccattacgccatatacgtcagaaatgttgaaaagctcagcatcatttccagagtcaccacaaacaagtgtgttagaaggctgcttgccttcaatatccaacttgtcaagtagatatgtcaaagcaccttgtttgccagctcctcttggtaatacatcaaaagcatatccattactataaaccagcttcacatccacctataatgaattttactgtcatcagcaccaaaagtaacaatctatgataagaatgtagccatcaagctcacataaagagtacacacaaaaatctcaccccacgctcctctaatatccctggaagaaccttcattatttcaacagcgtcttctcttcccacgaaaaaactcactttgtgctcttcttggctcttgtctggctatcatagacaacacacagaaaaaaaaaaaaaaagagatttagaacatcaaattgctacagattcagcaggagatacagcacaaagaagatgatgctattatttgccagaaaactaaacaaaaagtctaagtcaacgcaggaagagacaagatatcaagttatcaacacaatagcaagacccacatgcaccagtataaaagaaagagaacaatttgataattcagcagagatagtgacaaaagaaggatctttatagaaaatcccaggaaacaagccatgcaactactcataccacaatgcaaaacaaaacaaaaaaatctagactagctaaatcctctaaacaaactatacaaacctgaggctcaagtttagggaatttaagagtttcctcaacaacaatgtctctattccacttataatccaaacgagcagtccaaacaacatcagacaccgttgattcaccgccgccgtatacaatctcagaacccacagaagttacggcgatgtcaggagtcaacaacggtctcttcttcctcagactcgagtaagaactgaaagacctcccggtgcaataaacaagcaatgaatcatggcgatagtgagcttcccaaagcgcattgaatctaagaaggtcattgttttcaggatcatcgtgatccacctgcgaatttggtgagaattgtttaattttgtggaatctaagagacgaattggaaatcagaagtgtgagtgagagaggaaatagaaattaccaatgtgcaatcgagatcagcaactagtatgagacgtggtggtccttcaagcctatccatcgatttcaggaacccaggtgtttctctttgcttctctcttgtctctttgctcaactaactttttggttcctttattcttgacttccttgggaagacgaagtttttcttttcttattcgaacaattctgtcgagtatttgaattagttataatctttctttttttaattagttagaaatttccttaagcacgtatttatataacatgtcaacgcaacgaagttccccctcaaaattcagttttatgcgtgcgttattacgacatgatagatcctgacgaccaccacatgatgcattactagcaatggatgactcttccttatcattcattttatattcagagaaaatgtgcaagagaatttgcttggtaagtccattggtgacaaaaaatcgatttagtttgagtggaaatagagaatcataaacaataccaaaattgttagagatgtatgtagtgatacaaaaaacgatattaaaaatatatattgttctggttctattatttgttatcgtttttatgattggtaactattaataataatttttcaattatagtggtaagaagttatcaattaaagtcttgttcttttgggtctaactttggatccgattgttaacctataaaagaatacaaggaatgaaaagtaacatgactaaaaaagaacaaacaggaaaagaaaaaattataaaataagaatacaaaagaatgagtgtagaagaaaaatagaacaaatgttactgtaaatgataaccaaaacatagaacaaatagtaacaaaaattaaaaaataaataaattattttcttaattaaatagccacgttttcacgtttttttttctaattttctataaatttaatttttaattaataaatgtttaatttgtttttctgtttgttcctcatcaaatttgagaaggaacaattttcttctacgattcctcaaaaaataaggaatgattaggaatagtgtggggtctacatgttacaatttggaaaaaaaatactactgaatggtaaaaaaaaagaggaacatgttgttcctgtccattccttttctaaaaagtggtcaccaatcggaccctttattgtgatttactaaccttttcagcggtaaaatattatcgttacactttcacaaataatttgctagtaacgttaagtgttagtgacttatatgagattgttcaagtttattcgacaaatgaaatcctttcgatctttactttaatgtgtcaaatatcatgtccactttcaaataaagactcttagcttgaaggaaaactctacgaaaaactaacgcaatatgtcccatttatatggaagacgcgcgatgttaaaattagatactgaaagttggagtctaatacattagaaactaatgatcattcaagaaaaccatagattatcacagtgacaataggcacaagtcccactccggctattacaagcattgttagaaaaagtttaggtgggacaaaagatcacaccttgcatttagtcgttacacgaccatccatcaaatagaagagatcgaagatcagctggaagaaaagctagttttaaaaaaaattcttacttgatttgaacataatacgatatgattaatgtgtcttaaaaagcatagaaaaacacatcgaaggccataaacgtgagaacgattcaaatgacataatttttacaagaacaaagaccagcaaatccaacttaccaaaaaataaaaccaccaaatcctagaaggcaagaatgtgtggcaaaaaaagaaaaagaatgtataccatttggatgggaggtccaaaattttcttagaaattagtaacttaaacttttaaaactcatacacatatggattatatgttgaaaaaatcataattcagaaaaggatcatatataactactaatatatttttgaggtctttgtttttagttattttattttattttcttaaactcgaggtctttgttttaacaatttttctaatttcattatcttacaaaaaatctcaaattttaataatataaatatttgtcataggtacgggaagagcggtttgttttccagcgaaaaaaaaagaacggtttttctctatttgttgttgttgtttttttttaattattttcgcccctgattttttttaattaatgaatataatttttgcaatttttcgtgggaggctaaaagaaaggcgaggaggaagaagaaggaaccagcattatatatgaagcacccaaagcattctctgctcttgagaacctcgcagccttttccaggtattaaaacaaaaccctaattttctctttctcttatcaaatttagtattcttctctttctcggattttccctagaaattcacgaggatgaagatgagaaacgcctatcccgacccaatcgaattactaaaaaagctttaacccaagctttttgattttctatatccgaatgcgcgatttcgatttctcttttcgataattttctggtcattgatttacctgcagagtgtgtgtgtctgtgttgtagggttattagttttcgctaagtgatttggatgagcttggatgtggaagtgaagctaagaggaggttcactcttgtcatcgtcatcatcaacgttgttgtcattgtgtccttcatggcacagcaacaatcttcccgactcaatcgtctccttactttgttggacagtatcctttatttttcctgattatttcctttgttaccaataatgcttcgtttttgttgttgcgtttcttcgtatcataatcgcttaagaaggtacatgttctccttaattatcatttctttgtagctggttcaacacaagctactcggctaactgcagccaagcagatcggggatattgcaaagtctcatcctcaggacttgagctctcttttgagaaaggtatagtcatgggatttactttctatagattacagagatacagggctgtggttgattgttatactgatgggaatcaatgacaattgctagtgaaagttacataaattacgcgtccctagcttagatgctctcttggtctttgtaataaacctactattcttccgaatgtgctcaatataggcgggtggacagagtagaatctatgatgtgttgtgtatgtcctgagctttaaatctcaaatttattgctgggaacaaaggtgtcatcccctgttcgatgtgtttacttcttacatgtcttatatacatcacaagtccctgcatggctagagaaagttgtttatagagctatacacatctatgattcctaggtgcgcctcctattgtttgacacatagttacaatacatctttaaaaggctgttgtctggattgtacccagcagatcctttgttcgcccatactgattctaaagaatgtcgaagcttaagaaaaagaatctagtgggcttccagaatgaaaatttaagtagggtgcccacctgcctatcttagtttcaggttttaacttgcaattatagagtttctattattagattgaagttcaagctttgttaggacatctgatcttattcataaaataatatttctaatcaggctagggtttgtgttctggagaccttgtttctgctacttttttaggtatcataaataactatttcgtcttggcattgtactttaggtttacatctttctaaactgctaagtcgtcctttacattaaattcatctatttgttcctttggcttaactctacttcttcgggaattaggttttgcatcacctccgtagtaaaaagtgggatacgagggttgctgctgctcatgccattggtgccattgttctgaatgtcaaacatccttcattgagtgaactgttaaattctttagcaacgaagttgggtgaggcagggatatctgataatgtagatgaagtggtggctttccgcaatcttcagtcaaagattctggcaaatgcgccctttagaaggttattaatagctctattacacaatacatatgttttttatagcatctactgttaagacttcttagctggatttttagatgtctttctcatgttaaggctgcacgatgtcttttgatgtctctaacatttggcatgtgctaacagctttgagatgaataaggttttagagtttggcgctttgttggcttctggtgggcaggtaatttattatttgctattgtttacttgtctaggtcattttgtaagatttcagccgatttatctctgatgtaaattcttcattgatatattgtcgttaggcctaatcaaacatctttatgaaattacatttttgtctgtcttaaatcgtttgtgataagtaggccactggaatgacgtaagtttgaacgcaatctggttagattctaagaagtgtttaggtttaatcaagttccctctgcatcacaaagaaacatgttggatagtcgctacttttgaattctatacgcttttgttgttgaggatcacatctttagcatgattaaaactatttgattgaaactattagcaggcttttatcaccaaaaatatcctttgtcagctgcaacctgtaaaattgtttcctacagtttcattatttgaccttaagaaattttatggcttggtttgtaactaactatttcagcacaatctgttaatgcaacatgataccttgccttcgttctttttctttgaactttcggtttaggggagcatgttaaacctttattgctccctttatccatacctttttttcttctcaaattttgttgcttttccctttgttgcaggagtacgacattttgaatgacaattccaagaatccaagggatcgagtggctcgtcagaaaaagaatctccgacgacgtctaggtcaatagcttgtctcgttttctattaatcaatttccatggggaaagtattatcagttgtccaatttcatgaaatgtgatatacgtaaccaggatagattataggtataaattttgagaaatcagtatatgcgtaaacccattcttctaagtctattacatcacgactattggttctctgattctctgtaaagttgactctgtatgctccaaatattaatgttttacttgattgatgcatctattgaacatacttctgaaaatctgtgaaacaggtttggacatgtgcgagcagttcatggatgtcaatgaaatgattagagatgaggatcttattgagcagaagtccaatgttcctgccaatggggttgggaacagattatacgcaaactgttctccacatcatatccagcaattcgtttcaagaatggttccccgcgtcaattctaggaggccaagcgcaagggaattgaatttactgaaacgaaaagcaaaaataagctctaaagatcaagctaaaggtagctgcgaagtagcagatgttgagatgtcatcgtctcatgttgcctcaacctcaaaaagaatattgtccgactcattggactcgagcaaggtatttggataatgtatactcataatgacggataaccaacttacataatatgagttgctgaacgttagtacaaccaacttgaagtctcattagttcattgatatgctattcgtggattcaactttgacttatgctgctttctcttaggtgtataatctcttacgattgtatagtccagacataggcacaaacttcacttgaaaatagaataacagttgtcatattttgttttagcaataaatctcaagctgcgtgaggaaatttccttattagaattctaggcacttcttgattttggcagaccatatttcatactgtcttttcacttctgtatatgctacttgaaacttcgtaggcggacattggtaatgaggatgatatcgagcctgatggggatggaaaatggcctttccatagttttgttgagcaacttattcttgacatgtttgaccctggtaaggttcatgtacttgtgccgtatacattttacttttttccacttattgagttctagtaaagttgactaataatctgataatgtgttcagcatgggagatccgccatggaagtgtaatggctctcagagaaatattaatgcttcatggtggttctgctggagtgtcaacagaagagtttagttcagataatgggtttgagttgaaagacgtcttgaataaagtaacacgagaaagagaaatcgacttgaatatgcaggtttcagaaaatgagctggagccacttcggaaaagacctaagattgaagatccatcaaaatcttttattgataacactgttttagaagttattgggggtgactatgatattaatgttaaagatgaagatgctgagtttttgctgccaccagtgaaggtcaatggtcaaactgactgtagttctacgaaactggaacctcaatcttctatggatgactcgacatctcactctgaaataaaccatgtggcagaggttaacaatcattttgaagataagagttttattgaggagccagttatacctaagcaacaggaagaaaatctcgaagtgttggatttggtcaaacaagctaggcattcttggataaaaaattttgaatttctccaggattgcaccattcgcttcttatgtgtgctttcacttgaccggtaagactttggttctttatcctaggttttcttttccatttttagctgtttctgcttcatggtagcacgattgtttagaaaggttctgatactggctgagatttggttgatcctttcttagttaatgattagctttccctcgattgcagatttggggattatatttctgatcaggtagttgctcctgtgcgggaagcttgtgcccaagcacttggtgctactttcaaatacatgaatccctcgttgatttatgagacattaaatatcttgcttcagatgcaggtaatatatatagagagagattgacttttttaacctactcaaaactaagaaacttgttgcagtctctaataattataaactgttggtaatctttatcatttatatttgttcagcgccggcctgaatgggaaattcgtcatggaagtcttttaggcatcaagtacttggttgctgtgcgacaggtaatattccagcacataagagctgattacacatgtttggaaaactgaaaaaggacactttcactgtcttgttttgccgttttcttatgtcttgagaacttatgcttttctatcatgatatgtagtagtttttgattttctgaggctctatttagcttatttgacttcttgatatgttcttggtttgtagagatgcatttccagtgttagcttttctttcttattctccccgttttttgcaggaaatgctccaagatttgcttggctatattcttccggcgtgtaaagcagggttggaggattctgacgatgatgtgcgagcagttgccgctgatgctcttataccggcagcagctgctattgtctctttgagaggacagacattactttccattgtcatgctactgtgggatatcttacttgagttggatgacttaagtccatcaacaagcaggtaaacaagtgtaaaattacatgctaaccttttcattatccaaaatccttcttttcttggtatttggagttttctgtacgagatcaattttgacctagtgaaatatttcttgcagtattatgaacctcctggcagaaatttattctcaagatgacatgaccctagtgatgcatgaggaattatcactgggggaggaacaaaatattgaactcaatgaaatgggtcatatcgagagtattggagaaagaagagatgtaaaggaaagcccttatgcattatcaggtttggcccctaggttgtggccattcacgaggcatgacataacatcagttcgattttctgctattcgaactctggtgggtttctgttgtttattctacaaaagaatctctctcagtacttgcttcctatgtttgtagccgcttacatgtatcttgtgccttgagtttctatgccctcagaatttaacagatgcaaaccctgtttgtttacctcagaatacactttacttatgtttcttcatatgtttatagtgtgctttcctaaattttcccctggcaggaacgacttcttgaagctggatgcagaaaaaacatttctgggcagtctaaaagttctttttggccatcttctattttaggggacaccctgagaatcgtctttcaaaatcttttgcttgaatcaactgaggagattctggagtgttcagagagagtgtggagactattggttcaggtacttagtaataaaattttgcttttctttgaaacacctaaattatttctatgcctttttctccttcttctgcatccttagaaattaaaggatcttcgttcttggtttccagtttgcattcttacttgggcctagattatctctcatttctcttcttttttagtgcccagtggatgatctagaagacacggcaaaattctatatggcttcgtggatagaacttgcagctactccttatggctccacattggatgctacaaaaatgttttggccagtagctccccctcgtaagagtcatttcaaagctgctgctaagatgaaagctgtcaaacttgagaacgaagcttctagcattctgggatttgattatgcaagaagttctgcttcccttgaaaaacaggaagatgcttctgccaggtccactaaaattattgtcggctctgatatggagatgtcagtgacccgtacccgggtagttacagcatctgcattaggtatctttgcatcccggttgcgagagggttcaatgcagtttgtggtagatccactgagtagtactcttacttctatgtccggtgttcagcgccaggtatgcatctctctatctcaatatctcgttttctctctattactagacatctgttgcgtttttcgaactaaaccgctggctctgcaggttgggtccattgtgctcatctcttggttcagagaaactaaatgcaaggccccttctgatggaagtggaagtttgcctggtttccctagtcctctgaaaaaatggctgctagatttgttagcttgcgcagaccctgctttccctactaaagacatatttcttccttatgctgaactctcaagaacatacactaaaatgaggaatgaagcttctcagttgttgcatacagttgaaacctgccattgttttgataagttattatcaacgaataaactcaatgtggagagcgtgactgctgatgagacaattgactttgcatcaacactagatttgtggaacaaagaaagtgctggaaatgaatccttagaaaagcaagtttttgaagacgtggagtcatctaggcaacagctattaagtactgctggttatttaaagtgtgtccaggtacattgggatctatttttgatacaattcatgtgctattttaaatcttgatctgctagattatcatgtcatataaattaaatgtttccatttctcgattgaaccatttttatcctatatctggacttatgtttatgcagagtaatctacatatcacagtcacctccctggtcgctgctgcagttgtttggatgtcagaatttcctgctagacttaatccaataatcttgccgctgatggcttcgattaaaagagagcaggtagcaactaaaatctaaatgtttgttttttcgttcgctgaattgaacactgactctgtgctgtttcaaggaacaaatactacaacaaatagctgctgaggctcttgcagagctcattgcatactgcgtagatcggaagccaagccccaatgacaagttaatcaagaatatctgtagcttgacgtgcatggatcctagcgaaacacctcaagctagcatcattagctctatggatatcgttgatgatatggattttctgtcctcacggagtaacacaggaaaacaaaaagcaaaagtcgtgttggctagtggcgaagataggtctaaagttgagggttttatcacgagaagaggatctgaactcgcgttgaagcatttaagcttgaaatttggtggttccttgtttgacaaactcccaaaattatgggagtgcctcactgaggttcttgttcctgaaattccttcagatcaacagaagattgaccttaaaatagaatctatttcggatccacaggtcttaataaacaacatccaggtatacccagtgaagtgtttagcttgtgttttttgaaggtttagtttgaggataggccaaaaacgaagcttaatattgaatatgcagagccttaacatggtgtacttttatattttatgttttccaggtggtacgttcaatagcaccagtgatggaagaaacactgaaacctagactgctcagtcttctgccttgtattttcaaatgtgttcgccattcccatgtggctgttagattggctgcttctagatgtgttatgacaatggctaaatcaatgacaacagatgtcatggcagcagtagtggaaagtgctattccaatgttgggagatttaacatgcattagtggtagacaaggcgcaggaatgcttattggtttgcttgtgcaagggctgggtgttgaactggttccatattctcctctattggttgttcctctcctgagatgcatgagcgatgttgacagttcagtcaggcagagcgtaacacgtagctttgctgcccttgtacctatgcttccattagcacgtggtgttccccctcccgtcgggttgagcaaagatctatctagcaatgcagaggatgcaaaatttttggagcagcttcttgacaactcccatatcgatgattacaagctttgcactgagctaaaagttcaattaagaaggtattttagtctagattaaatgaaagtttcttctctgttctgagtgtctcatggtttctgtgttgtctttctgatttggtcgcttcactggcttttttccttggttttctcatttgcatctaaacaaaattgaggggatggttcgtgagaaatggtaggacattgaacgtattgttgggttgagcagggttgaattcacgaaatttggtcttgacttagcctggtccctggttgatagggattagacgcattttataatctatatttttatttctatattgttgaattgaactgagtgggaactttattgcttttgaaatattattgtggaatatttatcagttttctgtttccaggtatcaacaagaaggaatcaattggttaggattcctaaagcgttttaagctccatggaattctctgcgatgatatggggcttggtaagactcttcaagcatctgcaattgtggcatccgatgcagcagagcgtcgtggttcaacagatgaactggatgtttttccatctataattgtttgcccttcaacattagttggtcattgggcatttgaaattgagaagtatatcgacctttctctgctaagcgtgttgcaatatgttggctctgctcaagaccgcgtttctctccgtgaacagttcaacaaccataatgtcattataacatcttatgatgtggtccgcaaggatgttgattatctgacgcaattttcatggaactactgtatcctggatgaggggcacataattaagaatgctaaatctaaaattactgcagcagtcaaacaattgaaggcccagcaccggcttatccttagtggaacaccaatacaggtttcattggagtgctcgacttcccagaaagtttagtacgcgttcttttatcttgagtgatattgtttcctttttgcagaataatatcatggagctgtggtccctttttgacttcttgatgcctggatttcttgggacagagagacaggtagcgcttatacattttccctgtttttatgttgttacaaatgaccaattttcagggtcacttttgaaagttatactttgaagaagtatttttggatattctttgttttcataaacgagacatatgtttcttttttgggcagtttcaagcatcttatggaaaaccattgctggcagctagagatcctaaatgctctgctaaggatgctgaagcgggtgtactggcaatggaagcactccataagcaggtaatgctgtttcttgagttcatcttttccgacttcttattttccgttgcaattgttgagaattggtaacatcatgacctgataaaatcttcaaatcacgtaggttatgccattcttactcagacgtacgaaagaggaagtcctctctgatttgccagaaaaaatcattcaggacagatattgtgaccttagtcctgtccagttgaagctttatgagcaattttctggttcaagtgctaagcaagaaatatctagtatcataaaagttgatgggtcagcagattccggaaatgcagatgttgcgccaacaaaagcatccacacacgttttccaggtatattattgtttgctgcattgaaggaaacactcccacctaacaattttacagtatggggagacctgatttttgtttgagttttaattttccaggcactacagtacctgcttaaactctgcagtcatccgcttcttgttctaggcgataaggtcacagagccggtggcttctgatttggcagcaatgataaatggatgttcggacattatcactgagcttcataaagttcaacactctccaaagcttgtagctcttcaggaaattttagaagaatgtggaataggttctgatgcttctagttcagatggcactcttagtgtaggccagcacagagttctgatatttgcacagcacaaagtaattacatatcgattaatcttacatctctgatttcttccatttttccgttgggtttgtttccttacaagattgtccaagacctaaccatgttatgttatgcaggctttgctggatatcattgaaaaggacttgtttcaagcccacatgaaaaggtgagtttcaacttgtggatttactctttttattgtcagtatatttctattggaggactttgtactgattaggtctcctaatttgtgacttgaaaagtctaaaactgatcagcctttttttcgcttaagttgatttgagcttagtttgttttttctaattccatgttcctctcttaatatatatccttaaatctggcttctacaatatattgcttatcggtctcaccttattcttacaacagtgtcacatatatgcgactagatggttcagttgtaccggagaaaaggtttgagattgtgaaagcctttaattcagatcctacaattgatgttctgctcctgacaacacatggtatgctttttcaattcaacaaagttctgctattgtgagatgatattgtaagcaacttctctgaattaaatcctttctgatccttcagttggtgggcttgggttgaacctgacctctgctgatacacttgtatttatggagcatgattggaacccaatgcgtgatcatcaggtaaggatttatatttttctttggcttacgtccatgtaaaatttcactttgcaaggaggaagagttccacatctctttcgtttttgattggaaagaatttaaaatagtatcggcacacacttggatagtgtattattatttgaagtttgctaatatagagctgaacaaactctggcaggcgatggacagagcgcatagattgggacagaagagagttgtaaatgtacaccgtctgataatgcgtggcacacttgaagagaaagtgatgagtctccaaaaattcaaagtgtcggttgccaatacggtaatcaatgctgagaatgcgagtatgaagacaatgaacactgatcagttgcttgacttgtttgcttcagctgaaacgtctaaaaaggtatgctattcatcttatttaatagcaattctctaacgaaagaagaagattgataatcctcaataatcggtctttattgtagggtggtgggtcttcgaagaagggatcagaggataatgatcagattgctggaactggaaaaggaatgaaggcaattctaggaaacttagaagaactgtgggatcaatcacagtacacagaagagtacaatcttagccagttcttaactaagctcaacgggtaatagcatagccaagaagccaagaatttgtgtacatatttaattcagctcgattcaggagaaaccaacaattttgacgttccaaacacataaaaaggttacatccactctttttttttgtctccattttgttttgtcgtctatcttttagattcctaaaagaagaaatgattttaaaattataagaggagaaaacgagaaaagagaagttgatgacatcggagtcgttagttttggcaatacgaccggtctaatgtttgtgaccgccgaagtagtttttgtagtggattctgaatcgtgtaaatacgcttttaaccagcttttcctcttctgtttcagctttttttagttagtttctgtttcaagtcttcttctactttttctgttaccttgttttgtcggtgttcaagtccaaaagcataaaacaggtaaaaagaaaaagcattacccttgagtaatcgacaaacctctctaaatcgacacaaattaagcccatcaaaattcttgaacaaatctgtttcaagtcttctactcctgtggtctaaccatgattggcaattgttttcacacgcttagaagattagtcaccattatcaaataataatcgaattaaaacttgctgaaaacttggataaccatcctagaaacatctctcgtcctcttacgagttacataacctatttttgttttgtttttaatttaacagaatgagaaaacatagcaacacctgaatcgacaaatctgactctatatacacaaaattcacaaccccacacacaacaacagtttttcacaaagtgagcctaaaaaggataaaatcagtcaacaacatcagagcagagaaaagatgagataagatttggatcaccaaatgtcatgagcaagtcaatatactgcatagcttcttgtggagtgagaccttctagtaggaaatcaaacgagttagaatgagtcccactcataacttctaagctttgattcatcaatttcttctgcttctctttccccatttctgcagcttccaccattggcaataaatctttctcttcctcttcaaaatgtgttttacacatcatctatgttcaaaaacaaaaacctcaatcattacaaaaacagacaaaagtgaagctttttgttattgttattttaactttacctgcaatgatttgaaacgagaagcaagactaaagagagcttctgaacaaatcccagaatccaaaactccaatagatttgatatcttctttgataccattcatcattggtaattctctcccatgttcttcatttgcacttttacacatccctacacacaaattcacagaaatcaaaatttcaacatttgacaacaataatcaaattcattccctaaacctaaacaattctctttaattacctcgatcaacagattcaagaacagggaacaagattctctcttccatttgagcatgttcgagcataagctcctgtaaatgagtataactctttgcaaatttcctaatctccatcttcggtgttcccacagacggatccaccgcttttttacctccacgcgccgccagatcctccgaccatctcaacatcctctccatatgccacaacatactcctatgctgaagccaaatcatcttcactatcaatggagtcgcttcgtcgaagccttccagattaaacttccaaatcatcaaacgcggctctgggaacttatcctcgatgtaacggagaagaacctctcgagaacctgatacagtctccgatccgacttgaatcgtcggtttttggtcttccgatggaacgaaacggagcggaactttcttgtggagaagagcgaaacggagatacgacgtcactagactgttaggtggtccgtataatctcactgttgcggtgaagctcaccgtcgatgtttctgttttcgcggtggggattcgttgggttggtggtgcggtggcggcggcggaaggaggaggaggtttgacgacgaggtcaaagggagagatctcagccgtggatttagttgagctggagaagcaggttcccatatttggtgaagaaaacgtgagaaacgaaatctagaatctcagagagagagagaagaagaagatgaagaagaagttggagtgaattgcaagaaattggagttggagaagattgagagattagaggcgcgtttgttgagaggagagaaaaaggtatcacgccattatcatattgccaaaagctttaggaactttgagagacttcagtatttttctttctcaccatttaagtgtttcccataattcaattcttaataatgaatatttttctttgttcctcaaaaaaaatattaaaggagatttctgactctttggaacctactttgctgtatcactggtcaagtcatagtcgtcatgagtctacacaattatttgtgtgatctaacaatctaaaacatgtttgattagcttcttaaaaaaaactacaatatgtagtactaattttagataaaaatacttccgacttttaatgttgaattgtgtactgtacactttatgagaatttgaggataagaggaagaaatcaaatgttttcttttatggttgtgattttttttgagtgttttgtttatgccaccgattttttctacaaaaagtggatgaagagatctctgtgtaattaattcaaagtggcatcttgtatatcaattatctatcaattttagaggattctctatagttattgcgagatacaccgcatatgtgtaatgtctttgttgaagaagatcttctctatatataaatccaaaataaaattcaatggtaattaggaaaccagttcttgtttatttcgaaatcaatggtaattaggattcggtttcttttggtatattttatagatctatcaagccatcgtagaaatcactcttggcctcggttaaaataaaaatatacatgtttcgggcaaccaaaaacctttaatgtattttgacaaaatggttttaagtaatacgcaactatatttttgctaatggtgacttgcggttcaactgcggataaagtgtggtacggttctaaacgaaaatatatacatatacacatatatatagatattttcgttactatttgaaccgtatcacactatgcggtttggtcaccatttggtgcaaccctttatggttaatgaacctcataatttttacttaacattagccatttctcctttttcatgaattgaaattcacttttcactttacctgaaagaatttcattaatgataggatatcttgtcatatacagtacatcaatattcaaagcatcgagatatggaagttttcaacagttataacttaaaactctttcttatgatcactctcttgtctcatcagggtccttacacacaactttttttttcttattgaacctatctctgatagtttatatattcaagtttgattgtcatctggagatttatcaattattggatagaattcctattactatcaactaatctactcgcaggcccgtgccagccattttgggatgccactagaaagttaatatgatcatttaagatttagctaaagtttggaaaactggaacaccaaaagagacattcaacatttactactatggagagtaaacgctctttactccaaaatcatctttcagcttattttgctttagttgtacatgaaacctataaaccatgcagatgtatggatctctaaatcgggatctctaaatcgaatttcatggattatgtggtatatttgaaaatacgtatgtattttatctttggttgcttatgtttgttatcaataaggtcccatgtttacacttgaatcattcctatattgaatatttaaaatccataacatgatttgctttttagaaaattgattggctataaattctcaccatcctcagtcatagtaaaaacgaagccaaccatatatgcttattcatatctccctttatatctgtagacaatagacagagaagttgatgtggggataattgaaaaggtacgaaatatccctttatgaaattatttcatatccgctttatcaaacgagaaacggtgtaaaaaaacaactagcagacattactttgttaccttttttgttcctcccatgtgatttgccctacttaacctcacctttacgcttcaccttttgctctttgcttcatcagccacagagtttaaaagccgtaacattctatttcgcttttgggtcatcattgtttgcttcttctttttttctctgtaaaaactttatacagtacctacaattttcttgttcttttttcttaatatcagtcgaagcctaaatgacataaccgcatacactacacacatgtatcttggagatcaccataaagaaaattgctgatcgcatagaatagaacagacacggcaacttgagaacaaaaacattttttttatatatatagcatcacagcatgtgggagatgatgatgatatgatgatatgttattataagttcttccatgtacaaacatgagcatgcaatttaagtgttaaaacagatacaaacgaagcgaaacatcatgatgagcatttgaaacctccacaagcaacaacccaaacgatgagaataaaagagaaaacagcaccagccaccatcagcttcatctgcagactctgtagccacatcttccttcttaactgccttccttgtctctggaagctatctgcctggaactgtaggttctcggttttgtcaaccagaagttcgatcttctctcctctgtccagaacctgttaaaataacatcaaagataatcatcaaaaaggctgcaaatcctctccgtttcattctcataatcaacatctattggcataagctagttcagtgaaaatgggacaaaccccatcttctattggagatgatagtgcgacaaattctgaagttactctggttgcctaaccttttacagcaccaaaaaactagattttgttgaaaattacttgcagttactttttataacattattgacctcaaacttaaggcaaatagaaacatagtccacagagcaaaagcgacagatgatatatcgtgacttggaacagcactatagcacaaccaactccttcctatgatgagaagcagggagttcatgctataattatcccatttagacttcctcagtactaaattttaacagaggcgtgtatgaaatcaagccggttaaaaggcagaacaggggtctggaaatctaattcaagctgcgtgcaacttcttagtttctatcagacttagatactaaagtccattctgtcacagttttaaaagttgacaaaggtctggaaagaaaacacagtaattcacaaacaatataattataccagatataggttaatgaaagaatggttgtgagaaaagcaattgatacatttatccagtaaaactaccatggaagtaaacctatttatttggtgtcaaatatctcttctagaaagtatttgttgttcagcatctttcctacagtacttttttgtaattgcaaaatcatgtggataaaaatgttgtcaccttaaaccaaaaaagtacaagatctgcgtgctactgttaattaaaatgtctaagctagttcatcttttcttataacgacaaaagcataccttctcaatgttgtccatcatgatccccttgacctcagttatttgggccttcaacttagaaagtttgctcatctcttctggatggctcatacaatactgcatatgctcctttagtatgggcctattagaggggaaagaaaagaatcagaacacagttgcaatgcgaaacaatgaagtgatatcagatagttacagctatagacagacccgaactccctgtcaagattgtatgcaacgctaaaccgatctccaaacaaatcatcatcttcgtcctcatccgcaagaggatgtcgctcatcattctttatactcgcttcataccgcttcttaaagtcttccttgacccgttcgagaaacacgaaaggaacacttcttccggtggactcatcagcaaccactagaaacactatacacgcaacaatcacaaagcatcaccaaatccgaagtaaattaaaaaagctttcaacttatcaacaagtagaaaaaggctaagaaagaaaactcaccaaagccattgtcaacaaggaaattgaaagtatgaccatcgcaagagtaagtatacttgctgctatttgtgggtagcttctgcagacattgaacagcaatggtgctaaagtttcctgaataaggagtatgctctgctagaacaactgttcctttagcaacaaagctatatatcaaacccttttgactcattattgtactcgtgaaacctttgaagaagaagtcaaccacaaccacaatcagatctggaatgcaaaaccaaatatggaatcataatccagaaatatatatatggaaaactatagatcactgtagaaatcagataaaaccctaaaacaccaagaggaggataacagtaaatcgcaaaatcgggagataaaatcactaatcgtatagaatcgcgatttataattgagaagaattacaccgaagcgcaacaattataaatcggaaaacgtgttcttatgctccgattaggttgaaaatcgacgcaattaaaagatcggtgctatttacttccggaagaaaagtatagagatatgatcggagaagacgaaattgaaggaggaatcaaacgacgcatagcagtagcagtagcagaagaaacaaaagcgagagaggaatgagtaccttgagacttagcttggtgatgaaggattaggctcaaattctcaggaatctggtaatatcagacgacgacgagtcacgactagttttagctttttaggcttttagcaggagatgatatgacataacttaatgctgattaattctttaatcaccaaatggtttggtttgattgtttccggtttcggttctcggtttatgaaagttagctattgaaatcggaaacccattctatttcgccttggtttgatactttgatttggatattaccggttctttattattttttcgggttagaattgaaatgaccgtaactgtgttcggtatggttcctttgtgatgggtaaattaatcatcagtcataaattctgaatttgttaaatttacagatcacacctgaaaactgatgaaaacgtacacgcaaacaaagttgattatctaaacgataatcaaatactttttccaatccaaaagataaaagataatgtgaatattgcaacaaaattagatgagccaaaatatgaaaaaagcagcaaagtttggagtaagtgacacaaactggaaacacaccagaaacaaagtgactaacactaaacttctttcaaaaagtattcccaaaccgctttcagacaatctttcagcatgtctgaaacacatttcctctccacatcttcctcctgaaattgtaaacataactattgtcacttgttgactatcactacaattaaaagaccatgtctaaacaaaaaatacctttagtagtatagtacttaatgcttttagtttgaaattcacttcacttgaggttcctccaactccagttctgaaatcatatcgatcagcctctcggatttgaagcctcatagtctggtttatgtacgtagtagttacagtatgccaaacaccacaaacaatgtatcgatccgcacaagaagatttcccaagtggccactttaacccacctttcacagttggatctaccaccgctgaatcagtcaattctttaagattcgtaatctcattctcctggatacaatcgaagaaccatgtttcacattttaatctacaccacttgctaatattcttcaactcattctcttggatactaaatatggattagacaaagtcaactcacagagagattggttaatgtcctttttgagtcaaccatcaacctcatgtcaagatcttgatcaaggcatgagacgtcaagatttaagtgcctcaaagcattaagctcagcctgaataaaaaccaaacaaaagcttcaatatgattcacttaaaatgtggtaagtaggggagatgaaaaggacttatcttatagaaattgagtcgtttattttgttggtccaccatacatttacatgaaatggttacatcaggacgagtgttgtctgagacctagaaaatcagaaaccaaaaccacaaaagaattaaaatgaaattacagacacaatcatgaatctctaacataagaaataacaaaaccaccttcacgtgatacaactctttggtttcttcaacacaaaatcccattttgtgtacagctctatacccaacattttcgacataagactttgggacatttgtacgaaacattttcttcaatttctccaaagtgcttttagttaacggaccatctcttagagttcctgatgaactaacactgcatcaatttgataagataacaatcggtaaacttgtttattcaacataaaaaagacttgattagcgagaaatgcgcaatccaactatagtttctaagttgtctagatagtagataaccgactcaactatagtgtccaagttgtcaacacagtttcaatccactacaaaccacctacggtaattacaatgctcttaaaccaacactaggctaatcactaaccctgccccaggtaaaacagagtttgtgtgtgtccctaaaaactgaaaatttgaggagaagtcaaaaaccttactcatggaaaacaacattaccaaaccgagcgatcagtctgagtttgacatcctctgatccaccataacctagcaacgtcttctttgccctatcaaatcccattataatgtcatcctccactttctctgtcacccataaccatggattttccagttttcccaaatcactcttcgctaagattaccaaagatttttcttctgcgtctttcctccactctgaagaaccgggcacaagttgaaagttgctatcctctggatccgaaccaacgagaaaccatctagaaatgtaaccgtttgcgtagattatctttgtattagtactcccgacgtttttattgtgttttttaagaagagaaggtggaacagaggatgctctcaatgcaacattttcaagtcgtttatgtggtggaacgtaagacatctctgaaacgaatatatgatactaggaaaattaaaagctgattccaaaaagataactcaagtttccgagcaacgaagtatgagaagaagaaacaaaagagtaccttttaattatatcagcttaggtcattcaaaagaagaacgacgatcatacgagaggaaactgaaaaggcgcagagcagtgaactgaagtggaagagacgagacggtttggtctttttatcactagaagtttagtcttggaaatgtgcataatatttaatttcatttcaattttcaaatcaaaaaataaaaccgataacgaaactcttgttatcatattatgagcgttgataatttagagaatctctgttcttttagaaaattgtatgaacattttgttaaataaataactatttttaaatgctaaacctcattgtttagtcctaaatgttaggaatcttagtattcatttttttttcctcttatgatatacacttccggtttagatttctaggacgttttaaatttaattattactgctaataaaaatagttatttatttttaaacaattaaataaaacaattgtatctctagagtaaaaaaagttttaaaaattttggtgaatgtttttatttggcaacccaacttaattcctgaaacgaatcacgagaattatttaacgtactacaaaaggtacatctaattttctaaaaccgaattagactatcgtcttggttgtttttggatgttgcatgtctatattatgataattattctgtaagcattacaattaaatcgtttctgtttttactaaaggagttttgactgttttaaacgactgtaaacactcgtgtgtctgcttaaatcatgtggaaagttaaatgataacagttagaacatccaactttacatatgctttgattagacattttctacgatatgtttcggattgacacgtgctaatcatatctgatcattttcccattttacatatgttctaattaggcattttcgacgatacattttagatcgataatgtgttaataatcatctgacattttttactttgtatgttctaattatgtatttatacgataaacattagatcgacacatgcaaaacattcgacaatttgttgaacactgaagacctaatttggtataatacagctcagcgaagatacgttacaactaatttggagcgtttatagaaaatataggcaaatagccaaatatgctaataaaaagatttagaactttaataggtaatttaacacattttataacacacaagcatatatatttaaaagggaaaaaactagtcaactttcatagaccatcattaccataataactcaattcaatcaaattttaatttttggctactatttttcttttctaaaaccaaaacatcatcatagtagattcttcaattttaaaatatagaattcaaattgttgaccagggaataaatagaattgcaaaaaaacaaattaagatattttacattccaacttttcccccaaaaaattagagaaaaaaatcaaattaaattcaataattccaaaacataaaacgtacaaaaaagttaatgataaaaaaacgtaaaaaaaaatacaaaaatacaaagaaaaaagaaagacagcgtggagagtaaagctattggtagcatggctgcaacagaaggccaagtgtttggtcttacaatttcatttttaactctttgtgttaattaacccaattagccctttcctccttcagggtttatttaacttgccctttctcgtttcctcctttttttcttaaaccactctgcttcctcttcctctgagaaatcaaatcactcacactccaaaaaaaaatctaaactttctcagagtttaatgaagaagcgcttaaccacttccacttgttcttcttctccatcttcctctgtttcttcttctactactacttcctctcctattcagtcggaggctccaaggcctaaacgagccaaaagggctaagaaatcttctccttctggtgataaatctcataacccgacaagccctgcttctacccgacgcagctctatctacagaggagtcactaggtttttatttttttggaaattaaatgattggttgttgagattggatttgggttttgtcttaaaactgcatttgtaagattgcatgttgttttgtgggattttgcagacatagatggactgggagattcgaggctcatctttgggacaaaagctcttggaattc

SEQ ID NO: 1084 - DNA, 40766 bp, Arabidopsis thaliana
aagcttcaatatgattcacttaaaatgtggtaagtaggggagatgaaaaggacttatcttatagaaattgagtcgtttattttgttggtccaccatacatttacatgaaatggttacatcaggacgagtgttgtctgagacctagaaaatcagaaaccaaaaccacaaaagaattaaaatgaaattacagacacaatcatgaatctctaacataagaaataacaaaaccaccttcacgtgatacaactctttggtttcttcaacacaaaatcccattttgtgtacagctctatacccaacattttcgacataagactttgggacatttgtacgaaacattttcttcaatttctccaaagtgcttttagttaacggaccatctcttagagttcctgatgaactaacactgcatcaatttgataagataacaatcggtaaacttgtttattcaacataaaaaagacttgattagcgagaaatgcgcaatccaactatagtttctaagttgtctagatagtagataaccgactcaactatagtgtccaagttgtcaacacagtttcaatccactacaaaccacctacggtaattacaatgctcttaaaccaacactaggctaatcactaaccctgccccaggtaaaacagagtttgtgtgtgtccctaaaaactgaaaatttgaggagaagtcaaaaaccttactcatggaaaacaacattaccaaaccgagcgatcagtctgagtttgacatcctctgatccaccataacctagcaacgtcttctttgccctatcaaatcccattataatgtcatcctccactttctctgtcacccataaccatggattttccagttttcccaaatcactcttcgctaagattaccaaagatttttcttctgcgtctttcctccactctgaagaaccgggcacaagttgaaagttgctatcctctggatccgaaccaacgagaaaccatctagaaatgtaaccgtttgcgtagattatctttgtattagtactcccgacgtttttattgtgttttttaagaagagaaggtggaacagaggatgctctcaatgcaacattttcaagtcgtttatgtggtggaacgtaagacatctctgaaacgaatatatgatactaggaaaattaaaagctgattccaaaaagataactcaagtttccgagcaacgaagtatgagaagaagaaacaaaagagtaccttttaattatatcagcttaggtcattcaaaagaagaacgacgatcatacgagaggaaactgaaaaggcgcagagcagtgaactgaagtggaagagacgagacggtttggtctttttatcactagaagtttagtcttggaaatgtgcataatatttaatttcatttcaattttcaaatcaaaaaataaaaccgataacgaaactcttgttatcatattatgagcgttgataatttagagaatctctgttcttttagaaaattgtatgaacattttgttaaataaataactatttttaaatgctaaacctcattgtttagtcctaaatgttaggaatcttagtattcatttttttttcctcttatgatatacacttccggtttagatttctaggacgttttaaatttaattattactgctaataaaaatagttatttatttttaaacaattaaataaaacaattgtatctctagagtaaaaaaagttttaaaaattttggtgaatgtttttatttggcaacccaacttaattcctgaaacgaatcacgagaattatttaacgtactacaaaaggtacatctaattttctaaaaccgaattagactatcgtcttggttgtttttggatgttgcatgtctatattatgataattattctgtaagcattacaattaaatcgtttctgtttttactaaaggagttttgactgttttaaacgactgtaaacactcgtgtgtctgcttaaatcatgtggaaagttaaatgataacagttagaacatccaactttacatatgctttgattagacattttctacgatatgtttcggattgacacgtgctaatcatatctgatcattttcccattttacatatgttctaattaggcattttcgacgatacattttagatcgataatgtgttaataatcatctgacattttttactttgtatgttctaattatgtatttatacgataaacattagatcgacacatgcaaaacattcgacaatttgttgaacactgaagacctaatttggtataatacagctcagcgaagatacgttacaactaatttggagcgtttatagaaaatataggcaaatagccaaatatgctaataaaaagatttagaactttaataggtaatttaacacattttataacacacaagcatatatatttaaaagggaaaaaactagtcaactttcatagaccatcattaccataataactcaattcaatcaaattttaatttttggctactatttttcttttctaaaaccaaaacatcatcatagtagattcttcaattttaaaatatagaattcaaattgttgaccagggaataaatagaattgcaaaaaaacaaattaagatattttacattccaacttttcccccaaaaaattagagaaaaaaatcaaattaaattcaataattccaaaacataaaacgtacaaaaaagttaatgataaaaaaacgtaaaaaaaaatacaaaaatacaaagaaaaaagaaagacagcgtggagagtaaagctattggtagcatggctgcaacagaaggccaagtgtttggtcttacaatttcatttttaactctttgtgttaattaacccaattagccctttcctccttcagggtttatttaacttgccctttctcgtttcctcctttttttcttaaaccactctgcttcctcttcctctgagaaatcaaatcactcacactccaaaaaaaaatctaaactttctcagagtttaatgaagaagcgcttaaccacttccacttgttcttcttctccatcttcctctgtttcttcttctactactacttcctctcctattcagtcggaggctccaaggcctaaacgagccaaaagggctaagaaatcttctccttctggtgataaatctcataacccgacaagccctgcttctacccgacgcagctctatctacagaggagtcactaggtttttatttttttggaaattaaatgattggttgttgagattggatttgggttttgtcttaaaactgcatttgtaagattgcatgttgttttgtgggattttgcagacatagatggactgggagattcgaggctcatctttgggacaaaagctcttggaattcgattcagaacaagaaaggcaaacaaggtttcgtcttcttctttttttcttcgtaactcatgattttgtttgttttaataaagatctggactttaactgataaatttggtttctttgatctgttgtttgatctcaacttcgtcacaacttcaccagtttatctgggtaagctctaattctctgaaacaaaagatcaattgttttttactaaattgaaagagaaaaaaaaagagagagtggatttggtcagaagaatctcaactgctttcacgcgtaattgcaggagcatatgacagtgaagaagcagcagcacatacgtacgatctggctgctctcaagtactggggacccgacaccatcttgaattttccggtaaaccaaaaaacaaaaatcagattgttttgatatgcatgtttgtgattttggaatctggattataattaaaaaaaaaaatggggaaaatcaggcagagacgtacacaaaggaattggaagaaatgcagagagtgacaaaggaagaatatttggcttctctccgccgccagagcagtggtttctccagaggcgtctctaaatatcgcggcgtcgctaggttcctttttttctctctttctttttttaatttctttagatttattttttaaatttcggaatttactaccaaattgagaaatgatttttcctattttcggatatctgaataacagaattaattattaggaaaaaatctgatcatgaaaattttgcttttagaatattctctttttcttaaaaaaaatcataaattatgtttttttcagcactgctaaagtttatggattcaatagtttggtcattttattcttaaaaataggattatttttgttcataaaaacaggcatcaccacaacggaagatgggaggctcggatcggaagagtgtttgggaacaagtacttgtacctcggcacctatagtacgttatctcctttcccttttttcttctagtaatttttagaaaaaaatagatatgtactcttggttaatttaaaataattagcgtaattattgacttttttataacttaccgggcataacggatcctttttacctgttatgctttataatatataattttgtaagtataaaatagagtgtgataatgtttagactgttttttgttgttgtttataagagtgatttaagaatattaatttgtttagtgagacaattagaataatataatggggaagcagtggcagtggggtttgaattttacacacactgactcacgtgaggcgagagttttgacatcatgtccctttaattgatttttatcttttaatcaaatcaactttttttcttcttcttttttaattatctgatccctctgcataattaccttttaaattctgcattttttgtggatccgatactctgaatacaaaaattgagaactctgcagaagggaatattaacaacaactcttttactgaaaagtaatcccatttttttttattgtttttgctgactcttaccgggtccttagatttatttaaggacctcctaatcttcaacaaatctcaaatttttgaaaattagatttttttaaaaaagtaatacaaattgagatttgcaaaaatataggcattgttgttctataacaaagatactttatttataccaaaaaaaagaaaagagttgtcaagagcataattacaaaaaaaaaaattgaaataagtagtagttgtgaaattttgtatagaaaaataatgtaggttacaagtgtaaaggcgcgtgtagcgcgcgtaggtcacgtgataacactctcacttcataaaaggacaaaatagttcagagaggctttaggaccaaacccgaggtcgatctggtttgctcttgtttttttggtttattaaattggattaattagttagagttgagacttgctctgagtaggagtcacgagccctcacgtgcactgctcatctctctctatctctctaccatatctttcatctttgtcctccgaacaaaatctggtctaactttatcttcttttcttttaataattgtcttctctactttaccattatttttctctagattattctggtaccaaacttataacttaatagttgattagtgcttagagttgacactaggttggtgttttaattattgttaattaactcagtaatcgtacgttcgtgtattaattatatacacaaattgttgcgatgacttaaattaagtcacaagtttggactctttagtgtttagagcggcgcagtggaggagaaatggtctttgtacacgcctcacatctccacacaaatcgtgtaaccctagttgtccctacaaaaacacgtcaccaaattctattgattctttgtctttattaggtatcataaattctctaatttaaatatgaaacgacaaagaagaaactcttctttttaacacttgtttggtcttatttggttatagccacttaccaggtaatgtgaaagttaacaacaagttgcgttaactttcaaaacactgactttgtttgcattgtcttgatttagaagctttttagctaacacagttgtctatttattggttttacagatacgcaggaggaagctgctgcagcatatgacatggctgcgattgagtatcgaggcgcaaacgcggttactaatttcgacattagtaattacattgaccggttaaagaagaaaggtgttttcccgttccctgtgaaccaagctaaccatcaagagggtattcttgttgaagccaaacaagaagttgaaacgagagaagcgaaggaagagcctagagaagaagtgaaacaacagtacgtggaagaaccaccgcaagaagaagaagagaaggaagaagagaaagcagagcaacaagaagcagagattgtaggatattcagaagaagcagcagtggtcaattgctgcatagactcttcaaccataatggaaatggatcgttgtggggacaacaatgagctggcttggaacttctgtatgatggatacagggttttctccgtttttgactgatcagaatctcgcgaatgagaatcccatagagtatccggagctattcaatgagttagcatttgaggacaacatcgacttcatgttcgatgatgggaagcacgagtgcttgaacttggaaaatctggattgttgcgtggtgggaagagagagcccaccctcttcttcttcaccattgtcttgcttatctactgactctgcttcatcaacaacaacaacaacaacctcggtttcttgtaactatttggtctgagagagagagctttgccttctagtttgaatttctatttcttccgcttcttcttcttttttttcttttgttgggttctgcttagggtttgtatttcagtttcagggcttgttcgttggttctgaataatcaatgtctttgccccttttctaatgctccaagttcagataagaaataaaaactaaatgaaccgtaaaacacaaaggaggctaagatgtctatgaatttctctggcatatgtgcaataaggaagagcttcaaggaatcttgaactaagagaaggcttcaaaggctagacctcttcaagttcccctgtcttattattgaccggactatgaagtttctaggaaggttatataggcaaaagtttattcctaactcttaattcataattctgattgcgatgatttttggtttgctagatagtttagtaaaagagccttaccatccaaacttgtgatcaatattggtaaccgtgaacgtcttcattagggtgaatatttgaatatctttgttttcgggttacacataacaacccgaaaagttgttgcatttggctcggaatacatcttgtataaaaatttgtctttactttttagttttgtaaatcaatagtatgattggtagtctattcgttttgtggaaacaacttcaatttgtatttcatcagacaatatatatgcattcaagtagaaaatcaaatcgagtaaatttgtagcataattaagtagagtggtcaatataataatacgatacatgataaaagtcttgaaaacattccacacacaataagcctaagcactactgatcacacaatccatatttctttaggctttaaaatacataactaagaaacatgacagtttaaggttttagcaacaccatgccttatgttttaagtagttactaaataattagatagacaatgatggcaccagcaaaccttttagcctttaattattcaagaagatggaaggtaatgatgtcagaggcagagggtgcatgaaggccatggttggggtaatagtggtgatggttctggtggaaacgaagagcgtaagcacgtgacccttcgatttggtatccaagaactgagtcgtaatctcctccattgtctactagtccatagtgaggatcttcagctcttagttcctaattcaccaaaacatgttttaagccatattccacataactaaaaccaatattattaattcgaaatgacatgacatttgatatatgatttaactaggagatatttcgataagagaatcacaagaaaacataagagtgactgatcaatctacactacatttctagatatctttttaactggctccgtattccatgaatgtattatgcctaaaccaacatttgagaaaaacagaaagagatattaccagctcatgtatgagattcttttgtatgtcttgttgacttttgttctgcaattgtgtaaaccacaagagaaatgatgaagaaatattccctcccaaaaaaattatgaagatatatacccaagttattatgacatcactatatagtatacttggtattttctttatccattagcttaaacacacacacacacacacaaatataattgtccaagaaaagtgttatcaacagttttagtaagttgataaattcaattgacacaaaattgttgagacaaataaatatgataaaatggaaaagtgagtggacatagaagatgtgacctttttcttggtggtctcgatctgattcccaagagatttgaactgtacagtacaatacaattaacatatattatccaacagtaaacaaaatgtttctttttctaaaacatatatacaacaataaaattcattttttaataattcaattcaaaactgaagcttgggtatataggattaattgaaaccctaggtaagggaaaagtatgaagagaaccttgcgctcgcgaacgagtttgaaagtgttttccatttcatcctcaagacgacgcagctcctgaatgtcaagctcgtccaaacactcacctagcctctgcctacaattttaaaaatatgtatattttcgtactcattttttttagtaaaactcctcatctaagagaagagagagaaacaaatacttgatctgagtccggagatttctatttgtctccaacagtttcctcttggtttcttgcattcgctgcagcaaaacgcatcaagaatttaaccaaccagcgaaacacatatcaagaagaagaagaaagatctaagaaggaaaaaaacctcatattgagtggcccaaacatcgacatcagaaatagtttggtacagatctacgatctccttcgttctataaccaacaaaatcaccaaaaaagtagtggttaattataagaaaacaaagcaactcaattagcttaatttaagagtggtgtttagagagatggtgtacgtggtgttagggctgatatactcatgaagcttgttggagctagagaacatgataatcgaaaccctagcatcacacaaaaccgtgagctcatgtgctttcttgaataaaccatttcttctctttgaatacgtcacttgtctgtttgtctggttctctatcctcttgatctggatcttccctctcgccatattcttctctctttgtttaatctttttgttgaagagatttggtggagaggacaagagatataatgagaagaaagaagtgaaatagaaagagagagatggagttgaagaagtaaagggtccacttgagttactaaaaatggaaagtattgcctaatccatgaaaggtaagttcagaagttgatgaaaactaagtgataaattttccatttatgtaaactgatttttttaattacaagacactgtttaaatcaacggacatcgatggttgtataattacaagacactgcttaaatcaattgtcacttggtaaaagagggggaccaaagctaaaaacttggtttgcttttcgtcaatttattaacggagctccgttagcttctactttgtttttgtttagacggtgacaaacttaacggcgtttgtaaacgtcaaatcagtgcaggtggatttggttggctttttacacttaccctaaagtaaacaaaagtgtttaggtgtgaacaagtttttatattggtgttaaaagccaatattctacttttgtctgttaatttgggaaataagaagaaagagatatatatgtttggattaatcgtcacttccatctaactcaaatcttttatatgtttccccaaatgattacaataatttcccggatttgcctttaactaaagatccttggaaaatagaatattacccctagggtttaagaaggaatcacaagttaggagaaaagtctttgtttgtagataatgtttggtcctaactccaaacagtccatcaaatcagatatatgatgaaactcttttttctttttgcttcgaccagttagtgttgtttcaaaactaagttggccacagttactgttgttttgaaactaacatggattgatcttagttcatcatcaattttcaagcaatggaaatcagtgagtgagtcacgaaaatggaaacctatcctttatactgataggatatccaaagaacttgtgtatcaacttcacaagaacaatcattcttcgcttaaaacacaaattcagatacaagagacttgtattttcatttcaacgccttaaaacagggtcaactatgcatgatgcggaactaaagatgtattaaaagatctacaagacgtgttcctatggctaaggtacattacacaagagatgcatcattcatctacacaaacaacacgcactcttgatctggtctcagttcactttccctcttctcttcaggtactcttgcatgcaactttggtttgtttcaaatataaaaggcattccccgtatctgcgcgcacatatatcgggtttaagtacggacctagaagcgtaagtaatgatcataaaagagtatcccggatcaaacctcaactagacaatcggatttgaggattaaactctgtccaggatctacttccttctcatttactgagattgaatacttccccaggttttttatatgaaacgaaccgtcatcacccagccgtatgatcgcctgcattcagtaacccaaaaaggaaaaaaacatacacaacaaccattacagatcctgggctgctgcttctcatacaacttaaagacctaaaatacaaatagaagtatctactattgaccgacctgtcgtcgagatattttgctaccccgcttttctcttcccaaatcaatgtccacagcgaggtcttctgttgatctacccaccaaaacctatgttaagaaaaaagaaccccgatatcaacaagtgctactataattcttaagaagcttatcaaatcatacaaggaatattaaacgaataagataatattacctcaggcttcttgatatagtgttttgaatatctgccatataaaacagcgaatgcaccacgggaagcaatggctctttgcatatatgaatgagcagcctgctcaagtcttatgattgttcttttcatgtcttggctctgatacttggagactgcaagtgaaaacattttagggatttacaaacaagccttaaacctcttctaacatctcatacgctacccatagaaaaggtttcccacatcactgcagcatgtaataacttttaggagccaaatgccgaaatacattcctattcacatactaaaagctttcttttcccaaaaatgtagatagatagaaagaaacatgagttccactggacgagaagggacgctcaactaccttcgagatcaaaattatcttgatcatcaggttccaagtccatgtcaagtatctgaaataaaaaagagtgttatggattaggtgtttacgtgtcatggaaccatagcacaagaataaagatggaagtcaagagttaccatagcctcaatgtcagaataattgggtaagtcctcatcactctcacaaacatgcgcttctgcttctgcttctgcttctgcacgggtgatctccagctcagggactgtaatctctatcaagccatcatcagtatctttagcatgtggcgattcattaacaggtggtacaacatttttctctttacaattttcactatccttctctgggtggttgccatggccatcagatccgacaaagagtgttccagtagcagtttctttctttccatcttttgcaccggtaccagtagaaagtagagtattagagcaagcctgtgcagaggaagaaccaccaggagctacagtattctttaactcagtactagtcgatgccctgaatttgctacctttacttggttggcccatctctggctttccttgagtagacccctgtaaacgtcctggttttttcttttgagcctggagtgaatatccctcacttttttccttactggcggagacgtctcttacacatgtagttattggactattggtatccttaaagttccgccgggctaaagaagaaactgacatcggacgggagttgttggacaggaaaatgtcatcattacacggaatatcaggatcctcttcgtttaataaacagcagattacacccccaacaatctcaggatgaggatctaaagcgattgtaccatctagctcaagcatcacatgatcatccagggttgcctctcctggatgagttggtgcaatggaaggttcttgctcggtggggttaggaaaagcctcgcggtttgtatcatttgtagagttcaccaacagtgagctaagaccatcataatatgacttgtcaacttctttgccatctacttccatgaacggttccatgtcttcttcgaaaagagaagttgaaagctgtgccaggaaatcagtgctagccattgtgttttttgcctcgtgagcagtattctctagtttctgctcggaatcttgatgaaccacatcacatactgatagacctgcgtgttcagtgaatgtgagattttctccttctacgtaaggaatgtctccctgtaaattatcttctggcagaacatgagttgtcacgcaaccaccttcagccaagatttctggaaacgcgttgtggataatatccatgtgagagtcctcaagaccaagatgtgttgcatcaccattatccatgaaatggctatcatttggtggaacgaggaaacctagatccaaggaattgaatggctcagtcctaaatttcttccgcaaggaatgataagtacttctgagcctttcagcattcctcttcctagatgaacttttgttttcttttgaatatccagttctaccaaacttagtaggaaaattagggttagtacgttcaagctcagccatccgaaaagccgcctctacagaaactactggatcataaagcagtgcatgccatcgatcttgcaattctctaatagaaaatcttctagaaaactgcacagcacctttagcaagcgattccaaagaagcaccagcctgcaaataaattaaggattctggttcacttaattgcaagattaccagacaagctgaaagaagaaacacgcaatacatacatacagaagcactaatttagtagagaaactttttggctagcctagcttgatatataaaatgctatatgagagaagcaatgaacataattatctatcttgtggtgattgatgagccatctgtaaaaagacaaaaggatattttttcaatcatattatgttctcataactgaacagaaaaccaaatttaagaaaaaatatttgacagtcttttccccgtggagagaagcatgatacatacagatcatcagtgatcacacagcaatatattatgttcctcgcgaaatggtataatttgttctagagcaacaattataccttgccacatcaagattgtgtaacttgtttcccataatactatactataccgcatataacactggcttaagatgttaacaggatcaaacaaaaagctgacatggttattcaactaaattttgatatctgcaaccaaccttttgtcccgaaaattcaagttatcacaagacatgaaaaggaaaaaaatgcaaccaaaacaatattaatagatgatagaatcaactagataggcatctcttttaggaaagaaaattactgataataacctgcctcaaaggatatgtcgtactctccaatcccctcaaaatcaactatagatacaagcaactatgaagaagaaagcctagaaacatcatgagcgacagaactgatagtcattaatgttccaactagacaactacttcaatttaagcaaaattgatacagctctgcaaacaagcatggtagaataagaaaactacatgatcattgaactacataaagcgcgtgaaaggacaggaaattgagacaaatattgagatcaaacccatggctcaatccaacataatccatttccggtagtaaaataatgaaaactgaaatgtaaccaaactcaatgaaatgggagctcacctcgacagcattctttagcagcaggtcgtcttcgggtatccacggaacaacttgagcaagagcccccatgttcactgcacaaccagacctttacttctctcaggaaagcgtaacgtagaaggggtctaagagatggtgacagaacacaaaacctaattaaacgaaatcaaaatcagacagatgtaggcaacaatatcatcagaagtgattcaaatttggttttctctacggtgaacaacactaacaaagacgacgctattacttggtctagcactacttgaaatggaattaatgggtttctctttctcaccgttaagctcttctagtaatctgaagcattcttctaggtttcgttttgcaatagggtttaagaacgtaagagaaacagaaaatgtttaagaaaaggagttacaataccttgaatcagcaaagaaggatgttttgtcaatctcgggaacaacaagagtgaggttcaatagcctagcaacagtaaccatgtcacaaaactggaacaacaagtatcaggatttggataaattattgaaattagacaaagatcgaaaaaaaaatagttaattaagaaagtgacgaaccacgattcgcagttgatttagtcagccattacaggatacaagtagaatttcattgctttggttatgtactgtaggtaaaaaatcaatactctcgttaaattctcaagctccaaagaagacgcacatacaattttttcgaaattctcacaagttgatatcacaatttatagatagagaatttagaaaactcaagacgaaagtaactaacttgagggaagaagaggaggaggaggaggcggcaattcactggctcgaattgaagagataaaatctaaaaaatctgaaaccctaatttatatctgactgtctccgtcgtccggaggcgagagtgtgtaaagaagaagataaagcacgtttgagaatggaacgacaccgttttggatatatgtgatttttttactttgctcttcttttaactcctttttctgaaactaaacttcaaatgcttatttcccggaaaaacagcctctttcaacacatttcgtttgttgttgtaatttatactcttttagatgatagatattagttcatattttttaaatgtacttctaaactaatattagtaggattaataaaatttgaactttaaatattttttatatattttataaatcctcagataatcaataatcatttctcgactttcatctttttctcaaattctcgacaatggtttctttatcctcaaaaatctgatctgtcgtcgtactattcttgttcagttcaactcaatctatgccggaaaagtgcacttatcgctttacgccagaaatttcatattggaagaaaacgctgatcttcaacgtaaaatcggcgaagctggcggctacttggcgatgcctccagatttcaactataaaccgcgaagagaggtatatagttgacttaatttcaatggattttaggttactcgtgtgaaatctttgaagaactaattaagatggataagaggcgagagttgatagtaatctttgactttaatttccgtatcttttaagaattgattaggtttttaggttttttaggcttggttactcaagattttgcatgattgcttgaatcacgattgattagaggcaagaatttttgtgaattgataaaatcagtacattgtttcatagcagttgatgtgaagtacattttttggcggaaaaaatcattttttcattttgttgatttaagtattttcaaatagaagcaaaatagtcattaataattaaaagataatatcaataaaaatgattacatgggaggatagtactaaaaaaacatatttttggaaaaacattcttaacaatttctctatatctaatacgtaaaaacatagttttacatacgaagttaaagatttagttacgtaattatatgaacagttaaaagacgtgaacatattaaagaaaaaaatactgaaaaaagctttacaaatagaacgaagttgacctaattttgttgattatgtagatttattttcgtaaaagtgacctaattttgttgattcgtgcgttggagttagtatatctttgtcgtttgcatagtatcatcggctttagggattgactatgtttatgtttttatttttgtaagagtagttacaagaaaaacttcattcaacaaaacaacaaagacaaatttttgttgtcgcaatttatactctttgtagctgattgagtttgcaaatacttgcattttcctttcacatcatctctcaatctctgttgggttctttctcattttgcactgaaaagaaatagaaagcagttcacagctgtagccgcttaagatatcttaatttttaaatttcacaagtgcatagagtacaatcatgcttaacaatttaacattgcaagattagtgcattgaaagttgaaaaccatcacaattcacaacatacagacaactctgtttctttgtcccttgagcgcaaatacaacatttttgctttctttattcagcaaaatgccacagacgagaacttaggtataatttctatatacgtacttaagcctgcatcggtttagagtgcagtttcagcatcggtttctacttgcttcttaaggaactccagtacagagagccgctgcatgcatgttaaaattacatttgtcagataaagttttactgacattcagcagctttggataagatacaaataaaaagggagtcgtgcaagaatcttacccgttgctcgagagcagaatcttcagagtccagtttcaaagattccagcagtctcatgccttccttgaacccatctgtcgctgcaacttcattttgtagagtcctgtctatatccgcaactttggctaaggaaacagccacatccagaatctacataaaaaatgtagaaataacaaaagaaatcaatttctacttccggacagacctttgcttactatatttgagttccaatttctctaggcaagaaatcaagtataaaataagaaaacaaagagaagatttccaaccaacagaataacccaattacaatgcacgtaaatctaattatatgtatccaaaagagagtaactttatcgcagagaattaaatgacacctcatccaagtatgtatactgcaacgacaacacgtcagttacctaaacctcagttcaacccaggcaacaaaatagcaattgacttgaataaaatctaggaaactatttagagaatttctctgaacattcatggtaaagtaacaaataagtaaaatgaaaagagtgaaccaagaaacccgcttgaacacattgagaacaagtatactattttcactttacatcgtatttcagatcctttgatccactagcaccttaagttaatctctatatcttttaatgcatttgaattcattttgcctggacccaaatgaacaccaagatgtaacaatcacataaataaacgctttctgcctagagagtgagagattacgatctacaaaagagccttcacgaatgctacaataagtcaataacttagctaacaacagatatttttctgcgagaccttgaaatgtatatggcgactaagagtagccagttcagctaaccaaacattgggacaaaacaaagaagagcaaaaacagaaaactgtatgagggcacacttacttgtgaaggagcatttgggtggtgcttcattgcatcacgtctgacatttaaagctctatcataatacgaccttgcagcttgtagatcttcgtcataatattttagatctcctattttattgagtgagacagaaagtgtatgtgtaatctgcaagttaagttaaaattgtaagcaaaaaggtaaaaagttttcaacatcaaaatttaacaagaaccaatgtgctataacctccaaatcattcaacggcagtttcataaggaattcaacactctcttcaaaatgcttgactgcagagcttgagtctcccatcgctcggctgcaacaacaacaaaaaataatttaaccatcaaacttaagtcccggaaaaagaaaaaattcaacacaccaaacagaagatcaaacattttggccaaaataacacagttcaggaggagaaaatgattatgtataaagtaggtttttcgaaccaagcatgtactgttgcttctcctttccatttattctgaacgaggtgattgaaccacagagaaagatgtatgcaaatgataagaggatacagaaaaatctgaatatatgaatatatttccagtcaattgatgtagacagggtccatctagaaaaccagaatctagttcaaacgagaaagaaattattttagtatttcccaaagtgccatgcgcactctaagcaagatgaaagcaacaaccagtcgacttgagaaactatcaattgaggaaactgccaaggaagggccacatacttgagaaactccaaattaaaaaaaatcaatttgaacaacaaagtggctcaagcgggatcataaaagaccacattggtgaccacattcgaaagcaccgttgttttcataatcttaattgttcacagaaactcgagaatggatacatcttagaaataaacaacttgggataaaaaagaagacaatatcatacctacagtcaccaagcatgccaaggactgcaccaagctgtgaacacaactctggtgtattgccctccctccctagttgatcccgaatgtcctcggtacacattgccaaccttgatttagcactttcataattttgggcactaaatgcctgcgcatacaagttgaattagaacaagatctcacagcgggacatcataacaaatgtaagtggtgcaaaagagaataatcccatcggttaggtcaacaaaatttagagacagaactcaccctcatagcttgttgcaccaagaaagaacctctttccatggaaacgtcagcgtaaatcacttttttgttatcattttcgacctcttctttttctgttccattgacgacagatctcttaattctagcatggccttcaataaattgatcaaccatcttctgaaggttttcatcaacttcaatactttcaatgtcagcaccgcatagagggcagtccttaaaccgtgttaagcatactctgcattcaagaaaccacaaagtataagaaaagtagacccaatcatgagccaaaaaagaaataagcggccgagcaactatggcttacttgcagaacacatgtgtgcaaggcacacatctactgctctcatatagaagtgcttgacataacatacagctaaaaggcccaagcttgaatgtttgagagtcatagccaaaagggcacttggcaggtaccgttgcagaatcagtagagtccttattcaagtttccttcttgttcaggacatcctttactcccattttcgtcaggacgagcagatttagaaaaagggcaaccagaagccgtcgtttccccttgctttcgagcagaggcatcgtcgggacgagcagctttagaaaaaggacaaccagaagcggtaatttcgccttgttttcgagtcgacccatcgtcaggacgagcagctttcgagaacgggcaaacagaagtcgtcgtcattcgtgaaggtagcaacaaccctacaacacctcaaaaggaaaattcaaaacctaaattactaaaattgcttcctcaagatgaaattcgaaattgattctctagctaaactatcaacagctggaaatcgaacatagaagaagctaattcagaagtagctcaacagagagagatggaaaaaacctgaattggattggattgagattagatttggaaatgtctctttcgctgcttctctgcaatcaatcaatgatcgattgatagctctctctcttcttttttctgtttccgataagtttttttttttttttttttgtgcgttggaattggatggtgttttgttttctctcagtcaaacgaaaaatagatattactaaatgggcctgcggtttttgtagcctatttaagaatttgggtcactagtcaatttaagaaaaccgttgttctggattataaactggttggatttttaatattaatcagcttttttttttttttcactgaaggtttagttttattaaaatccacatcacaatggttacaacccattaatggcccaaatggctacatcacttaaagataaaattttgctcaatacacgtgtcaaacacaaagatacgtagatgaaacgtgttgcaagaaaagcttggaaactttccgtcatccttcgccgttaattactccgactattgtaaacacaatcgacgccggaaaaagtttaagcatcgttttttgttgttgcttgtcaccggagaatgttgaaacagctacaggcaatcttaatatgctggaaacaagtcttctttcattacattgaacataattaccgatgaagatttgttgtaaccaaagatctgaagaaccagtttgagaacatccaagagaaaaagcagcaaatccacccgatctggtcggattagatatccgcataacctcactggaaaccaccggaaacataaaacaaaacaaaactcaaggagctagttggagaccaccgttgaacgagaaattgttaggttggcaccaccaaacatagatcagagagatttttaaaagataaactaaagaggactaaaagaaatcggcataaaaccgattcacggcagcgattcacggcagatgaaaataccaagccagccaaaaccgctaatgggagccggatttactggacgaaagccgaccatcgccgcatactaagccggtggatgtcgggctgaagccaattgaaccaattggacggccttatcggaaaattgtaacagacggtttttgatactactaatattaatcagctaacataagtaaacaatttttaatattcaaaaaaaaaaaaaaaaaaaaaaaaaatatatcctcttccttctctcttaaaaacaaaagcaccgcttcaattccgccggcgttgtgagccaccacggtcatgacgtcggtttggctttttggtttatgttcagttatgtctctttaagttgtggttaaggagatttctgggttggtttcgatttcgtttcctcctcaatttctcttattagatctatagtttcgattggtgattttgcaaattagcgtggttttcttctctgactaaatactccctggcctaatcacgatcgctctatgccactcactgtcggtgttgtggtgattcgggttgggtgacctaattttgggtttcctcacacagcttcaacaatacggatctagggcgaaatccgcccagattttgggttctttctaccggttcaagtcgcatagtcgatatctccggccacggcgttctcgacggtctctgcatgtttagctgagtttccaccgtctgccatccaaagtatcccaaggtttttcttctgaagatttttaattatcaagtaaggcaagaagatcaaattttcttaaagtgggtgtctcaatctccgacgaaatctccgatgccagttaattttcgatcttggtttatttggttaaagagagaactatgtttatgtgtaaaatcatcaatcatgttttattttgtctttctacgtcgtttccccatgtcggggcttagtgtcggggtttcattcctcgccggcttgtgtaccggaggattatatcctgccggctttgtcgtcccgtaattcactcgggtttatgtatctgatatggtttgtgctgataataaaattagctttgtgaaaaaaaaaaaaaagtaaacaatcaatcctttaaccgtatccggtcggatattttctaagaaatggtttagtcaccaaaatgtcataaccagttgaacccattcaagttctgtagtttacatatatatatggatactatctgattgatataagattatataacttaggtgttttagaaattcaatttcttcttatcataagagagtatgaagcattacaacatgcaagaggttcaaatcgacatcttaatccgttcaattccaatcaaatcataaactttgaacttgtcctctggactacgaaaggttgactgcttcacgggtaaaacagtgaacccatcaggatcagtacatgtctcaagaccacactcatggcataaagattcaacatccaactcctgaaatatacaaacttgacttatgacatttcaagtttaccaacaatacgaaaatagaaaaaaaagacagggaaatatttagtcataggggtattatcaccttcatcttcaggttctgagataaccgcaagagaggatagggttgaagcttgtagcaaacattgtttatgtattggacagccactaatcgcatcttttaccatgaaaacattaagcaaatgatcaacataattgaacaatttactgcaaatatcattccatgtatagccactttatacacacccatatatttgaacaatttactgcaaatatcattccatgtaactatataattgctttaccataccggtaatattttctagtacaaacttattctatatcatctttctcatgtttattttcatttcatattgcattagccgctaccaattaaagtcccacaaagactatccctgagagctaggacataactacatatttatatccatgcaagctcacctctctaatatgatgttcacttatgcaatactgcaagtatgtcgcctcagaagctgttctacttaagaagttcttgtaattgcccatccgatataatctggaagaaaaaattaagagaaaagacaggtatcattatacttcaattcatatttcctaaatttgttcaaattaaataactcatacgcaaatgattgaacagcataagactaccttaaaaggtttcgtacaaaacatatttccttggattttaccaaagcaaaagtcaacttgcgaaaccataaagacagcggttccccctgcagatcataatctcaacgatttctatcaatggcaaaaagaaggtgacatgataacaaattaataaggagaaagaaaccagaaaacaaccatcactccactactaggattgagatgaagcagcacatagagtgagcggaactcggcttcattttcgtagatatagtccggttttctatttgcatcatatatattatacaaagaggtaagagtttttgctagctgctccatgttcaagtgatgcattgagctaatacttgtaccactacaactttgaagcctctcgtgagatatgacatgaaattttacctgttacagaagccattcgggagtcaacaataataacatcaacggaactctatagaaaataaaacaaactgatgattaccaatcagaagaggatgatcaatcagagtggtatatatttctatgaaaattacaaaagaagaaaaatgatcctatttgagcatcctgattaagattacgactatgtaaactacaatcaacacattaagtcaaaatatcttaaacttacaaatattcttttggtaatagcagagggttaaacacacaaacgactgtcaacaaaacccaaggaaagcaattctaaagacaaaatagacatgctcagtgtaattcatttaccgaaccaggaaagagaaaagagttagaaaaaagtcaaaccataccatttcctcataaaggtagatcactctctcattggccaaattctggatgctaagatcttgtctaatagaccttgtcctatcgaaaataaaatcatgaaccacttcaaacgggtgctccttggagtcgagcaaacttagaaggtatctcagggtttcttctaaaactgggagcggtcttacatccgatgcctgaacatccgccgctgaaagggttctgcaaaactagcaagaacacagaaagagagtataaatgccgttggtattggaaaaaaatgaacctcattgcatagcagctggtatctcccaataagtagtacaaactattcatcttgaccaataagttatggattctaatttgcatagatgaagaatttcaacatcaaatttctttcaataacaagttctctcgaagaatagatacgacatgtcaaatatagaaagctgaaggtgaaagtttcccacattagcaccagagacatgaaaactcaaagctgtacaatgtgaaccgcacctttttgacagctatctctgtggatgattttgaggggtttccataaagcctctcaaacactgcaagatcacgcaggcgttctcttgtgactctttccctctctattgataccaaaaacaacatattagatgaagctgtacacactctttttggtacttcaagtgtaattttttacctaaacccctagcaaaagataattctttgttctgaactgccgatgcacggaaggatcatgaattgatgaagggaaagtacctaattgacctaagaactagatcaaatccaattcaggtgcaggatagggttgaattttagcggaatctcaggtcaattggtaatttatctgcagctaacgtagttcgatgattacctgggcacatagaagaacaagttcctacaatcaatgaaacgtcagcaggatcttcgtctttatgttttgattcgtctttttcattgtttcgtttgtgcggtgcatcggatcttctctgaaaggattcattaactccgccgccggatccagtcctcgggttatcagagaactggcggttcccataagtattcgaaaccctagaagaagaagaagaagagccacgattacgacgattcatggcttagagggaacgagatcttcttccctcccaagtcccaaaccagactctgaagaaacgaaccaatcaaagctgttaccgaactattatttggaataaaccggaagagaaccaaatccggtacagtactctcagcgaattaaatctggcggcaaccgggtcaatttaatttacaccggttctgacttgtacacaaatttgcatttctacaaatgcagcattcaaaattcaactcaagtaagaatctagaacatttcacatttccctacactttgtaatttacatatatagttttggaaaatttgattttaagttttgttttgtttttctttccggttttgcagattttctttttaaatcgataccaaatcaaacctttcgtatacggtttggtcttttttttttgggaagaatatatggtttagtcatttgtgcaattacgattcggttctgttttgtttttttacaaacaatagtctagttagatatatttgaaggaaatcaattttgattttgtcatttgagcatttcatttttggtgttattctattttttcccacccctatacaggcaagcttaggccggttggtgggtctagtagtcacggccactctctagacagcagagaacaatgtgtccaccactacaaatttaggtttcttttcatcaactatccctaacaagaatctaactgctaacattcaaaacacatagactagaaccactaatcatactatcatagtgcaatttcccatccaaaaaaaactccatattagaaatgcaaagagaaaaagctggttcatctccactaatactagacagttgtctcgcattcttttgctaagacttattttctctttcactacaatctctaacacgaccaaactgatcgaaccgaactatctaccaagcattctctgtaaatctctacctgaagagttaaaacacttaaacacacacaaatttgagacagtattagcatctctttgactaaagattgatgatattcatatggcaaaagcatacatttgctggtagaaatgtggaaatcgccatctaccccaggaaacaattattggtctctctctgagaaattttgacaaaacaacacttggtatgtacacacaacatcttgagtctccaatataaaaagcagaactcaatttcttccgatccttaatgaagaatcaacacctttgttctgtccagaagaagctgcagcagcaaagattctagcaatctctagctgagtattcgccattatctccgtccgtttcaaatccaattctcctctcttagcttcagcttcagctctcattctctctatctctttcatcgtctccattcttgctctctctgatctcatcaccacctccgctaaccaccgtatacttccggcgatctcttccttctcttctttatatcttctcttcactttcttccctctcaccttcgttttaaccacaggcgtactactgtctgtatccatctccgcatctttttccggtttgttctccggcttgaatccgtcttcctacacacaaaataacttcattagaaaatctcccaaatttggttagtttaggtgatcagaccttaggaatcttgccgacgccgttggatccgtaagaaatctgcggcggatgagccaccgcaggcaacggcggctcaagtaagagcagaggaacagagcaattcagaggcagaacagcttgaggctgaggctgaggctgagttccacgtaggagatgatcaagacgaggataaagaggccaagaggagccatcagcagtagcggactcagaacggtaccgtttcttcatggactcgatcttgttcttgcactgagtctgagtctttggtgacttggtgtgagtggcgcgtgaggacacgtgtttagccacgtcttcccagtcttgtcccttaagcttggctctgtttctgagaacccattttgactcataagcttcgagtaaagtcgaaacagctccttcgctccattcatcacgttttaacctatctacaacgacggaggaagcagatggcttcttaagcgattcgtcgtggttgagagatttgagattttcttggttagattctccgttctccatatattttttcttcaggtgactaaaaacagagacaaggactcaagagtgtgatgaaaggagaaagaaagagaagattttagcaagtcttttgataaagatgggaaccttttgagagagtgaatggagttaaacatatgagaactgtgtaagaatacgctgctgctctcaaaactaaccaatgagtttgggtacacgcgtttctcgcatgttcaatggtcgtgcctcgtgacttaaagctaatgaaattatgtttttcacttatattgttactgtcattttagtctttgttccaatttatggtttgtataaagattacaaatacaaacagagaaacgcataattgcaccggctttatacttaccttcacaaaagttagtggagcaacccgtcacacacacatactatagaggagaataaagagaaaaatgtgagaaagtgggttaccattgaaaaatagggtttcttttcttttatttgtcaacttgaaaaaaggttttacttttgattttattttttcacaataatgatttcaaaaatcttctgatgcaaatgcttttattcatttagctataaaagcctttttgtatgctttttttctctttttaggtgtatggtggagtgagtctggctgttagcgttgatgtcaagccaaaccgcaaaatccatttggcaaagatgggaatgaacctaatggaagtggggtttacacttgtcactctctcacccattctatgttccactctttttcttctctcatgtttgcgcaaagatactaattcggggttgttcctttttcacttattgaaagtgtatatctttcaaaacattcagaaattttgtgggttagtgttcactaaaatctttggttaattatcaagtcatccaaatattacaagtaccaaatattaggacaagtctttaattttcacaccttttttcttacctatatgagagaagttttgttgtaagagtgaatgtgtttcctcgttagtggagtatgatgaactatgcaacttcaaggcagcacatcggacattttggggtctacaagattatcatcgtagatttttaacgcgccatttagaacttctcagtctcatttgggtgatgaaaatgccttccaaggcataatcattttttgttgacattttggtactttctcatgaagttgatgcatatgattatacttggaagttggaacatatatatatttaaaataataaaggtcctctgttccaggcttattgcatccgcaaattcatgagtacaatcctttttgaacagagaacatcgaaagaaaatcatacgaaagattttacaatcgtttgagaattaacaaaaatcattaacttatatagtttccaaaattcaaaagttcaaaacgcattacgaaatcgaccgaaaacaaaaatacaaatcgataaaacttaggtgcaagtttcacgggaaattccgagcctggaatttggaacgtcgatgagaactcggtggttctgttgctgcatactagcgatgacgttaaggacagagttaacgttgaccggagctgcagccatggcgaggcagctgaggttacctgcggagctgtggatgagaaggttgtctggaggcagagtcacgttcattccggcgaacataaacgtcaccgacgggaacacgacggagccggagtagcatgtgtcgaaacctcctagtgaagttgcgtttgcgttcttaacacgtctcctgaactcgtttctcaccgccacgtaagctggttcgactagccttgtgtagaccgtccctgcgtacattcaaaagtgttttgtaattaaaaatcaaatttcttttctaaaatataatttttatatgaaaatttggattggccatttttgttttgattgtaaaatcatttttagtccagaaatatcacgtgttacgtgtgagagagcagagcaattaggttacttccatcgcacgacttttcagttctcaagcgaaaaataaaaaatattaaggagggttgagaagtccatacccgagtcaaagatggtgccggctccggtggccggatcaaaggcgagtgcacttgtaggaatatccacaattttgtttccgacacgaatcccaaccaagttaacatagtaaagcgatgatcttctagggttctttaacaatggagtggtcttgatccggatcggttggttcttaggtcccaatcttagtgatccggagaaattgctggacttactattaggcaagcaatacgagaatgtagactgataaagattttgtgactgtgagattaaagacaatggaccacgacctaagcccatgagtccttgcgctggcaacgatgttccactagctttgttgatgcacccaaaggtgtagtttgggatgacgtcactggccaatgttagtgtgtcttgtgtcagatatgcttcgatggttgaaccaccgtaggtcatgttgaaaccacatgatttgcttactgtgcaacttggatttggagcctgcaataaaaaaaactctttattgattaatatttagaattttttttgttctttgagtttaacaacgtatttccataaagaattgttttatccatcttggatctggttattaaattgcgctactaacgatgtgttacgttatttaattgcagttgtaagtggcgtttttgtattataggcaaaacctaactagcatgacgacaaagtatatatatagatcaaagttcaaacagtaaaatatgctctactagttggattgtttataaatttcttgtataaataataatatacccgtgacttagactcatggtaccaaaaggtccaaaacccgtgactagacttctcgatcatggtgtaataacacgccaaaaacgaagttcacattcacatcttttgtgtagatggatccaaaaattgacgtagaggcattcacattacgcctgacattcggttcgtatttcggttttggttttaaatttcttgttttgttaaaaataatcaagtccaaatactaaccattttttttctttcgatttgaaacatttatgtatgttctgattagatcttgttttgaacaaagtaaaaatgcgaattatttgttagtataatttaaatgtattttttgtatatcgattttcccggtttattcagtacaaaagtatcgttaagtatgaatgtatgatatgattcaaaaaaattacgttgagtatagttttcatttttcaagtccatccagagaatgcatgcacatatctaatttatacggagggtataactataaagcaatatttagttacctgtttacactgaggagcttcgcattgaagagtacgagaggagcttgacttggaagggtcaaagagaacagaggaagaacagccaacgcagccagaacaaggaatccaagcagcgtcattgctagtgtcaagagccacgagcatgggctgagccggtgtcccgatgttagccctcacgatgtaagtcgggctctgaacgatggcccgaccagaggcgattggaactgatgatttcctaacgccagcgaggcttgacaagtataggaaacgagccttatcttgaagaagtgtatctgcccatgaaacagaagttttgaatggagaacatagactgttaatgtggaacactcttagatctgaggaatggctcttttcattgcagtttatggattcagatttcaagattaagagagagattaacaaaatcaagagatgggatctcattgtttaagaccttgattttgtctttgtggtttctagtgtttgtagagtgaatgtgtgagtgtgtgtttatatagtgagtgatatacgatgagtgtgtagaaagtaataagaatataaaaatgaagagtggggttttgtatatcgtagagagaacagtctgtattccatctcctattttttcgttgtttctatctgttttttgggtccacactaatattggctctcttctctatcgacatgcgcgttgctctccatccacaaaaactcattacccaaggtgttgtaatttttagactcattatcgaatggtaatcaagtcaaactggaagtctagctgattaatcggtatattgactcttagcaaaaaaaaaaaaaaatcggtatattgataaaaccgattctcattctaacaaaatagttacagttttgataaatatccaatttatacaacgataagggaaatagcagaggaacgtgtggagtggtattgtttaagagatccgagaaactgagttgaattttttttttctcaaagagaaagatcaaaggtttcacgtgaggagtagaaagtggaagaccgacataaatgcattatgtattgttgcatattatggaatgtatcaaaactacccaatactcattaccatgtggtgggttatatctcacattggcctcttctccactatgtagtgctgtccatcaattattaaaaaaattaatggtgtaaagtatcttcattgttgtttgtttcttaagagttgaatgtgatatgtcaatatcctctatactaaaatatttgatataatttgatagagttttcatgttgtgtggattgaaccaaagaaaattttgacccttgtatgtagttgtaagtagctttgcttgttcttagtctccacttagtcactcgttttgtaagaaaaaaagtggttgcagcgaaaatataacaaatgtaaaatttaataaagttacacgatttaacaaatgtaagccaaaaatgaatatctcgtcggaaatttactcaaaagttacacgtcttaagcttacaaactcactttatttttccgatcaacattcccttaaaaaacaacattgttttactttcttcttttctattttttaaaatgtgaaatgcacttaaaaagcttaattccttttaaactaatggaaacaaattctttcagtgtttattaatatcaatggatcggataactcaagagtctagataatgaagtaacttatacataaaaaaactttttaagtgcggtttgcataatttaatttgtttcctatttagtatataataacccatttgactaaatatataatactctttcttaaatctttaatactctttttttttaatcccactagtttgcgtgtacgccacttctaaatttatgttagtatcagaccttgaccttaacactgtacaatgggaagagtcccaaacatagtaggagtagtcggaaattagagcatctccatcagtagtctctcatatagtttctcattaactaaaaaatataaaatgataataaagtagaagagagattgagaatagtttctctgcagagaaactttagaataatgattaagagactatgtgtatatgtgtgtttataattggacagaagttaaatcataataaaatatcattatttattttttttagaaactttttgaaatatctcaccaatggagattacgctctcttttttttttttccttatatattcccagtcataacttggagttgtattaaatgtacctacgataaaaaaatcacgtgagaataaaacggagtatttctttacctttacaaaagaaaatgaaaataaaacaattaaacttttaaggaagatcagataagtagttgaaagcctttaatctagtagttgaggactgatgagattaagtagtgagaggaagaggcttgaggaggatctctaacattaatcaaactctctcatcttcctcctgcactccaacaaaatcttctcgtctctctttaaaccaatagcacacaatggcacatgaaacaccacccacgcccagtacaagaaagaggatctgcagcttattcttgatcgtttgtgtcattgcatgtattattggtttggtcgtttttatactcatcaacgaatgcaaacgtccggcgccaaaagtagaattagcttctatggacttcatggtgcttaatatcacatagactcgtcttagtgcaaagtgggatttgtccataaggatccctgcagatcttcctggtgactatatatgtcttcaaggagactttcaagtttcatttctttacaagaatgttactctctttacctcacctccacaaaagtaagctgtttactattaacaacctccgataccgctgtcctcagcttcttaaagtttctgttgttgtctccgacgaaaacattagttcgattggaacatacattatggaagatgtcaaagagaagaagcaagtaacttttggattgcagttttctcttaccgattgcagaaaaaagacgttaggagttatgagttatgcatgctgtggagtcaccttgaggttcgaacccggatctgagatgaaggcgtctgtgtttggaaagcatccaaggtacacaaatttctgaccaagtccacgtcaacaccagtataatgttagagtttgcaaagatttgacattacttaagggctttattgaattagagatttagtttatttgtaaatgactttagatttggttcgactttatttagggtctaaagtttattgtataactgtttaatatttgtcaggacttaatgaagatgtaatgtttagactttggtgtattttgtacgacatgcatgatataataaaggaattatcataattaaattgaacttataaaaatatgacttgccttacttctcttttgaaatagaaattctaatgtaggtaaaatgtttgtgtttacataattacattacatcaacaaacgtaaaaaaatgtttgtgtcattaaatgtttatccacgtactcttcacaacgatcataagtcataattcagaaaattcctttaataaatgtgaactgaataagcttttgtatagtcatcaaataaaaagtcaactgtacaattaaaagtccgcaaacatctcgatcgtctaagagacgacttttctcgtaactttatgaagaatatacaatagtagtggcttgatcgcgtccacacatttacattgcgacttttcttgcatgccgtctcacgcactatatttaggcaaaacacaattgtcttcatttcaagactagttcttgttttctccatattcctcaacaacatcaaaatgttgactcccaccatttctaaatccatctctttagtaaccattctattagttctacaagctttctctaacacaacaaaggctcaaaattgcggttgttcgtcagagctatgttgtagtcagtttggcttttgcggtaacacttcagactattgtggtgtaggttgccaacaaggaccttgttttgctcctccccctgcaaatggtgtctctgtggctgagattgtaacgcaagaattcttcaatggaatcatcagtcaagccgcgtctagttgcgccggcaatagattttacagtcggggagcttttcttgaggccttagactcatattctcgtttcggtagagttggatcgaccgacgactctaggcgtgagattgcagcgttctttgctcatgtcacacatgaaacaggacgtaagtatatatagtaacatgtttcactttactcttttcttatgatgcatacatgcatgttctctattaaataccaaacaaaaacaaaatatgaaaacgttagaacttgtttttgttttctaaaaatcattagactaaataacatgttttactagattagtaatatcttttcatcaaacgcatatagcataatcacttttcaaaatcatagaaacttgactagaaatactttgaatatgttgcagcattcgatctaataatttcggtttttgttttagatttctgctacatagaagagatagacggagcctcaaaggattactgcgacgagaatgcaacacaatatccatgcaatcctaacaaaggctactacggccgcggaccgatccaactctcttggaatttcaactacgggccagccgggacagcaattggtttcgacggcctgaatgcaccggaaacagtagccacggatccagtcatatccttcaaaaccgccttgtggtactggaccaatagggttcagcctgttatctctcaaggttttggtgcaacaatccgtgccattaacggtgctttggagtgtgacggggccaacacagccaccgttcaagctagagttcgttactacacggattattgtcgtcaacttggcgttgatcctggaaacaacctcacttgctaacaaaaacatctatttctctgtatacatatataaaagtaaaaatagacaagctttaagaatggaatggcccattaatgttttgtcccttaatgtcgaatatatataaaatccacttagttaaaaaaagacaaaaactttgagatgaaaacagagaaactttatacacagaatcctatgaagtagtttccatcatttttgagaaagacatggaaaagctttgttatgatcaacaccatagtaatgaagaaagcctttgaagatatgaccacttatagttactgttgcttgataaccaatctctgcttgctcgttgttgcttatcgctgttactctcgtccgtttaaaaaccgccggagcttcaattttccccggtaacccctctctgaagcctctctctgcaattttccacacaaaaacgcaaaattcagattaaaaaaggttttgttcaattctagttccaagattcattaccttgacgagaagtggttgtcggaagtagcgagacattaggggaactctgtttatcgattttgagcttcttcttcctctcagaaggagaagatgaagaacgagttgcagaagaaggaatccacgtgctcttcacgtgagtgacacagttgtatcctctgcttttacaacaagttctacatctttcgaacaaacactctttctttgctctgtttccacagtctctgcatactttctctccaactgtgttgttgtcttccaccgccgcgaagtttaccggaggaagagatggccgtgttatctgcgtcggtggtggagataagagaatgatgtttcgaagacctaacatgtagtctggagtagtactgattccaacggcggcgacggaggaggaagagtgatcaggtgggattgagacggcggcgaaaggtgttgaagatgatgatggttgtggtggccatgagagggaagaaggtggatttgccactgtggcagtagtaataataaaagcgcgtggaggctaatctagtaggtggagcttagctatggaggagtctagtaagagtagtgagaaacagagagagagagcaataaacataagttttttaatatttggggttttgacagagttttgtggtcacatgtaatggttaaaaatgttctgcagaaaatgaaataattatctttccaagtggagtggtccacttcattgggaaagcacccgtctaaaacggctttatatcccactttgtgggtctcctctctatgtgcttaagctttgatgggatagatttcttaagaggtttatttggtatggattgcttgtaacaactacactagaacagaggctatatcacaagaagattttgaatcgaatgttttagtttattaggttttttttttttcatttgagaaatcaaacttagaaacattgcaagactcactaagtctagttgtttatagcattcaacttatatgcaagaacagatttctagcaggggagttgatccttgtagatgttcaaacccgaggtggatgcagtaattgggcatagcctgagagaaaacgaatactgtgcaggcggaatcagaaacttatcgtgaacacatggagtccagctatcatctcccccaagacccatgtgtttgtggtccagatgcacctgcacaatgatcaccattcaaatgacaaagacttaactaacaaaatgacaactgatgctcaggtgtttgataagtcgtttccattcttgaattcaaatatatctggtcaagaggatcaagagattgaggaaaagacaatagattactacctcgatgttttgtcctttgataagatcctcttcatgcgttgcacggtgaagctcaccggttgtataataactagcattcatttgcattagagaagagctaccatatgttgaagcatatattcctacaccatctttgtttcggaatgttacccacctaacatctgttctacctccattttctcctggaacaatataagggacatgcatgtctccaacattgtgttcatatatcgccacatgggctgctgcttttcggtctgggtaacactcaaatggacctttgccataccattctacacggtccagtgttttttcaatgtggaattctatacctacacgtggtagcggtggaagatcagagtttggttctacaaaccaattggtgatgatatctccggaaccatagatcagatatgtcacattgactttgaataaggcatctgactttgaagagccagaagctgaagaaccaaggtaaatgaactctatctctacggatttatcagtgatgctctttactgaacagctttcaacaaggaactccacattatctaactgtgccgctttccacctcgaaaaataactagagtcacctccacctttatcattgtctgtaggtgctcgccaaaagcatggcagtatagcttcgttcataaggagaactccttgaatctgtcatttttgaaatgatcttaagaacagaaacattctcactcaagatgaaaaagtgtacgcattactttcactaaaacatcaaccaagaaaagatcttcaatatcgaatctattttttagttttatgttttgcacttttctctttcattgcctagctagttatatacctttttcctatggtagtattttctttgcaacaactatgtactcagtatacccccaatgcgttaatataaatcaggaaagtggttacaaccggttatatcaaactttagatcccaacaggatcgtttacttgagtaactaacctatatgcctacaatatgtaagacttcttccctataatttttatgcattacgaaattgttttagagcttcgcaatcaagaaataaaacagaaaagaacttaccttccaaccttcaatagtcccttttcggacatttaccattagctcccatgaatctttctggctgatcttaatgaaatctccaacagtttcacaagtgatactagtgtctgtcttttttatcgcctagagtaggaggttacttacaattgtcaggaattcatattttctagcagaacgacgagagatctttccaaaagaaatatgacttgtagaggatgtgggaaatacctgcggtattatttgtccctttgctggtaaaggaatctgcgttgaagacaaaagatgaccggcttcaagcgaacgagtaagatttaaaagcttggcatttattgtcagaaacaattctccagcatttgagtcattccagaaagaaaaccatggacctgacttccactccatctcaaaactattttgtggctttatcacaggaatagagagagtcccagatccaagttcaagaccatccccatgaattgtccagctaaactccaattcttctgttgtgttgaaaaagtaagtgtttgcaacctgcaaagataaagtttgagctacatagatggtattaaaaccaaagccaactgagttgatgtatattaaattgtacctttatcatgccatccgtcaatgaaaccttgattggttggtaacaatgcttaacctcttaaacaacgcaaagacatggtgcaaacagaagaaaattagtgccatttgaacatgtatcatggtcaagtagtcagaaaaagggaaacatatgtgatactttttagatttatgttccttaacttcaatttcttgatttaggaaaatatttagaatttccatttcttgactagtttttttttttaactagaatactttttattaggtactggcataagtaaggatgagatttcgtctgtgattctcatccagggtagagagagagcgttggaggttatcggttctcttttcaatcgagagaaaagctttttaagctttcttatcggctttgccaagagaaacgtttctaacagattttggtgatatagttctaatttgtttctatttcaataaagaagagttttttattttctttcgtgattcttaaactctaccagttggtccgacctaacaacggacaaatgccaaaaggtatgactactactcgaacagagagaagtttggaagcgttagagaagaataaaaaaattctgtgtgaaaagttggatagtatgcaagctggtttgaagaatgttttcgatgcaattatgagtttaacaacaatggttgctgcaatccaagggggcacggtatctgaagtatctcaagaaacatcatcagattctgtcgtggtccatataaacaacaaccactgtgccataaagggtcaagcaacagcgattcccaacttagatacaaaggtagaagcagtcttattgaatctccaacctccagttcctgtgaaacgttggcccaaagttgtttgtagataacaacaaaagttcactgaccttccgcggccttatttggattttgatgaggatgattttattgttttggaagggcttgctttagaatgaactctgagtccagccttgaggacaaggctgtttttcaatcattcaacaatgatacgtattaggttatttaattataattcatattacgctatatacgaagttattcgtttcttttactagagtgctttgcttttaagattgactatatatatatatatataagtatgagatctcggttgtgagactcatccaagctagagagagcttgggtttcagtagaggaaaaagcttaaagcttttagtttttaattcttagctatatcaagagctatatcaagatgttaccatggagtgctggatgaggagttcggtcaggccatataagcccattgagacagaagttcaaatcattaggctggtcaccaaagtcccctccatatgcccaacgcttaatgccatctgaccccagtttcaatagcccctaaatgatagcaaaagactaattttatgcatggatttggctgaccatatatatctactgcgctcattactataggatcttacctactttatctttatgttacaagaataaaaactttcagatcattgataagagaagagattaagaggttcaatttaattttatgggcttaactattgtatgaagaatcagagtatactaaaatttaagatatgaacctggtcaacccagtcccatatgaaacctccttgcaggccaaaggtattgtcaattgcctcccagtactcatctatattcccgttgctgttacccatagcatgttgatacctgtgttttattaagaagaaaatctctcaagtagacacaaaagaaacatgaaatctaaacaatgatgcaataaattggcctatatgatgccaaatgcaattcaggaaaaatgaagaaattgatctaacatactcgcataatatcaacggccgtgattcattttgatcaagtgcaatcttgatgatgtcccaaacccgcatgtacatagggcagactatatctgtagaacttgttctggaaccaccaccttcatagtgcaccaaccgtgaggggtccttttccctaatccaacctgttccacaagttcaacaacaatagctgtaagatagaatggatatgcaaattaattctccatcagggatgaaagtaacaaggatcaaagctt

SEQ ID NO: 1085 - DNA, 84233 bp, Arabidopsis thaliana
aagcttctagtgttgaccctaaagctgcttctctcgtagaccagctcactcgaaacgctggcgtttttggcggtcccaggtactatttctttttccctttttacccttctttattttctaattagatttttatttaaccaatttaaaagtatactcccttattagaaaaatcttttaaaaactgaagcatgatctctcatttcggtgtttaatgtataataaaattagctgtgaaagcgcgtgattagagcgcatgatttgttattgtcgttattcgttaagtcaagaacagataacaaccgtactattttactattttagttgtgtttagtcttttactttggagtctagttaacttgtgattagaaaaagaaaactctaaactgacgaatttgtaatttcttattggaaaataggataaataggttctttcttgtttgaggttcttaatcacattctatattcattcattcaattattcttgaaatggtgatatatagaagaggaactatggtaagtctgaataattagaatctgtataaacaattaaagtgacacattattggtttatttgaaaaagtagctcattgagaatatcagacgttagggttttggcagtattccagaattcatgtagagtcgcacgtgattgtctacttagggaaccgaccaacttgactagtgtctgaattaaccccacttgctattttcatttttgcattatttttcaagtttttagattgcatcatttttgttgtccctttgggattatgggtggtggaaatgtctgtcttaatgttaattaagacatgcatgatcatgatgcaaactacattttgatacatcaaatgtaatttactatacaaaagccaataggtttttttggtcgtaatgatgtcattatgatggaaatgtggaggttaaggacgattgggacccttacctagaaagatgattcctttttctatggatccataataataattacaagtccttttaaatcgcattaattgtatccttttgactttgtttagctagaatgaataatatcgtataacttctaatgagatggtttttggtggggttagggatgatcaaggtcagagtggcaattcttactctccttatggaggcgacggcggtggcggtgggagcagcggtgggagcagcggtggagggatggacgttatgggaggtacgacgagaggaagcagcagcagcagcggcgatgacagcaatgtcttccagatgatatttggaagcgatgcaccgtctcggccgcgtttaacgttattgttttctttgttaatgatttcggttttgtcgttatcaactctattattgtgacgaatggataacaaataggatttggaccgttcaattgattggtttttggtgtaaagtgtggctctctctccattattttctttaattgtagttggattggcaacaatacaaaacactaaaatgggattgtcaaggcaacgtcaaagacgaactttgtctcatccaatcaaatgctttgtttcatcaatgatgtagcattctcatctttctatgtccactaccttttattcctctaacgaaaattaaggttgtgtagaagtcacatttttaatatagcaaaatttgccgcatgaaaaagcttcttcaagtgatgctaatagcgagttttccatcggttgagaagtctgagatagagagaatcatcagagagaaggcgacaagggttgcggaaggaggagaggaagagaatgttatggcaaaacgattgtctaaagaagctatttcaaatgcagatgaaggatcttgagttcattcaacaacaaaacatagagccttaacaatataggttgcaatggccaaacatgtttctttttccagtccggattataaaaagaaggatttaactttttaagtcatgagcaagtaaattgttactgcataggcttcagatgtgattgtttgctatcatatcttttgagaacttggattgattgattcattggctcattaagttaatttcttagatggtgtttgtcatctggtagctgtgaattagctccactaaattggaacaacagtcgaatctaattgcaatagagtttgaagttttgttttcaaaaggatgtttgtaagataaaaataatataatcaatctaaaaagaagcttggtttacttatgtggatatgtaaaaactttgaataaagaaagcttgtcaaacattccaacattatagatggtattagatatttattcaatcaattttgattattacattcatttgataagagatagtgataataatacttttttcttacttaaggaccatcctcccatttgaaacagtatggattgcttttcttatcacgaggaatacgacaaataggatttccatcatctgttcctacttcccatatacattctttacaaacgggaaaacgtccatctggattatcatctctgtatactttaaaatataaaagtaatgagatccgccattatgccaagtaaagtgacaacgaaatttcgtagttttccaaaagttgacatgaaagctgaaatcccatgtgctattccaaggaatatggaccattccaaaatcatcttcactggatctgcaatgtacattcaaaatttctttattttttaccttattgtgaattacaacatgttttttagctagaggtaaaaagccgtcagtgcccgaacttggtgattcggcaggagcattagaaaaatctaatgcatacacaaaaagaataagagtagaatagatcacaaataatattataaaataaggtttattattgaaagtcataattatgtaaattaaattatgtaggtgtggttaaatagaacttagaaacaccctatttatagatataagaacatgtgattatttttgagagtgaagatgactaacattcatgtaacgttgaatttatgtacttagtttatgttagtattcaaatatgtaaatttttattgttttcctttgtagttatagattctttagctttaataagaaataaatatatgtttggtaaaaatatttttggaacatatcttatatattataatttacaatatttggaaaaatagttaacttttttgactatcaaaaaaaaagaaaaaaatctttttgatgactttgactttgtaaaactattaaaagattccaaagtcttatttttattaaattacgtaagacccatgattttatttcgtttacaaaaaaacacaaaaaaattacaactggttggtcgaaaagatacaaatatattcaacggacttcatcaaatgggctttgcagttgatgggctttgcacgttcttcgaccttttatcagttcgatcagacatataaaagaacatcaaaatcagctttcgttaatgagaattatcatggtaattaatgtatcaatcactgtacatagcacattctgatactaatcataacacaaaagactttgaattcatcggaagttaaacacacacacctgtactttgaaagatgattcctttttctatggatcaataatatgggtggtatgggcggtacaacgagaggaagcagcagcagcagacgacaacaatgtattcgatatgatattcagaagcgatgcaccgtctcggccgcgattaacgttattgttttctttgttaatgatttcggttttgtcgtcaactcatcatcaaagaaaatgtaaaaatgttgtaagcttgtaaacactaaattcctaccaagttttgcaatagatgcaatgaacagcactaaatttatcttctatcacatgatctcgtcagggacgtgtggagtactattcccggtcgccatttacaagagaccaaaaagaaagaacaaacgaataaataaattattagagagtttctaaaaaacattacttttgaaaagaaagatatagctaaaaaaaagtcatcaatgagaattagttagcagctagagaagcagcttcttcaagtctcttccatgtcaattctctttgttccaacaactcgcatgccttagcttcgttctcgagatattgtttctcgcactcctcaaagagctcagtgtccatctccagaaacattcttctaacgttctcagagagaccatgcaccgcttggttccaatgtcctttcatgttcctctccaacgcttcaaagattatcggaaagatcacgtctttgttctgagctatcagccctacgatatgttcattgttccacaagaagagcgctctctctgccacctgcactcctcaccatctcttatcaacaattacactatataagccaaaacaatgtattcacttaggttttgaaataacgaacctggaagtgtgcactattaagacatttcccaatctgtgtaaacagaggaacaacacattgctgaaactcagagggctctgtagcatccaagacttcttccaactctcccaagaagagaacctccttttgacaattggtaagcggccaaaacttcaacaacccgcggatcacagtatcagccaacttataatctttctcaacaaactgtgtcacgcaatacgccaactgctggtggtaaatcgagatacctttagacttgtgtagtggcaaaatagctttcacaagatacagcctatgctcctctctcataggtactgtaaaaccattgatcacacttcctaagatctccaataactctccaatgccaatacacctttcagtctcatacaagaacttgtagaaaatgttataaatcgaacatctgataaacggtcggtgaaatataaacttgccatagattctatgaagaacagttttcaaatactccctctccctaggatcctcagagtcaaacaaatcaagtaacctcgagacaaaggtgtgattgatgaactttttcgcagttttaggttcgatttcggaagagactacataccgcaaaagaagctcgtaaacgagctgcaaatgaggccaccatggctcaagataaggctcttcttcttcaggatcattcccttcaggaggagcaccagtgttctcatggtaagccggtgggagacaccggaaaatgttagcagaaaccatacgtataagctcactctgcatcgtctcattgactttaccagaagaagagtgaaggaaatcaaccaattcaaggagtgtctgtcttttgatctctttctcgcgtggcattatcaaagtatcagagaaatcgcagtggcaagaacacatgtgagctttcttcatgaagagaagaggtcgatctgaggaagacacgtcttttaacaatggaagtacttcgaggatcggtgttgttgtgaacattgggtggtttggtgtctgtgaaggagattgagctgttgtctgagattctccatttgaaacagaggatggagcgggtgtggtggtacggctgccgcgaacgacggtgttggtggaggtattgttgttgttgttgttgttatcttggtgatgttgatctgatttgttgaatttcttctgacccagttttatgattttgttgaacatcttcgattccgaatcaaaatgtaatcttttcttgaaatgaaaggaaaaaaaaagattcttctgtgagagaaaacgaggttaatctgtaaagaggaattgaaacgaagaagatttgatatatgtgattacctctaaagcgatgaatggagggagaaactgagatcggagaaatgcattattaggccaatgggattgtggaagaatgttcttcaggcgaaaccagaaaccgatacaagattgatgtaagaagaatgaaggaggaggaggagatcaaattttttggggagatgtatttttaaccaaacgatagataatttgttgttaaatcattgttttatccgagtaaaatgtatattattgttttgaattttctcatcattaaccggaaaactttttaagaaaatgtatatatttaaattgcataatcgaataatagttaaatataaaatgcaatttcataaaacaaaaattatgattgttaaaattttgagaaacttcaaaaccattttctcataccctttacattgtagaatctaattctctaagagcattattaaagggggatattagggagatattaggagattcttagattgtaaatgattaaatttaaatgttaattaagcaatttagaggctctctaagctaagaggtcctcttaaataaaatgtagtggtgatgtgacatgatttggttggttgggaataatattaaagccgaattttttttcttgccattaattcttctactatgtataatacttcataatatgatagtaaaaaacgaacgagatggttacacttactttgatgtctctgaattcttacaaccagaatcaactagaagtgcacaagtggatttcacctattctacatatatgccttcaaatctcgagaatatattggaaactcgaactcgaattcgtaatcgacaagcacatcaataattaaaatttgatttggttcaatatatatagaaattttttagcagaaatcaatagttaaattttatgttttcatgtatgtttttttttttatatgtcatctatgtatcgaatattatgaattgaataataattaagtttttaaaaaataaaatatttatatattttatcttttaaatatattttttttaagaatcccaatttaatatattaccattgagcttgccaaaaaattaaaatcttaccaaaattcttaataataaaatttcacaaatttattcattaaaaaaaaataaaaaccttagctaatagactaccattaaggatggtctaacattcttcttgttaaatcccttaactaaatatatataggccgaagcctctttgttgggccaagaattttgaccatctgaccaatatggtccaacaaagagaaacatctatggtgctgtagtgtctgatttgtaacattacaaaacaatggaacaaggaataaggtttttttttttttttaatccagtacttttatgatctatgagtttaaaactaaaccaaactctagtttttttctagactcaaagactaaaagtctcattgataactttcaacacgcgtcatgcagcttcattgtctagctctacatgcaaacatcccacgtgtttccactctgcatgtatctccaacactttcgttacctcaaacttatgtaattcatctttataaattacacacaaagccagcgattctctagggactcagtaaggccacctcaaaacaagacccatcgataacagcgatcatggtggctaaagccttagcacagctgataacatgcatcatcttattctgccacgttgtagcttccgtagaagacctcaccatacgccaagtcacggccgacaatcggcgaattcgcccgaatcttctcgggactcacacagagagtaaattccggcttttcatgtccgattacggcaagaactactccacgagggaggagtacatccaccgcctcggaatatttgccaaaaacgtccttaaggccgcagagcaccagatgatggacccctccgccgtccacggagtcacacagttctctgacctcacggaagaggagttcaagcggatgtacactggagtagccgatgttggcggcagccgtggcggtacggttggagcggaggcacctatggttgaggttgatggattgcctgaagattttgactggagggagaagggtggagttactgaggttaagaatcaagtatgttcttatatatatccatatgatttgccttaggcttggcttacatattttattgcaacttagaaagaatgtgaactattaattttgatgcagccaaaaacataaggagaagtagttctctaggtggtaccatttgttttattttgtaattaggcacgtaattatactaattaggtaagagtattatctaagtaattgatattagttggctcaggaatgactcttttgagctctaattaattttggatgacaaaaaaaaaagatattagttggatatataaatcacttggtagtaagttgatacttttacgcagaagtgtctaatttgtgagacaaatgttttttggggttaatttgtgggacaattacatcatacaaacttcaatgcctgtcagtttaaccatatatcatgcatgtgattatgtgaagggtgcatgtggatcgtgctgggcttttagcacaacgggagcagctgaaggagcccatttcgtctccaccgggaagctcctcagtcttagcgaacaacaacttgtcgattgtgatcaacggtctgtttttaatccgttaatcaacgaatttgtactcttgacttgatccttgtaatttgaaaatttatttggtatatatatgagtatagtgcgatccaaaggacaagaaagcatgcgacaatggatgtggcgggggactgatgacaaatgcctacgagtatttgatggaggcaggaggattagaagaagaaagatcatatccttacactggtaaacgaggccattgcaagtttgatcctgagaaggttgcggtaagagtactgaacttcacgactataccactggatgagaaccaaatcgcagcaaacttagttcggcatggtcccttagcaggtgatatatattagctaatgtatatgtgcaactataaaacagatttgaagtccgagtctttagatagttttcttgacacgctttgttgttgtgttccacagtgggattaaacgccgtgttcatgcaaacatatataggaggagtgtcatgtccgcttatatgcagcaagcgaaacgttaaccacggagtacttcttgttgggtacggatcaaaagggttttcgatcttgcggcttagtaataaaccttattggattatcaaaaactcgtgggggaaaaagtggggagagaatggatactacaagctgtgtcgtgggcacgatatatgtgggattaactcgatggtatctgcagtagccacccaagtttcctcgtagatgggtcttgtctttcctctgctctcttgttttctaatctagggtttgatcatgttttaggagtggagtttggggtttgaatattgggttgtttctttccgtgaccgttcttgtagtaaaagtgggtgattatttccgttttaattttttcttagtcagacgtaatcgactatgaaacgaccacattccacacatgatctgtcgttagcttaaagccttaaacatgttattactagatcaaaaactacataacaaataagaattgttgacgggtacttgctggcgagaacccgtaaacaaacatagcataatccaatttcaaaatcttgcatgatatttttcatataaaataacttggttttgggattttggaatttttgggcctcgaggctcattttcgattttgtgtttgagaatataataacacgtcgattcaaaaaggaaaacacaaaatagtagttctccatttcattttatatcagattattacaaaattttataaaatgattgatgctaaaaataataagaggcagttgtaggaataacttaataaactttgaaaataactgtacatgttctttcattaaaaaaaaaacgacaaactataggaaatttgtttaaacatcttataaaaattagaaacccactaattctttatgttgaaaaaaatgcatctgcctcaatcttatgctttagaatgaaagaacagaaaaaagaatctgctttttcccccaatacatatatgtgtctattgatgcattcaacaattaatcaatagataactgaaaagagagaatttacaaatatggttaagaaattgaccaagtcagattgccatattttgatgatgttgttgttgtcgtaatgtggaatgagacgtgagagtagaccccatgatgcttacccggtgctaggcaagagtatcccactaaaagattgtcttctactactaacctctcctctcttctttttcttttttcctttttctttgtgaactctcagattttcaacttctcaaaagacaacaaaagtttattgaataagaacacacaatgcgaactccgaacccactttgttaaaaagtttcactttcggcgttcttttttatgcgattagaagaagtagacaaaagctaaccatcttgtgaatatagaaacgagtctcactctctctcatttttgctttcatgcttaacttgtacttgatatataacttaactatatgcgattaatttattctgtttgaaagcgatttgtggatatggtcaaatttgaatccggttacgatatatgattaaaatgtgaatccttgttaaatatggataacaaatttcaacatttaaaatgttaagaccttcaaagtttaacaagagaaacaaaatcatttcatctacctctgtctcggtagttcaactacgtgtaaggttgtccacccagaaaatcatttttaaagattacgaatctgaggatttggcggcgataagggttagactaatattgttgttctctccaatctgaggacttaagtgcaatttgacctaaacatggaattaaaccaaacctaaataagaataaatgtcatttaaaaactacaaaccaaaacaatccaaaaggtagatatactatcgcaaaagaatattgtaatccaaactaaaccaaaataatattggattgacttattagatacttttctttgaaactaaaagtcaactagaacccaatctttgttctaaattgaaagtctgagactactatagttaagcagctaaccatggaattattgttgtccctatgaaaaatgacgtcaggtaaagaaggcaaccaaactaaagatgaaatttgctactagacatatttggaccgacgcatgaaatcgatagatatgaaaaagatctcaatatttaaaacaaaaatctatatatagttttgtaaaacaaatgaaaatttagtttcgagtgtcggtggatgagaccgaaccgacaatcaaagacgtggggttactcacagatatatgtgacgttgttctccgcaccggccctccctcgacggacgcacacgcgcaattaccaaacgacaacatttgttttctttttgttgatttaatcacattccttatgagttttttttcttcttcttctttttaatcccaaatgatgtgatcacatgatacgttctattcattaggaagtttcacatttttggaaacccacatgaaagttaaatcgattaatcaaagagattttttcatggcgtttacacgtagttttcaacattaaaatagaatctgacaaaatccaacattaaaatagctactattgattgatgataaaaagtgggattttatgactattgtcattaatggtgtcgtatcacgaaccccaagagtgttttattggatgacttgattctatcgattaaaatatttgattagtagtagtagactagtagtaactcgttgaattggccggactagtggaatgtttccgtgattcattccttatattttatcaaccagataacttttgcgttttaaattcatttatttgttaaattccttatggttcagaagttagaatctaaactgtctctttccacataagcaaaaggcaattaaagaaaaaaacacattttgcattcatttgggttacataaagctgattaataacttttcttgagctagtggaaatgtcaaagaagaaatcatgatgattacataggaaaacaaagacaaaccgaaattacaggaatcatatttttttttttttttttgggcagcatggattaaggagcttgagccctctttgcaagatgataggtgtttccccttttctcatcatgtctcagaaactcaatctcaaaaacacaaatctatacaacaaatcataacctaagaagaaagaaataaaaaccttatcttaaaaaaatcatctaagcaaaccatttcttatttcatcgttctcttgcggtcacaccgatatctttatcacttgtcttttgatctgctctatgcacggattgcttgaacgctacggttggagcgattctgctatttctcctttgatgctcgagaacaagttccccagctaaccagtcaagcttctcgaagttgctctgttcatcgattcttttacctccaaacaaaacagattcaacattcttttgtttaagcatctcctctgctactcccatcagcatattcacattgctcccactagggtctgtgtccatgttaggactccaaggtcctaagttcgacccattcgcctgcacaaacatattactattatttgtgaaaaacctacaagtgcatactttatatcatccaacaatcctactaagctcatatacaacaagtaggatttggaaatgaacttatataacacgaagattattacctatcacaaatttcattaaatcgaaagaaatactaggtattcaagaaaatcaaaaataatttttgaagttatcaaatgcaattctgcagtgtggcccatacctgaatccggacatagttactactgcggcagtgaccaaaagccatggccacagcttgatcgacagtgtcagcagcaccgtcattagaaataagagctgcggggcgagcccaatgcttagccttccacttgataatccgatcatactcatagctaacatcaagcaactgacccataccaagagacaacacaagcaaatcctcaacacctcgcacaaacggaaactcctgcttgttgtgcaggacatgcgtgattgcagccgctgtgggattgctcatggctaatcctccaccaacagccacacacttggtctgcccatcaaccgacttcatctccacgggctcaaacacacccggctcagcccaagtcgctctacaaacctccgagagcctaaaatcatagccgtccgtctcaagcgcatcggcccgtgagaacagaaacgggccagagcttttgaggtcgtagcaaggtataagcaccggtttaagcgtgtcctttaaggttagctccgagaaagactctttcatcactttctttaacttagccgtcccggaacaacaacccgacccggttctcaagacccgtttcaagattcctgctcctccgtaaagacccttggcgtttctcgttaagaactgccacgtgtcatctgctttgaagatggggcggttaccgtctcttgacccgaacaacatggctgtgtaaatcccacctataccggacccggcggctacgtcaaagtaatcggcgattcgggcattcgggtcacccgatttagatttcagagcgtgttctagataagccaaagccttaccgggtaagatccctctcattccacctccatcgatactcagaatacagattttacctctctggttcttaatcgacccagcaacaaccgaattcgcgggttcgggtttcgagtcgtcgtacccgaaaagaaatttgctctcaagaatagagaaaatctcgtagctgagtttatctgtatcgatgcttggttcctgcatatccgtcaagagactatcattattattataatcattcgccgacttggaagccgccgtagctccgtcgccgcctctctgtttgattaaatgcttgacggaagcagtagcggtggatttaaccggtttattgcgtactctatgcatgatgattgagagaaaacaatcaagtatttttttaccctaattaagacataccatgaacaaacaacacgaagagaggtttcagaccaaacccaaaaatgaaaccagtcttggacttttggtatatatataaaaaatggtatcaaattcaaacaaaagtttgagtctttctttctcttcttttgcgaggaatttttcaaaacatgtatctcttgttcaaaacacgaccgagctagtcttttgcccaatcagaggaccgaaaaaagatgaatctttgtgtacttttaaagcagaacaaatgaaacaccaatatatagaagaagatgaagaagaagaagaagaagaagaggcaagaacagaggatgtctgttttgatgatatatatatcgcacgcttgacttaaaacctccccaccaaacccagattgaagagaaaggacaaaacaaaacacggattattaataaaagaagaacgagcaattaatcaattttattttatgtactacaaacacagaattattgctaacaattttgccatcccagagacttgtagttgcattcacttttactgagactttattatttctatacttgcgaatggttattttttttttaaatgctgatatattggcaacaacaacaaaaaaatgttatttttgatgctaaaattttccatattggagtatgaaaaagatctttctgttatgagtgtttactctaataatatactaactttttggatttaatttttccatacaagagtttcgaaggcatttgtttctgtttacaaataaaatttatagattgggaaaatatgtaaagcataaactattagtttgataaacttgagacgttacttacatttggaaaagaaaggtaactttgcaagtatcacctaatctttactctgcttctttgactttcttattttacataacaaatgtaacgctaatttagagcatcaattagtttacatactatcaacgttgaatgcttttccttttttttttcttttcaaatctgttattttttcttttgccatagttgaaatgcaggtaagataatgaaatgctaataaaatatttatatttttagtatatattttacggaaaagagatgtctagtacttttcttttttccttttttcttttacaaacaaaaaacaaatatcagaaacgtgtgtggatggactctagaaataaattatagaatttttaatagtatattatatgatattagatttatatgttgatgtaaagtttgataagtcaaagttctttcgtgttctctactattatgtggaactaggatatgaactccaccctgaaactcattttcgacaaatttttgtatttatatattaaactacaaaataatattgattttgcatattgagctaggaacaaaaaccgaaattgaaaaaccaaactaaaccaaaccaaaaaaggattctggttctgttttagatacccgaatagaacaaaaaaatgtttggtcaaccctttacaaaactaagtccaatacattttttttttacctctaatctaattaatttttgttaatttttctgatattttggtttattataattttgtcaaaaaaagtttccgatatttagatacagtccttttagaaaatattttggataaaataattagaaccgaatcgagttgaaccataactttttcggtttcttatggatcttcagagtttagaaccgaaagaagcaaaccgaatataaatgaatgctctggcctagtatttatgtactaaattattataattatatatttaaatatttgaatcattacaaaaaatttaccaaactatgcggtagtttaacgaaaatatgcgataaaaaaacataaccaaaataaaaaaattgtaactattttaattgcaataaaaattataactattttaactaaaagttgcaataaaaagttgtaacaattgtaactacttttttattgatcaattttgtcatattaggaaaaacaagggggaaaaaaagaaactttgcctcattgtaagcaatgttaaggggttcgaagcagactagtgccgccatgaacttgtaataaagcagatgcctacatgttgtgcaacttttttgtaaaaatgacgagttttggtggggaagctttaaaaccaatggtaaagaaaaatattgacaatgctacactattaggtgttcaccagcctatggaccgcagtgacacataatagaaaaacatggatttaattgtttaccatgcttttttcaatttctatatcttatataacaaccatatctcgttaaaagagaacgaattattctctactaatccatagtacgagagaacacgttggatctagactaataaacagtgtctcttccatatgaaactcgtacatctcttatggatttttatttacgtctattctatatgaactttgaaggtgcatatttttgtaaaccataagatctatgataacaatggttttggcagaaattgtgtggtttctctacgcttcgtaagaaatcttttgtgctagttgttatgaaccacaagtcgcattaaatcaacactcaatgtgtggatcaaacctccagttacatccaaaaacttgagaaaccaaaacttctttaattattcatttcatagcatacaacaatggaaaaaaacaaagggcaaaacattttctatcatttatagaagagtcatcatctatagccttgttacacactctgttccgatcatcacaactcatccttggaactatcaccctcgatcttctcatcagatttcatggtcgagatcaccggttcaggtgtcgccggtttctcaagtttaaatgggattgatgcgtgcttcttcaggaatttgtacagttccactactgtacggtcaacatccacagcgatctgtttttttttggtttacaagagacagttaaaacaatttcagtactcaagtaaaaatatttgcaggttttcaaaacactgtttgatatagtgaacaatatttgctaaccggatcgaagcttttgtttccaccagggaagaacaggattgttgggaacccatcagcctgaacaaaaagagattaagacaaaaccaaaatcagatctctgtcttgaatcaccaaaagctctttcgcaattcttttttcttaatcacctttgctctaggatgctcattgctggtaccatccatctttgctacaactaacgagtcaatgccttttaaatactttccaagcttgttgtaaatcggctcaaatgattggcagtggccacaccaaggagcatatatctatgacaaaacttaggctttaggtatatataaccctaagatgtataagcaaggctctaccggtttccattcaaaaatttaagtgattattacctcgagaagaacatcctttgactcgtcaagaacaatctcatcaaaattgtttcccacaatgaccttaacatcaccatcgttctgcgtttcatttaagagaattagttttgtgtgcagatgttagatgtgttttaaaatatgtcagacgccttacattttccggtagtggatctgacttgtagaaaggcttcagtttgtctgctaggaaatcttccgcaagtgtctatttttaaacaaagtcattgcgttaagataaccaacaacacgccctgaaaccataaaatttcacagaaaatagaatgttgggcctaccttaatgttatttacggtcaattcaccgtccagaataaacttcctcatatcttcattaccagtgtatacaagaacctgcatacgcaaggaaagattggaaacttagatcttctggttcacagtttggtttgttgtatcatgtgcatcacagaaacaaaaccgatacacagatatttcacaccaactactttaccttgggggcagcgccggtaacaccaaagaatccagaaactgcttctccataatcttcattgtccatttgcacataaacgaaaacaaactgcagagaaaagagaagattgccctttttattcaataactaaagttataatccacctctccttttggtatatatatatatatcaatcgcaacttataaataatcgtacgaggtggtttttaattattccagaaagtgagcaaaaatgaccaaagaaaattcaaagataaaaattacctttcccttgaaggactttgccacctccctcagagtgggaaggtgcttctctgattcatttgccttggcaaaaagaatgagctgaaaagggttttacaaaattccatctcattagttaatagcagcaagaaaataaagggaaattttaaagagacaaatggtttttacttggtttttcactgagctctcgaaaatcagtgatgcaccttcccttgtgaagttgatcaccaatgggactttgttggctgacacaaactctgctatagccgttttagtgaagtttccatctgccaaagagaagcttgatgagagaggcatagaggaaatctaagtagcacaaaaaaagaaggtaatgtattcgaggagtcttaccaaaacgggcaagtttctcttcctcctttttcagtaaaactaaggcaggacgcttgacttgggtttcaatttcaaatagctttgcaatatcagggcttgcagtttggtaaaaactgagatcgtcttccagtctggacgcagccgcgagctcctcactctctgacccctgagcaagagaaaatggtagcaaaaataagatattaaaagcaaaatctttcacacttgtcaatccaacatcttaaaactctttgccacacaaagtaaaacacactagacaagaagatctgatatacaagacctaatagcaaccttacatatactgcaagggaaaccactcgtatccttgatatactaaacaccagaggcactcatttgcgtaacgataatagtttcatttcttatcctttctgaaattctatggtagagaagtcccacagtaaccaacttggttgacaatatgtttaaagctctgagaagttaaaaaggagaactaaatccaagaaagaacgcaagaaacaccatggatttaaaggatgcataccactaatgagttgagaaaaccaaagacaagtttaggttcagcggacaaaacacgttcagcctcctctttagtagtgatgttgtggatgctaggactggccttcttcttcagccaagtcacaataccatccctgcaatgaggacaccagtaatggtgaaacgtactttttgaccaataattcgtatggaaaactaacagatgagaaaccaaagcagagagaataaaatcaaagatcacatgtgacatgcctctctctattgtaccatttcataaaggttgaataatcctaaaaaattcttctcggattccaaatcaaacaatctctcaagatccaaagctaaacctgatgagctatgttcatatctcaatcctaacagttggagaaagaaacattgtacacttactttgttctttcaccttcgtaggtcttgcgcatttctccgtcgacaaacaagaaaacggtggggaagccctgaatctcgtacttctgagccaaatccccttcctccgtcgcgtcgatcttcgcgagcgccgcaaggcctttcaactccgtcgcagccgcggcgtactccggagtcaaagcctgacaagcgccgcaccacggagcgtaaaactccaccatcgcgaagctattgttgccgacgaactcggtgaaattgtccttggtcagaaccgccacgtctttctcgtcgactggtggtaacggctcctcctcgtaaccgtgatcgccgtgatgaaactcgccgcctccttgctcgagatcatcgtaattctcgaagtctcggtgctgatgatcgtgctcctcctcgtggtacgaaccgccgccgtggctttgttccttggattcctccgcggcgaggaaagccaattcttcgtcgagatccgatccactggacgcattctctgcacgcgagttaacgagaagaagaatgaaagagacgaagagaaggagagagatacttgtagatgacgaagccattgttgtatgtaagtgtgtgtaatcaaagtttgttggattttgggtttttataattttcagcaaaaaaaaaaaaaaaaaaaaagagtcaagaagactgtaataagaagtcacgtggataactcgaatgaacgagtgacacgtgtccactatgagtcatcgttgacttaaacttagatctagccaaggacgtggaagtgtcatgctcctggatttattgtttaaagccggagtcgtgcatataaaccaaaccaagaccaatagtgtcgtaattattagtattatgatgtttatttttattatatattgtacaagtgtggtaattttatatttgtagtttagcatatatacacatggttttgatttttttgtatttttttttacagtgatcactcatcagatgtgtctaaaaagttatcggattatatatccattgaaaatctgttagaatcgatatgttttataatattataacagatctattgatcagaaacctcgtccaagctactcatattgcagaacctcataagagcgtagcattgtttgtgttgactatatgttgatgaagcacaaacaatattgaaagatttatggaaaatgtacaaacaatattgaaagatttacaaaccttctatttttttcttcacatgtttaccaaaaaaataaaagatttgcaaacccgaccaattattaagtcagaatacataattaatgtatagctgattttctgaagaaaaaaaaaaattaaatctactccctcgggtgtggatcatattttttttttcactagtaaactatttttatcaaacatatccaaaacatacatggtgtcaattaatgtgatttatcatttgttaaatagttttaaagtcttgacaatgcgatgtcaatcaccccattatcttttttataatatcaattaatttgatttacggaaaaaaaaaagatgcttatatatcatctaatcttttttatgatattaattaatttgatttactagaaaaaaaaaagaaaaaaaaagggggaaaatttggtgtcctccaaatttctattttcctccactacaagcagttttaaaggcattccatacggactatatttttagtttgcttttatttttagtactcacaactctttatattcaatactttgacgttgatacacatacacacttgtggatttggagggtcatatcaacatcataaccatgttttgggaagtgatagtcgttgtggtttagcatattaacatatgtatacagtcttgacatttcttgacactgattactttcatgagatctgtttaataagttaccggagtatctccataaaatccgttaaataatatgttctactgatcaattatacagatatatataactgagaaccttttaaacatcagatcgttaaaattataatgagtgatgatttgggaagatattggcgtcaatacaattacaaaccatagacgaatcaacatttcagctatttggcaaaatcatgaagagcactaaaaggccttcaacgggaacccttctttaatacctctctccattatcgctttctactccaacataacagtgacaaacaaaaactttaaagtgatttctatctttgatttgactcaaaagacaagaacaaaaccaatgattctaagggtaataaaagtaacaagctttaccttgattaattcagtgatcatcccaggtctttccttaaaccttttctccttccattgaatctcctcaggtttgttacaagccaatccctccattgaaccaacgggtactttgatcgtccctacatgctgcaaaatcctcagactacctgaacccagtgagttcttgggatgttaaaatatacaaacatcacacaacacattgaaagtgttcaggccaatatatatgcgagaagatgaaaaaacagattatggatatggaaagatctacttgtaatgaaggcttcttcccaaagctcacgctcagaccacgaaggtgctctctcgcggtatggaatcccctcgcttaaacacactctgacagaaaagcaaatcttattggttgatcaggccataaacacagacgaatataatcaacattcttaatggtctaacatattactcgatgacaaggtctcttataactcctgctagcacaccatcagttataggcgcggtctgcacctcaaactcgctcaaactcccgccgtagagattctctgatgacttcacctaaaatgagatcaaacagtaaatcatgcagtggtaaaatgaaattcaaacttctaaaatgcaacataaatgaagacaataaacatcctaatcacaacataggtgacttgtgcttgaacaaaaaaaaatcaaatttttgttagtaccctgcggcaaactacgaaaaagtttgtgatgcagccctcaagcaaatgatcaccatcgtttgacaaaagaagttcagtggtcaaaggaggtctaaacttctccagaggcttcctaagcctgcctaaatcataaaccataccgagattaagaaagaaacaacaaaactcaagtaatccacaagctaaatccctgaaaaattgagctatcagtatcctcaagaatcagctaaatgagcacaacaagcacaatacctaacccagtctgagtatttagcagcagctacatctcgtccacgaccaaccaaagccaaactcgcggcattttctccaacacctaacgggcctaaaggcgagtatgcacctatatgcaaccacacatctagaaaatcccaattgttcccaacatctaacctattcaatttctccacattaccagtaacaagaacagttactgctaattcttctccatagagtctttcactttccttgacaacaacagacttcagggcctcgctcatagagccattgactcgatcgtaaatactcgaaccaggaactggttgattcatccaaaaccgcggtgatgacccagaactgaacaaaagctcgggatttgacttcaaaagaatacgaatcgagctagaaagtctcttcatgtgtctctcccagaacaagaaactagtaccattgtttatcgttctcgtcgttgtataagcacctgtagatagatttctcaaaacttattaatcaaaaagtttcaaacttttgcagtctatttagttttgattgcatacccgtgtgcgattcaaggaaggtagtgaccggaggagcctccaaaacgacaccgttgtggtagagaaatctgcaattcgacatttttgcttctctcttccttgaggaaattagataaaacgggaaaagagaacgtttttaaaaaggaataatccccaaaacgacgccgtttaatagacataattagggtttaagcttctttttttttttttttggtgtatcttcgggatttcaagttgtctcttttatttatttctccgatcatcttttctctgctgaagatagttgagagaagaacctcgaaagatgagatctttattggtttttagaaaaatcccttcacggattcgtcttcgtaacttgagaaacaataaacccttttgttcacagtctcagtttcccaaagaatctgagaatccaagtcaagagcagagactactagtttacggatccacttctgaagaaaacccagttacctccaaagtgagtcttttgtctgcgaagcctgaacagaaggacgatgcatctgtaatcgatgttcttctcaatcgcaggaacaacccagaagctgctcttcgtttctataattgggctagaccatggcgtggaagttttgaagatggtgacgtcttctgggtactcattcatattctggtcagttctcctgagacctatggacgtgcaagtgatttgctcatacggtacgtttctacgagcaatccaactccaatggcaagtgttttggtcagtaaattggtggattcggcgaaatcatttgggtttgaagtcaattcacgagcttttaattacttattgaatgcttattctaaagataggcaaacggatcatgcggtggatatcgtcaaccagatgttggaactagatgtgattccattttttccatatgtgaataggaccttgagtgctttagttcaaaggaattcgttaactgaagctaaggaactctacagtaggatggttgccattggtgttgatggtgataatgtaacaacgcaattgttaatgagagctagtttgagagaagaaaagcctgcggaggctttggaggttttaagtagagctattgagagaggagcagaaccggatagtttactgtatagtcttgctgttcaggcttgttgcaagacgcttgatttggctatggctaatagtttattgagagagatgaaggagaagaagttgtgtgtcccgtcgcaggaaacttatacttctgtgattttggcttctgtgaagcaaggtaatatggatgatgcaattagattgaaggatgagatgttgagtgatgggatatcgatgaatgtagttgctgcgacgagtctgatcacgggacactgcaagaacaatgacttggttagtgctttggttttgtttgataagatggaaaaggaaggcccctctccgaacagcgttactttttcggttctgatagaatggtttcgtaagaacggggaaatggaaaaggcgcttgaattttacaagaaaatggaagtcttaggtcttactccttctgtctttcatgtccacacgataattcaagggtggttgaaaggtcagaaacatgaagaggcactgaaactctttgacgagtcttttgaaaccggtcttgcaaacgtgtttgtatgtaacactatattatcctggttatgcaagcaaggtaagacagacgaagctacagagttattaagcaagatggaaagtagaggtattggaccgaatgtagtttcttacaataacgtgatgcttggccactgcagacagaaaaacatggacttggctcgtattgttttttcaaatatactggaaaagggtctaaagccgaataactacacgtattccattctgattgatggatgtttcaggaatcatgatgaacaaaacgctttggaagtcgtcaatcatatgacttcttccaatattgaagtcaacggggttgtataccaaacaattatcaatggtttatgcaaagttggtcagacatccaaagcaagagaattgttggcaaatatgatcgaagaaaaacggttatgtgttagttgcatgagttacaatagcattatagatggatttttcaaagagggtgaaatggattctgcggttgcagcatacgaagagatgtgtggcaatggtatttctccaaacgtcataacttataccagcttgatgaatgggttatgcaaaaataacagaatggatcaagcattggaaatgagagacgaaatgaagaacaaaggtgtcaaactcgatattccagcctatggtgctcttatcgatgggttctgcaaaaggagtaacatggaaagcgcatctgctctgttctctgaactccttgaagaaggattgaatccaagccaacctatatacaacagcttgatttctggatttcgtaatctgggaaacatggtagcagcccttgatttgtacaagaaaatgttgaaagacggtctacgatgtgatctgggtacatatacaacactgattgatggattgttgaaagatggaaatttgatcctggcctctgagttgtacacagaaatgcaggcggtgggtcttgtccctgatgaaatcatttacacagtaattgtaaacggtcttagcaagaaggggcagtttgtaaaagtggttaagatgtttgaggagatgaagaagaataatgtcactccgaatgtccttatctacaacgcggtgattgccggacattatagagaaggaaatctcgatgaggcttttagacttcacgatgagatgcttgacaagggtattttacccgatggtgctacatttgatattctagttagtgggcaagtcggaaacctccaacctgtacgtgcagcaagtttgtagtctgccaaaaccagaccacattattgactgatgacttagctttggcttttcgtgagaccccgataatatgactgcttaaggtgtgcacttttcattttgcacggttgtagtataaatgttgttattcatgaaagagggagactctatagactttctgtaaagaaactaagaagggccttctgtttttgtcaattttataaaacatagaacgaattcaaaccagaataatttgactctgtattcttatactgagcttctttatttcccaactgaaaccaggttccagtttttcaaggtcttctgaggcatctatgttggtgggtgatgaaaccagtgcactgagtccttattaaactcttcatatgattcttctagcatatcgtctgctcgagtaaggctactccatgtgaactggaacaggaaaacacaaagcccttttgaaatctgccagattcaaaacccagaaaggaacctgcaactgacacagagaataatatccaccggttagcctgcgaggttatagttatcggaaccgttaagttacaagattcggattatctttttatttgtctgtcttttgcctgcttctgagatcaactttgctcataaatgatggttttgggttaatcagtttatagcttggtctaagactcttagttgctactgcccactggtggtgatgtgcttttagcttttttatgtgcaaattcttcgtgatgataaccacgtttggtatataattcgagttgaagttagaacaaacacttccaatatttctcactcattaaggaaagaatcaaattttatccttgtatacaataatcagatagagtaaaaatatatattagttaagagagtgtagaacgatcctatggatcaaaacaattggacatggaggaagaggaacttgtcatgctgataaaagggaatcctgatgatgctgcaactgtcttcagaggtttcatggttgccatgggtaaaaatatcgatgattgcttaccgtataaacccatcgtggaccgattgatacccttatagtaatcgcctgttgtcaactttatactttccgatgatgatgaaattccgagacttagttcaagatcattgtgaccatttcctataaaaatgacaatgttaatggataagttgctcaaatggagagtgctaaaaattttatgaaaaggttagctagcttccttgatcagatttaaagtatatgtaaaatttgtggttagtgttatatatagattggcaatgttcacttaaatttatcaaccatgccttataataaacttagttacattctgagtcacaccatattaatcaattacctttgatatgggcaccaaacttcatggctccttctccctttcccaactcattgtattttattgctgctgcatcccatcccctacgaattttgcacatacgtataaacatttctaagtttattcacagcataacactaactcttgtttcattttttttttttaacaatggtattctgtgaagcatttacaacgaaacataaaaggtaaacttaagaaaccatcatccccgacagtatcaaactcttgaaacggacgatggtttcaagcttgcacctaaatggaaacaaacgtaacgttggcttggtatagtttgagggggatatataagtaaaagtatttgaaaattgccattcacttagaaaattaaatttgagtagaaaattttgtaccttcacgaagttttttttttttttttactacttagttttgattaattgtatatatatggactaattgatgtatatatgattgaactggataaaagttattctttcttttagtagtatataaaaataaatattattaattagctagctagtttataactttttttcagcaaactttaaaattgtgtaagacgacaataacttttccaaaaagtgaaggttaggctttgaatggtaaagcactagctagatgaatagatagaataaaaataaattgaatataggtgaaatatagttaagataagtgacggatttataatattgtcatccatgatccgccaagtgaaatgtattttccatgatgtagattgtgtaaatagtaaaattaggccatttcatcaaaaagtagggaatatttcaaccatattttattcatactaataagactaactatttgcactttaaacttgtcaaaagattacgtgtctaacaaaatggtacctgttttggaagagatgaatctgatcatgagttttgaattgggtgcatttttgaagagccaagcctttgtatttggaacttcctcttccgaaactcgcactctctcgcctaagtgtttgcacgaactccaccttatttaaattcttcatctatacataaattgataattttaaagatccacatgtattatttcgaactatacagggaaatgaatcatcttcataacgtaatatatatatatatatatatatatatatatatatatatatatatatgtttaaccttatcgatgtcatgcctataatcatccacgacgaaattgatgtctgcatcgagaccacggaatttgatagcagctcggtcgtaagccctggtattcatttatgaataagtcaaattgatattaattatttattgtcttcaacaaactctaatgtgtatatgttgacaaaattaaaacatattcaaatgacgaatgttgtaacaaataatgtgtatatatatatatattttaccttgctgctgcgtaagcagtatcaaacccgcctgttaaaacgaaaattaagtcaaggaaaaaaagttagattaatacaaataatcaacttgtgttcacttaaacgtgaaagacagaagtaacaaacataggtaaatgagctgtaatagtctattatgtttttttgtctttttacaaaaaaaaaacatacatcctttaaaaaaaaaagaatagaggtagttgacaaaaaataaacttttttaacagacgttgtcagagaagatctacaaatcaaaattatcacaaaaatacgattgttttaaaattcatcgtttatgcctaaaaatagacacacacgtaattaaagatgacccaataattaaataaaaatctgatctacttacccaaataaacttgctttccacaatccctacaaattaatcaattccaaacccaaaattagagataaatatagcaataattcaacaaataacaatataaaaatgcaatgataatattaaaaatgaaatataatttgatttaccaaatatgagattcccaacgaccggtgcgacggtaaaaagtgacgccacgatattgggagctacgagaccttggtcctcttctgctcttcttcaccattttctgtgtatttctttgtaaagaagaaagattcaaccagtgactgtcttccacggagaattctatattccgacgagcatcagccaccaccggaaagagatctcctgtttctttatgaggaggaggaggaggaggaggaacaaggtcatcgtcgcgtttgagaattccaaaagcgatgaaagcatctctcgctgcagagtctgttgtggaggaggaagatgagttagattcttcttcaccggtggttgagatcattaatggtactttccgatcttgatcttcgttataagaagaaaagatctttaggttaagatccaacatgatcgaatctttagctataaacgacgttgttcttttttccggcgagagagagagggagagagaaaaaagagagaggataagtgtcaaaaacgagagagagagagagttctaaaagagggaagaaaaaaaagaacgtgggacgtgttcactgtgaaggttgcattggatacacttgccctttatttgccttttcaactctttttttttatatataaaattgatttctataattatatgattgtacttgccttgccgatgtatcgaataaacatattttgtactatatattagttttcatttttgttaattaaatatgggagagccgtagatagggttgtacgatgagtttttatatattaacacttttgatgttgtaaactcaaccgcgttaatacgatgtaataacaaaaacaaaagttttctcttccttttaagtgaagtcgacctgtaattttaaaatagtaaacaaaactaatgccatcaaataggtgaggagagtaaagtataaagatactagcttatactattacttatgttctttagccttctacttggtaaagagacctcgtgaatataatatgatagattatttttccctcgtaaaatacagctacttgatttatctaatgatacatcttttgatcaagtcatcgacaagtttaacaaaatagataacatcataaagagtttaagaatttttttttaatgttgttttagtattaagatcaaaaccaaaagtcaaaccttaaaggacgtattatattgtgattggttgaagagtaagtagtttttaatttctatgcattatatcaaaaaacaagcgttattacttttatttttcaaaccaaagcattctaatttgatatagtttaatgccgaagaaatttgttaatgcatgctcgaatgtggaattgtctgtaagattataaatttgttcttaattgacaagtgtacgttattaggcctagtgtgaccacaaacaaaatataattgaaaataagatagccccatcaattataaaagtactaaaaagtcaatatctgaaattttcaacaacctaaatctagcaatattaggaatttgccgacttttacaaattttcaatttatccttaattagcaacagattatatagcgattatcgatgcgattatgtttgttattggtaacacaatttctcagcaaaatttagaattttgaggaataatgagccgttgttgtcaatttttttttattttaaatgttatttcttaatcattacttatttttatccttccttacataaaatgacctaaatatctttgattttcggaaaacgtaagttaatgatgagaatgaatagtagatgggtaaaatccaataaataatttttttattttttttggtaaggataaataaatttttatattatatctgaatttgtaatttcttctaacatgttagtaaattatacgattaaaaaagaaaatatgaaacacaattcaacatagttatttcacattttaaagcattcaacaacaaaattaaccggttaacatcgtctactctctgcattttagtaataaaattaggtcattatttttcgataaaattcattaaatttggcatttagcgacaacaattattgataggtccctcgtgtgattccaacgtgtcaagatatgaaaaaaaatctaacggtcagggattttttggtacttcgcgtcgcaatggtatcttctcaacgtgttaaataaacccacatgtgattttgtttctctatgcgtcatttaacgaatcaggacaatcctttctctatctttttttctttttcttttctttattttgccaaaggacaacccttttccatttaaattaaagattacgatatatggataaaacatagcaacgaaaaattagagagaccgacagattttttttgttagttttatattatattttatttatcacacattttagaagaaattaaacctagttgttgtgctttcgcatcccaatatacataaatcacaatcaactgagatttcgtaagagttgatttaggttatggtttaatctataagaaggagataccatttgcatttcatctttatactgaaatattggtgaagaaaaggagtttcaaatggactgtcataaatttaaataaaccatttaaaatattttaactatccttctttaacacattcatcctcaagccttttttttcttcttctttatcactagtgggatggatcttcaattccaaattattggaggaacaagaaagatgataatctagaccacaacataaactatacaataaaatgataaatgtgttatagtcaatgaataaagaataagagagatggtgtgatgtttacacgtttggggcctaaaccaaaaaaaaaggatgggtccaatatgccaactactactattgtattgagagtaggaagagagagaaaccttaatggagacagagggacagtggggttatgtcaattgtcatattattcaaccactcaccaatcactcactccaaatctatatctctctttttacaaataattatgatagatttgatgataagttggttctcaaatcccagccgttcaatttatccagatatgcaagaaaatattagattttaaggaatcggcctttccttatttggtaagactaaatatctctgttcattctagttccaataggtaaaagagtaaccttttttcttacattattaataacttgcattgcacaataacgtattaccctataattcacaatgataatgtgttttgaagtcatctacacacttcaaagtttattactcaatcgaaaattgaaatattgtctaccactcaaatttcttgaaatggttaaaatacttgaacgtgtactatatgcaaaaatctctgatatttaactgctttgaaatttttatcagaatattactagtgatgggtcaatttctttgttaaccttgtgctttatgcacttatgtttatagtctctattttctacacctaaacaacacaatctatttgtaggttgcaactcggacccaaattttttgctaaattttttgttgaagtcttatattaagctaggattgtgacttaaaatatgaataaaactcatattgttggcttaaaaaacgaattaggatgtttgtatttagtaggaacatagtgttatgaaaccacatctgataaacacatgattttaaagtgttttaaaaactattctagcttcaaaaccagtttctcattcatcccgaatctttttttccatcacatatatagtaaattcatgatagaattttaatttaacctaaatatatatagttcatagttggttatgttcaatcgattagaagggttctgttggatccgaattcgagacctaggaactacaccatgatacatttggggaaaatatgatatacgttagtaggtcaaacacaaatattatctaagattagcctccggccagaaaattatggactttgtatgtgagggagattgagaagcgattgctaagattaataaatatggggcttgttggtagagtagatctataaaaggggtgatagagaaacgagtggaaacgcatgaagcacgttataaaattgaataattgaagattcaaccatattctttgataattggtgggcatttttattttattatttgttgtcaaatctctatataaagaaaaaaaattgttttaacgttttcggtttaatgtttgacgcatatatgtgggaacagttttgggcgacgtggtagcttcccctcctcgtttcccccaaaagccaatgcttaaaatgacgagaataccctctccaaaaaaccatgtgctcctaagtcctgaactagttctgattcttttcttttagctatatagggaagtgagacttgcgagggtgagtatgtgacatcaaaatggaaaacactaagctacataaccgttggactaaaatggtaataaaaagaagcagaacagaagtaggtgaataaaactgagaatggaaacaagaaacaactgaagaaatcggatttatatacgtttttgatcatattctttggttcaaactctataaataagtttcttggcttctttcttataagaagaatcgactacactttaagttaaaagaccacaagcaatacacagttacaagaagaaagaaaagtagttccaagtactctctctactttaagttataagatcacaagcaatacatagtatttaataattaacacaagagtcgagcttggactttcttctttcttgggccttcttctattccgattcatcccattgacaaacccaaagcgttggatactcaaatgctcattcgtaaacacgtatcctcattagctttttctttcccattttgcttgaatgtaactaattaatttggttttttttttaattagtaagtgtagtatgtcaatattgtacaactagatgatactgatccattagagtaacactaaagttaccaaagtttcatacaactccaacgacaagcaaggttaggcctttccatccaatattataatctaagaaggagcgattgcccttgatctgacccaacttgcgagtggaaaatctaatgcttatttgttcattcgttttctgagattctatatcaaataatagtcagtcatcactagaaaatgctcaaacaactaatatgattcatacacatttcatatcatatgcttggcaatattggaccgaacttcatgatttttctgtccatgaatgcaaatgtgttgtgatctctgagttacatctcaaaatgtgaacttgacatcatattctcgttcaaaaaaggaagataagacaaaacatttaagaaacatttcacaatcatagggggcaaaagatcaaaatttaaaatttcggacgagagtggaaactatcaatctttaaggggatgatttggcaaaagtgttgtttttatttttcttttactgttttcgttttatcatctttcaacgtctttctctcccgacggccaaaaaccccaattttgccaaatccaattttacacccagaaaccctaattttccttactttgatttgattttgtgatggacgattatacaagagagatgatggatctcaagactttggtcactcgaaccctagagaagaaaggtgtcctcgctaagatccgggtaaattccctctacttctctaccatacattattcgcagaaatttttgagtggaaatgagaacagagaagtgattcgtttgaaatacatacattactctttttctagggttcctgctattcagatcgaaatgctcgatattgttaattgcctatgcatctggaatcttgctgatagtttatttgtgtttgtaggctgagctccgtgcaagtgtgtttgaagcaattgaagaagaggatagagtgatagagaacaatgaaggaccgcctccagctctgttgggaagctgtaatgatcgtgcaaggaagcttcatgcttctccttcaggttttttcttcacaagtttttgcttttatccttttaaatctttcctctatgaatggtttggttctaaatggcatctcttggtttgaaatttttgttgaaatgcaggaaggttactatctgcgttgatttgtgaatacttggactgggcacaacttaatcacacgctcatagtttatcaacctgaaagcaatttggtaatcaatataatcccgttttcttttgctatgtttcattaagaagattgttgatgaatttttctcactaatctggtgaactcctgcaaaacctattcaaagccaaaagattcgtggaagtctgagttacgcgactttaatagcaacaatggttttgagctcaatagaaatggagatagtggaccactccttctcgatgttcttgaagggttcttgaagtttgaggtatttctttctttttttcccctgaagatgtttgcagccaagtgtgaaacagaactttactatctataacttcttctcttagtttacaatctttacaaccatactctaaacaaattacaatagtccacctgtagtatgtgtgatttatgagttgtagtgttaacagttcctattatgtaagtgaagatgatcaatactttacacccaagctttacaaacaccaacttacataaaatcttggtactctgtcctcgcaaccaagagaagaagttatagatagtaaaattcagttttccaagaaaaataaagtctcttagtagagattagagttcttcagagatttgaaaaacacgtttagcaaatttcctagcctcaagttctcttcacatctaagaatcatgtttccatcctatcatagttaaaaccattatcatctgtttttgccgtatgctcctcagatgtagtgatcaacttttttttgtaatgaattttttcttcagagcatgacgcagggcatgggtagtagttcaaggagagattcagaaacagagtcgtcatcaagccttgagtccagaaatcctcctcgcagatcatctgcttctgatagcttacctcctcaacgaaggtacacatatcttcaacttcttattattatgccaaatcaaagatcgttactcttcgacatgattgctttatttaccttcaaataaatgggcaggccggtttctgcatctcaagcatcgggtgagtcatcatttccctagtttcttgaagtattggttgaaatacgtatgcttcattattttttgataccaaataaatatgacaagatgttacagatagaagagccgggttgtctacatctgggtacagaaaagatgaattcaactggagacaaggtaaccaagatacacatgaagaggtaacaagagcttcagcggcgctggaaaatctacagcttgataggaaaactcggaacttaacatcgtcttggaggtaagctttcaaggaagtctcattgaatcccacattgaaatgaaaacaaagcaagttgtggtaaatctgatccatcgggcttgcttgtgttgtaggaatgtgagggatggaacaaatgaagaagaagggagagattgatttaggctttggataaacatttcagcttctggattagtagagtaatggtttgtgtacgtgatatatgtatgtttctcctttatttgcaactgcgttttcaattagccttttttttaacgcacgaacctctgtctccttgagaacaaaaaacatgaaacagtaaaatgttttcttttgagatttgttatgggaagagaagagttcagaaagaagaatcaaagaaagcacaatgtggttgaatattttcattcacttgcttcttattttagtgtctccaaaattattatgtctctagtaataaacaaggtttttgaatgatgtgttcactgtttgttttactcgtactttttttttgttttccctttagtcttctctctctctctcgcttcttcgtttaaaactttaaactaaagtatcgaagaagccaactctggatgacgcaaaagcttctctcagaacggcattgtagaattctccggtgaccaaataatccgattgcattagtagggaatctgttattttgatctgatccgtcaaattggcggtaagaacaatggacgattatacaagagagatgatggatctcaagaccttagtcactcgaaccctagagaagaaaggtgttctcgctaagatccgggtatatttgtttttctcttgccacgattcctctggttctgtgacatacttcattcaaattccgtagagagatttgagtacagagaagaagagaaaacatacattgcttttctagggttcgtgcttccagatctactttatgcatctggaatcatgtgaattcccagtttttgtcgtactttgaaattgagtctgtgaaaaaattgtaccttctcagctgaattggattctttaacatttggtttggagattgaagatttgtttttttttctctatattcttctgctgaaattttagttgtttctgtaggctgaactccgtgcaagtgtgtttgaggcaatcgaagaagaggatagagtgatagagaacaatgaaggactgcctccagctttgttgggaagctgcaatgatcgtgcaaggcagcttcatgcttctccttcaggtctttctcaatttttatccttcatatcttctcttcacttttacccttcagagaccttttctctttgaatggtatggttctaaatggcatgtcttggtttggaaatgctttcttgatacttagatatattcgcttgttcgaaatgtgtctccttgtttttttcgggtgaaactttgcttgcttctattcttaggcgatatgaacattgagattttgtgtagttgagtaggtcatcttgatcactttataaaatgttaaaatgcaggcaggttgctatctgcattgatttgtgaatatttggactgggcgcaattaaatcacacgcttaaagtttatcaaccagaatgcaattcggtaatcaatatatttcattttctttgaacttctgatatttcttttaagtacgttgaagatgaactttctaactgatgctgtgatccctgaaaacctatgcaaaggcaaaagattcttggaagtctgagatacgtgactttagtatcaacaatggttatgagctcaacagaaatgaagatagtagaccgcttcttctggatgttcttgaaggattcttgaagttcgaggtatttcttctgctttctctctgaagatgtttacacatacagtatagcttttttttttttctctgtttacaagctttacaaccatatttgttacacattacaatagtccagctatggtacatgatttcagggcgttaatgtttacagttcctctattctctaagtgaagatgaccaatacctgttggttacatcgaagctttacaattaccaaattagttcaaatcttgttacattgtgctcacgacctcacattttttccaagtaaataaagtgtcttactcaagaaaagaatttttcagagctttgaataagttcggtgaattccaagcctacaattcttgtcacacccagggattatgtttccatcctcttgtagtaaaaccattataatttgtctgctgtattcacctcatatttagtgatcaacatttttcttcagaacatgacgcaggtcatgggtggtagttcaaggagagagtcagaaaccgagtcgtcattaagccttgacaccagaaatcctcctcgcagatcatctgcttctgatagcttacctcatcaacgacggtaaatccaactccatgttctaccaaatcaacgatctttaatcttccatgttgcttatgagtctgacatgcttaattaatgggcaggtcggtttctgcatctcaagcatcgggagccgctacctcagggtacagaaaagacgagagcaattggagatatgacactgaagatatgccggaagaagtcatgagagcctcaacagcacttgaaaatcttcagctagacaggaaaactcggaacctaacatcgtcttggaggtaacttggagcgtcatggctcttaccttacaagtcggatagaactgaaaaataatctaatccattggttttggttgtggttcaggaatgtgaaggatggaacaagtgaagaagaagaagggaaagattgataaggctttcgttaaaatccagcttgtgaattagtatctctacatatatatgtgtgtttcttttttcatgtatggttttaaatgttgcaactttgtttcttaagtttttcgtttgtcgtgtttgagaaatccgattggaagtaaagattattgatataagatgtcaactacaattaagccgttaacacaaactcaaaaactttcataaaaattctcaaatattagtgtcattaaaaaagcattgttaatctgaggactgtatacattccaaagaattatcatttcccaaatttatttaaaataattttatgatatctaatcctaaatctttttgttgaggaaaaaaaacaaaaaaacaagtaaaccttgtttaggtttattagggttttaaaagtatttatatttgttttctgctgcagcagactcaaaaagctaagtaaactactcaagtccctcccttttccggcgtcgctattctcagtctcattctgtctcccgtaagtcctaactaagctttctctcttcagtcttcagcctccgcccgttattgttgacaagttttagcctttttgttaattactactttactactcttgttgtgaatttgctgctactgttgaagccatggaagctcggattttgcagtcttcttcttcctgttattcgtctctttacgctgtcaatcgatcccggttctcttctgtgtcatctccgaaacctttctccgtcagctttgctcagacgacgagaacaaggactcgtgtattatccatgtcgaagaaagatggtcgcactgataaagatgatgacactgatagtctcaattacaaagattctggtgttgatatcgatgctggtgctgagcttgttaaacgaatcgcaaagatggctcctggaattggtggatttggtggtctctttccattaggtatatatatatatatggaaaactgcaaaattttcacctgaatgttgaaacttttggtcttctaatgaatgagtgtgtgtgagcaggtgatagttatcttgtagctggtacggatggtgtagggactaaattgaaattggcatttgaaactggaattcatgacaccattggaatcgacttggtatagcaaattctcttttgtgtgttttgtgatactagcccataaactcatggtttagcttattgttataggttgctatgagtgtgaatgatattattacttctggtgcaaagcctctgtttttccttgattactttgctactagtcgtcttgatgtagaccttgctgaaaaggtaccattgcttcatcatctctttccccttttgaatttgagattgctttaaggacttgatattgatgtatgctttgttgtcaggtcattaaagggattgttgaaggttgtcggcaatcggaatgtgctctcttagggggagaggtatgtgttacggttttgacaatgtagtttacgcatctttccatgattgtgtatcaatttggttttgttttgttttttttagactgcagagatgcctgacttttatgcagagggcgagtacgatctaagtgggtttgcagtaggcatagtaaagaaaacttcagttatcaacggaaaaaacattgtggccggtgatgttcttattggcctcccgtctagtggtgttcattccaatggtttttctctagtaagaaggtaaagagttagcgatagtcgaggttttaagcttctgatttcatggcttttaaccacattccaattgttgcagggtattggctcgaagcaatctttcgctgaaggatgcgcttccaggtggatcaagtacccttggtgatgctctaatggcacccactgtcatttacgtgaaacaggttggttttcttgtcaacaaatattcattccatcatcacatttgtaacaactctatgactttctctctctctgttattcgaaggtacttgatatgatagaaaaaggaggagtgaaaggtttagctcatatcacaggcggaggtttcacagacaacattccccgagtcttcccggacggtttgggtgctgttattcacaccgatgcttgggaacttccaccgttgttcaagtggattcaacaggtaatgaatgaggagagaatcataaacagaacgattacgtttatacttctagaatgtttgattgttttttggtttattgtatagactgggagaatagaagacagtgagatgagaaggacgtttaacctggggatagggatggttatggtggttagtccagaggcagcttcacgaatactagaagaagtcaagaatggagactatgttgcgtatcgcgtaggagaggttgtcaacggtgaaggcgtaagctatcagtagagtgttgtgtgttcttttttcttctgtgtttttttaagttttcgtttcccaccgtttttaagaattaatccatttgtctacggttttatgaggttacaatcgagatgaggcattttttaagacgtcgtgttattatttgatctaattttttaaaaacaaccaatgtgattggtctggtttattctctttgtcgcacaaacagatgttgaaagatattctcgttctaattatataaaatttaaacatgttgtttgcctagatggtatgggttaagaagctaattgtcaagaaaaaacaaatgttgtaggaagaattcttcataaaattcatatattataaaactgagggtatccaagagaatcatttacttactagcttagagattaatgaactatatacaccatttatgtcttgtatgtatcccatcaccttaaaatgaatatatttatagcagcataccacaaacaaacaaatgaatgtatttaaaagttctcccaaaattcaatccggaattatgaaaaaagggtgactgagagaactgagaagctattgagactacacgtaggacgatttagctactacgatttgaagatggaagtggaaaagagagcttcaaggttgattatacctaggaaatgtcttggaccttagtttccgttggttcagagttagtctcttttgcctctgttgatgattgcttctcgtcattaacatgctccggagatttttcaggtgttgtgttctgcaaattgcgggtcagtttgtatacataactaggagaaactatttggttttaaagacaattttgaggtgtttcttgggtgaagccgtctctatatatgttttgtgtaagaagaagatttaccttgttcttgtcgcgccaccctagtccaaatggccgtgctagcaaactgatcctgcttggaggaggttctggtgacgaatcttggttaacttgcctggaaggttaaaaaaatatgtatatatatacccaattcagaatacacaagggtgggtcattagtcataacccaattgagtgtttatagttgtgtacacaatttatgttttgagttgactcaggtaaaaagaacacaccgtggtgaaggttgtgctttgagttggccagattgatactgcaaagttgcctcgagcatggactctgccatcactgctctcttctccatttcagccagtgcagcaacagcttcctcgtatttttcctagaccagttatcatattcgttacagaaacgatctaagatagaacaggagaatacaaaaaaaggaaaaggatataaagttgcattcaaatcacgcagctctgaaatacagacaagggttaatacaggatttacagagattatggtcctaaactaatgtgtaactctactccatggaaggcgagtaacgacctataacaagaggcagttaaagctcttttaaacttaatagcctagccacatctgtgttaggagtcagatcaaactttttacctgcaagacttgagcagcatatctctgcgcttctgcatcctgctcagcaaatattcgtgcatcttctgttaccttctgttcttgctccacccgcatcaagaccttcatacatatcaattaatctcagaatctttctcagtcacaaacgaaaaaagaagaagaacagattgatcatgcatatgcaaacctgtagcattgcaccttcttgttcctgcttatcagagaggagtctctgaacttcggccatttcttgctctaactgttcgacctgaagttcacattcatgacaagtagcatttcacatctcaagactatctcaaaactaacttagcaccaatgagccttcaaattggatcagcacagagatgcgtgacgaggaaccagcaggagaagaaaagagagagaaaggaaagtaatgatggtaaaagtgacatagaaaatagtcttcgtattcagaacataaataaagagacaagtaacataatgcgagcttataggcttatttggaaaattaactgtcaagtggcaagcttcattggaataccttggcactcaattgacgccgattgtcttcctttactatctccatgagagcaatctccaattcttcagctctaccacaaaatcagaagtttgggagacattacatattgaggtatgataaggaaagatataaaacttctaccatttagtgccagttttaggttgagaaaagaaactaacctaagtagagctgatcgtttctcctcaagcaacttgcagagttcagccttcaaccacagaacctgaaaaagttgtcagtcaactttcagagggggtttcatgactgtaggtatcaagtgattttttctaccgttcaccagacataatcatccaccattcaagcgtactaagggcgtagaggagtatcttcaagccaacaagaaggacaaaaattacctgcgcttgaagatcttgaacagaatctacctccccatccccagttaggctaaccaacacttcatctgcattacttgatcctgactcagatcgagacaaactcccatttgacaatgaggctttgctatccaccaaaacagattttgggtcttgcttaaaattatataatttggaggcaagtcccttagaatctctccacgcttgaagcccctttgacctttcctcaagtgcagcgatcacagctggcctatgcttgcttcgcaattcttgcaatctaatttcatgtacattttggtaacccatgcaagcagttaaaactagctggctgctatcaaatgttgatccagtcagtgattgtagcaaagtaacagcgtctccagcatccttcgtagtaactaatgcaggacctgaagtgaattaaaccataagttagagcagtctcgatgatgacgccactgcgttcagaaggtccacaaaccatctcacttaaattgaaagaccagcagtttcaatcaagtaccatatagttccatcaatgcgagtgctgttctgaaaagcataacacgagttccttcaaagagaagcacatcccagactctaagaactgtgatcaagaagacgaacatttagaaagaaaatgggttctcagtcccaaatctcaaagagaaagatgatcaaattttaacagattgccagcataatttactagttactcaattctatttcaaacaagacagctttaattccaatgtttaaaacctgaccactttcccatggaagcatattcatgaagatggaaagaaaccatggccctgtaacccaagccacttgcactccaagataatccagatgatgaactgtagacatagaaaagttgcagagcttagtactaactgtgaacattctacaagatgaaacaaaaaactttgagggaactcacccaatttaggaaatctttctcgaactaactcctccagaactagttgatcaacctaaaatatgaaggtacatgttgtcatgatgctatcaccagtcagcccaaaatttttgcaaatgtatagaaaggcaactaatattatcacctgagactctatcatttcttctgaataataaccattgaagtagtcatcaatgagtcctatcagtgccctaaaaatcacaagtatttaattagaaggggcatcagtttagaaagaaaaaaggagaagatataaggatgcttaataacagtttgatcaaccatgagaatatgaaagtgatagatattaaaactaaacacagagcaaggagttcatgtttagacagaaaaataagattaggaatgaaaaaagtagattaatcaaacaacattggttaaattagaaataaggatacagagaatgacccaagaacagttaatgtttggaagaaggaaggcgatataacacaaactaaacagtaaacacagatcaaaagagttcgattttcacaggaaataatattaggacttggagatgataaattcatcaaatttgtgaacataccaaaaggcattttcttctggcatcaaaagcaataaaagcgcagcaaagaaattcatagcctgcagaaagtatattgacaaaagatattaacttgatattaatgttaatttactatgtctcggtactaaaatagaggtactacaataaagatcatgatattggttaagaacaaatacctgacagtatcctacagaaggattatgcctagcataagcagtaagcaaacgccgtagagcatttctaccatcatcatctagagcaggatgaccaggaaatgtccgaggtaagtcctgtactttaaacaagcaacggcataagaatcctgatcaacttcagcataagccacgctgcatcactacatagagagggtcaaggctgaataaattttgagtactaccttttctatctgtcctttccatttttccacaacagcaatagattctgtacttgaacctttatcatcaacatgctgcatatcctcttgctctatggtgtttacagaaccatctgctgcaagaaggttttgataataatccttgcatcgtcgtttcctcacgcccacgaatgcttgccataactgaaatgttattgataaatgtgacgattataattgagcaagagctaagactaacgaactatagtatggagagctagagcatgatatcacataggaatgtaaacatgagaagatttattacctctcccctcagagccataggtacaccgccgcgaatcagcacttcaagttcttccttccaaggacatgtagacagtggacttgcatcagcagcaacagggataccagagacacctgtaccatctgaagaagaaccatcctgaacatcggacctctcaacatcatagaactcgtcttcagaatcaatatcagatgctcccttggaagatttggcatcatcaaatgaaggtgaaatcttcaccttcggagcctcttgctcgctttttgataaatcccccttcttcttgacacggatgctcatcaagtcttcaattgatcgtaaagacggtctgatctcagtccataattgcactctgtgaacattcttctctgcatcggggtgtccttcttcttcactggcattatcaggagttacatcagaacctaacttgtcagtatgcagatcttcaccaggccccttgtttaattctttttctttttccttctcactttcactaaacggtgcgtgaatattttcagaagatccgtttgtaggtaactcagtcgattcaacatgatcttccaagaaactgctccacctgtccgacctttcttcttcttcttcctaattgaaagcaaagagtgacatcacaagtttagggacttaatcaggaaataatgatgggatcaatttctaccattccaagaaccaaaaagaacttattataagctatagtttagtctagttttgatatctttcacacaggatttccctatgactacgattctaaatggaatcaggattctcacaatatcacaacggtcataaccaaattagagggaaatcaagctgttccaatgaatcatgcggatgaaaaatctgagtagaaaaagtgagatttatggataaagaaccttgtaaatatcagcatattctctgtatctctgcacatgttgaggtctgacaggaaatccgtatgcatccctgttgacaaagaaaaaaggcgatatgagttcccacgatatattaaaagcccatccagagctcagacgaaaccttactatatccaatgacaaaattgcatctctcatcagtttgttttcaagaaattgaacaacagaaacaactcgaatttgctatcaaagactaccttcactaacgattatgccacattgagaacaatagtcaccactggacaaaaatcagcattcaaatccaaatcactaggatgtacttcaaatcaagaccaataatcatcaaaatcccaactaaattgttaagaaaatgcaaaattacgctaacaacaagacggattaaaactctcgtaatcggagatacaacatttcgctcagcgagtctagcaaaaagctaaagagagaagaagcgcaagttcaaaccaaaaaagaggaagcagaaatgtacaggggaaagggggaaaaacgcgaaacctcttgtgctcaaaggcgacgagaggattagaaggcttagaagcagcagcagcagcagcggcggcggcggcaacgctcctcattcgttagcgtgaaaaagagatctaaccggtgaagagttggtgagaggacgaagaagaagatccaaatctctacgctagttcatcattacccgaatgaagttgaagcaggaggaggaagttgcagtagagagagagaggaagtggagaaatcacatggaaagggcgagattgtcgaccaaggtttattacatgtgtgactctctctctctctctctctctctctctctctctctattttgactgcgtttcgattccttgacactgagtccaaaaggtctctttcatctttctctcatttttgtatatcttttttactcctatctttttaactacttactgattttgtatgtaaatgtgaatttcacagttgtcttccaatattttgctatgtcaattttatcttcagataatttgattgagttaattatcttatttgtaagaccaaaatgacaatttgatgaaagaaaaatcatatccttatatctaatttttgtgtggttgtgcgagtctatatcaacctactttgaaagatagacaaagttgttattagatatgggattaaggacatctacgtcatgtatcatccttataagattcagtttaaagtacgaacgttattaatttgatgtatgtgtaacaagcgtgaacgtatggtttaccataccgtattcaatttgtagcgcgaccatggttggtctttaattattaacctcaaatagtcgaacttcaaaaaaaaactaaacacatttaccaaaatctttgattgatgagattcatttttaaccctaaaaagatagatatgcaagaaaataattgtggggattgtaatggttgtcgatttgtcggtaaaggaccaattgctttaggagttggtaaaggacttttctagggaattaaatatgtctttaatttttttttatttttttttaataagtttttcttagattcgctaaatccataatctaagtattcaccatattaaatttaatcaagtgggaaatttctatcatatattaattagaattcttattttagttactaattgtttgactctaatagaactttcatatatgtagttaatagtctcactcttttttcctttcaatcacacttggcaaacttaagagaggtttacataattgtgttaagagttttaggtgcaaaatcaatagaagatgaaacaaatatgaaaatccagatttgagaaattatgaagaatatccaccaatggctagttgaatatatacacagttataactttagtcaattcaatggtttaaatattataatctactatttcgtgtactgtatatttatttacctatatacgtacgtgtataatttggagttttgtttaggggctagtaaggagcttaaattcttgtttctataatactctcacgttctcaaacacttgtttacaaaaccaaatattcgtcggtttgggtaaaccaacacaaatgattatatggttgttcattatcacaatgattatcttccaaatgtgcaccaagtttttgttagtgttttagattcaatcatggaagtatggaaccacaaacgtacgtaagaggaagagtgcagcacataatagaaaagagcaatggccaaagaaggcattacaacgaaatgagacttgggatttgacacacatcaactcatgcaaaaggttgtaggtagcgaatgggtgttgaagattaactatcaaagtgatgactccatcgaacaatataagttgagattagtagctatatgatatattttttttggtgggaagtagctatatgatattgattcatgcaaacatacaacgaagatattagttttacatttttaacaaatatataaaatcaaaatcagctaagaattaaagagaaggcccaaaacgtgccatttgcttcattatcaatcgtccatatcaatccaaagtcgacgattatcggcgcacgttacgcacccggctcgcttattttcatagttagcgcacgttagcatctctcccaagctgcattattattggccgttgtgtgactcccataaaggcttagggttccggattcaggtcggtgtcgccaccgcccttcttcgtgcttctcttccttctttgtcggatcgtcaggtttacagatcagctcttgtggaggatatgggtgaagaagacaccgcgacggtggatcagaacagtttcggtggtggcaaagattcattgcttcgtaatcgtcattcgtcgccattgccttcaccgacacagctttcttctaaagtgattacattgcctaccgtattaacccttggccgtgtagctgccgttccgattctcgtcgccagtaagtttacttttttcgactctgaattctggttggagtcattgtacttgttcggtgtgtgataggagtctaatcatcagatctaaacgaagatgcaattgcgatttttccagatcagagttttgttggtttgaattcgagaaattcgacaacttttttgaaattgagcttattgctatgtgtacttcacttgttaccactcttcaaatttaatctgaattggatcttttgatgttcaattcctgattttgattgttttatctcccattgcattatcttcatcatctcctttggtttttgaaatgtagccttttacgttgattgctggtggggaagaactgctacgacaagtattttcattgcagcagccattacagattggcttgatggatatattgcacggaaggtaacttctttctttaccctttcatgttcttctgcatagttgaaattgtaagcttttaacagtgagacgtgccttttcagatgagattgggttctgaatttggtgcatttttggatccagtggcagataaggtcagataccttcttccttagctacctctatcctctttatcttttctccaccagaaaggaatgatttttatcattctgatttatgtcattggtatgcgcttatggtagcagctacattgatattgttgtgcactaaaccaatggtcgccgttgtcttaggaccagttccatggttagtgacagtaccttcaatcgccatcattggtagagaggtaagatacagaattctgatataccgttaagtaagtttcacttatcagctttctgttctaaactagtcggtatacttttcactgtagattactatgtctgcagtaagagaatgggctgcatctcaaaacggcaagctttcagaggtaaagttatcaccatcatgtgcgttctcttggatctgttttcgtaagtgttcctttcctaatccatggaaatggcattgatgttgctaggctgttgctgtaaatagcttgggaaagtggaaaactgcaacgcagatgatagcgctaaccatacttcttgcaagccgggatagcagttttgagagactattaccgtcgggtattgggttgctctatgtatctgcagggctctctatatggtctttagttgtttatatgaggaagatatggagagtactgctaaagaagtagcaacaaaaaactcttttttcgggctttttgcattcagtatatacacatagaatggaagatttacctctcttcttcttgaagaaagctgactaatttctctctggatacaaatgaaattagttgggcaagcactataagactcttatatgatgctttagttctgttttcaactttgggcactggggtcgtactctacttggtttggttttgtataatatctctgaatcacattgctccggctagcaccgaattttaatgaagcagcaagcacgatcttatgggcaatgatggaaaagcagcaggcgcaatttcgttctagtcgaagacttggtctcatgaattctgatataaatgaaaacaattgttgcatgtcatgtagatgcttttaccgatacaatataatttatatatataaaaaactttggttacaatatctcttcccatttgatccttctaaacccttgtaaatggagatatccggagaaccatctggttagagacgtgcttctgcttggactcgtctcttgtatctttcaacaagctcttgtggatcttgacgggtttcggtgtaagcttcgattttgttcatctcctgcataaaagcaaagaaccagagattagcatgtgtatggggaatatttagccttagaatgaaaggtagttacaaatgtctaggtaatagcttaacctgaatccaaagggcaaggttaggccgaccagatgtaatatcgacgttcatcacatcacttaagataagccgaaatctctctatgaaaggagcatatgcaacatcaacctatagaaataaacaccattttttttctcagcagcaagagttgatatgggtatggcaaattgaatatagaaatataatcgacaataccaaactaaattgaccaagaaagaaaggcccttcattgaatttggaaagagcctgctcgatgtaatcaaatgcaacatctgaaaaaatgaaagacaagattcatacacatgccaacataatgtatctgcaaacacagaagtaagataacaacttcatcttctaatcacctgctgcattagtgtcagtgccgtttaatgtggatcttacagccttggagaaggagtcagtgtaagagagtaactcatcagctacaacttgcttctctaaaccctgttattattccatccatggatatctctcttctaagtataggttcacttaatgtgttaaaattgagctcaataaatcaaagatgtcatagatactcacatcgggtgtaagcgaaggcccttcaaaattagtgtcaatgtacttaatcagatcaaggctctctcccaatactcggttattgtgctctaatgcaggcacctgcatataacagagaacaaaagccataaaactctaaatcctttcacacatatatatgcattaaaatagaaaagttcacaccttgttagccgagtaaactttctccttataccaagcaggcctgtttttaagatcgatcggtacaagttctatcttgttttgcagaccctacacaaacaagcaacataaagaaattgatatagatatatagaaacatcgataagaagaatgattcaaatttgaaaccttgtagttgcgagcaatccacgcacgctgagcaaatgggcaagtgtaagatatgtacaaccttaaaatcacacaaaccaaaagttgttcatcaacaacttctctaatatctatccagacatgaaacaaataaaaaaagcatttttagaaaaccgaaaccttgttgatccatcgaatacttgaactggttctgaagaagaatcaagctccggtactcgactgcaaaatagtaacctttcaatacacaactaaacttgtaatcactcttcatagaaggaaaaacatatttgattgattaccttgactctacaacagccaatattggttcggttcttcgggatttacaccaccgtctcccggagcctggtcggagaattttccgatcaagatagagagaagatgatgaggaagagagagagacatctctcgaggataacgcaagcgttggatgtaagaacgcgctaactttcagtcccacactcatacctcacagctttcactttctcagctcctgaaaggattttccgggaaaatggtttccactgaacctttttgtttgactgccacaacttccggtttggttcaattcggatagaataagattctatttcggtttaaattcggtataagagtaaaattcggttcaaattcagattgatgaatgttggttcgattctgtttcactatttcgtaaacagaaagtacaattgagatttgaggaaaaaagagaggaaatttacacttttcgatcagaaaataattaaagaagtaagattttcacacaattttgtaacaaaagaagcaaacaaaatcaaattctggttcaaataaggagaaaaaaaatgatctataaaacgggattatgggctgagaggagaccacctcctttgacagagatcggagttcgagtagcgaagtttgtagcgtggaggaagacaacaataacggtaatatcgtcgtgaaagtgtcgccgaatgccacgttctatcttctccaaatcagaatacctcatctctctcttctttgctgcttcttgtaatgcagctttcactaacttccgagccacaccctgaaagaatcaacaagacaccacaaattcaacaaacaacaaaaccaattcaaaccagacaaaaaaacaagacaagaagagtgttgtgatatgtcttacattgcgtggacaagaattgacaatatcaacagcttcctggttgcttagatgctcccataaaccatccgaggcaaatataagaaactgatcttccggatgaatcttatgaactgttatagtcggttccgctctcatgatcggcttttcaaaacgttctggaaccctaaacttaggtagtagcggttcttgattaaactccgctcttttaaggtatgcgtcaccaatggatcttgagacctgtataatccctttaacacgccaaactttgtgtttcaagaccacgatattcggatcatcaggatgcaacaaacgtaactcctctctcacagattcgatacttgcattatgctctgttgataactgaacagctttcaactctttaaacggatttgcgactttccctaacacaacccgagaatctcctgcgtttgcaacatacaacaatccattacaaacaataccaaccaaacaacaagctcccacagaagcaatctgtggcttggtcttccattgctcctgcactaaaccgagaaactcctcctctgttgctacaaaccctctggtgataacatcaggcgacatccctcgctgttctgatgtgtacctcttgatgttataaaagagcctatcgtttacaaaccgagcagcctcgggacctccatgaccatcataaacaccaacaaaagttgcctcaggtccagactcatgcaaactaataggaccagattctaactggctatgatcttcaagaaggttgttagcttgaacgactgccatagaaaactctccagtgatgtggttcccagaatctttgtaccacaagagaccatcgagacggccattcgtatcatcactaccaggactagaatcttctccaataccaaaaggtctccaacaaggcgatacaattctcctaaatgttgtagataccataattcacatgtctcaaccaaaagaaccagctatcaaatcgttcatcaaatcagtgcttataactatattatgaagaaacccaatcttcttgtcagactcaattccaactccacaaacccaggattcagaattcaaacacgcattcacaaatgtaaacaacattaatctgcattccacacaaacaaaaacaaaacatttagtaatctagaatcgaaaaaaggataaagtctccaaattttcaacataggaaactaaattttttaacttttaacccatcaatctgataacaagcatctgggagaaacaaattttgattaagaagaaaactttacataactccatccacatatgaatctaaaggtttcaactttgacccatcaacctgattgggtaattgatttgaaatacctgatgaaatcgaggattagatgaaagaaatagggttccttatttcaaaagcttggagtagaataataatccatcattcgatttcagatcaatgagggggaaagattagcaagatgattactaatacaaatcaaaacctataaaaagcgaaagagacgatgaaagagggttaaaatagagaagaagacgcgtttgaagaagagacggagacgttggatttgttttttttagagagagaaagtaccgatagtcgcggtcatcgtgtttatggtgtttttttttttctggtaaatttatagtattttattttctctacctgtcgtctctccatttctttttgactttaacggtttgactttttttttgcaacatttaatacctctactatttttatgaaatattctctaaaatatggtaccaatttgttactacaagtgtaggaaaaaaaataatataagactagctttgtcaaacttattgagaaaaagaatgactaactatagtgaaaagtgatcatatatttagtgaaaaaagtaaaaataccaagtctatatatatatatatatatatatttatgtaagatagtatatatataaaattattgctagtctctttttgaactaatggcttatgaagatttattgaatagaattgagtcaaatgacaaactttctttaccataaacttcaccactaagtttataagcccatttttaagtacaaatctgaaactagagagaatccagctttgagataagcaatccaaaagaagaaaagtaaaaataaaagaagaaacaatcatatctataagccccaaagaatgacccatcgtctaagaaacaatgataaagaaaaacccttataccaagaaatcaggacttgagaggagattcagatgcttgcttccgattgtgtcttgtagtattgtgatctctccttctttctctaataccttctcctccaatttctctaccattcctttcaatgtctcgttctctgagttcaaaagcatgtttttctcaccgtattgtttatactcactccatatctggcctctttcattagacacttttgacaatagtgcgttcagcctcgccatttctttcgccgcttcctggagattgctttcgagccgtcttatgctttcctccttcttcaacatctgatgtcaaaaaagattagcgtaaagttaacattttataaatgggaatagtttctttatatacaaaaacagacatgggatatgtgttattcttgttttgcaatacctgatgcttgaggtctttcagttcgtgggttgtaactgataggttgtctaaactgctttggacctcacatctcagaatctcattacctcgtactgctgctgctagttctgcttggagctgttcgatttccttttccttggaatacagtttctcccgcactaaacttgtgattagggtctcagcactcagttctgctcgcaagttttcctacatgagattgggccaggtatacattagccacatattagtgtaaagcaaaacaggacatacaagaaaatacaatagagatattaagaaatggacatatccgtggacttacttcaactgattggtttctttgttccctaggcctaccagtatttgaggaagacgattctgaattcgaagctaccacactggtcaccgtttgcaaactcctcttcaggttttcagttccgcgccttatcccatggactttcatttcagactcaatcataaactgctcacttaatccgtccttcactgaattcttatcctgataggtttcaggaagctgagttaatttccctttgatgaacttcagtaacttgtaacacagctggctgctctcatttaacattgacagtccctgttcttgcaagtagcagacacgcatcttcaactcattctctagcttaagggttgtaatgtctatttcttgaccattccctttcaatcgattcagtagacagatattttcatggcgaagagagtcagtttcaagcttcattgattctacttcccttctaagtgaaagctcgatccctgtcaaccttacctgctcgacctgcaatttcttgaccaactggtctaatttctctgacggttgcttcttaacctcctcagaaacaccatctcgaagtccctcaattgtcttcccttgttctttgcaagttctgaaaaactttgtaacagatttgtgcaactccctgcattcttgatccttctcttcaaagtttcttctcaagaaatcaagatcttctgtagcacctgcgtaactctcttgtaacttggagagagtttgtttaacataattgttctcttcatgcaatttatctgctgttgtggtcagctcagcaactcttctctccaaatgtgttatcatgtctttgttctctgtctcattttcgtggaaagcagatagttctctctggagtgagacattatgctcagcaagctctcttacacgctctcggagcttcttctcttcaagctggaatttttcgagttttgacgtccactcacctgatcttctatcaagctctttctccaatccagcctgcagctcgctcttctccttttctagtctctgtatatgcaagtcccaatctgacttcaaccatctgatttcttccctagcagaagccctctcaactatttgggaccgtaagagatttacattctcaaatgccaagtggagcctctcatcttccagttttctaattgccccaaccaaagatgaaacatcgaagtcacagtctgaaaggcatctctgctgctccaattctgcagaaaacaatttagctctcttctcagcttctttaattttcatttctagctcggagtcaagatcgtcttccatacacttgtacacgttcctactccgtatacaattttgctggtgccctccatagtcctgcgtataatactcgttaacaggttcataatgttcagctagtgaaacattagcggcgatatctgagctcgagtcaaaagttctgttaagggatccaccatagacatcttgaattgtgattggttcgtggtttgaaccctttgacttgccatgagtctgagagagtctttcaatgacatttctagcaaccgaacgaggcgatccatgccgcaacccattatccacacaatcagcagaagagtaacgtaaatgggtgcctttagcttctctaaatgactgggactttcgtttctcatcgaaagtgtctgatggtgatgtagggactgtccattgaactcggggtggaagcctccttcgatttatactctcagaaacaccactgtgtgaagaattactcttttgcttgcacggttccaaatgctcttctccatcaatataacggtccagaactttactagagacattactcgaacaagatgatgaactcccagacgaatcatgctgaaacttgtctgctttacactgcctttctctaacttgtctttctggagtaaagcatctggtacacagtattcattacattgtttgtcagtggtttaatcaaatatagaaccaagatagcgaaaacattacagaaaatcatcaaaacaatctcataagaatgaagaaaggccaaaagcataccgagatgaatgattgcgccgcctatccttgcttttagtagcactagttgttagttcattcttggaagtttctccaaacttgtcaaaaaggaaacctgcagaggaccatgaaaggcttcgtctaagagctagaccaccagaaacttgaccatgtgacttaggactatcgaactcttgttcagcctgactactagcttgggttctcatcttactatccgcttctttttcgcagttaacttgtttatcatttccattaccagaagatctgaaaaagaagagctttttcattgttttctccaatcaaaaggtgctataacaactgcagctgcaatcaaaacatatagaagcaaatcaatagattgtaagatatctcctgcactaaactaggaaaagttcacattttgcagcaaattagttcatgtcaatctccaaaaaaagtgctccaagtgaatcttacaaacaatttgctcgatgaaagataaaccagttcaacaaaagaaatgagaaaaaacagcataaatgatcttagactcgagataatcaactataactctactcagagattcagaaactcaagacttatcatagtaaacatcgagccaaggcctaaaataaaagaccagactaccctaagcatcttcaaagctacgataaaccctagagactaatcaaatcacaaatcgaacctaaatcctacttgcggagaagttgatgaagattatgttcggcgagattactcgaacactaacaaaatctagaaaggctctctctttaaacgatctcaatcgatttcgtcgccagaaaatccaactctactctctctactctcttctaatagttggaaaattgaaagaaaaaggaaaaaaaaacactgagaggcgacagctttttatgacgacacaattggctttaaagaaaaccaaagaaacacagagaaaaattttaaaatttcaaaagggaagatctttagaatttatgaacataccataaaacagcgattttgcaaatcgaaaattcgaatggagaagaaactgaaacgcagatttaataacagcgctagataacgtggatttgatctaaagggagaagtgcaagaagtgtgagagtgtctcgttgacgacgaagaatccaaaagaacaaaacggctccaaaaatctttattggcggtgtgataatgtaaatagagtatccagtgaagggtatttctggtaacctttttaaatctttcattgcgcggcggatagagccatttggacttttggaggagcggggctacaattatttgtttttcactaacaacacataacagtgatcaataacaacattggaaaaacttgtaaattacaaattaaatgtagggtatttagttgttttaagataagtataataaaatatataggtttgagtgatatgaggtaattatgatacagttttgaagtgataacgataagaattgttggtatgataccgtttttgttgttgataagctttgagaccgggaaggtgtatgtataccaccatacctaatactataaattaccaactacgctcataatcaattatataattataaatttggtataaaagtcgagaaatctaacaaaaatgataaggttatttctcaatttactttcatgctttatttttcttctttatgtttggcaatagcacctagtatttaaacaatacatatagtatttcgacacatagttgcccgtaataaattgaaataatataaaagagaagtaatgcgttattttagatagaaatctgacatcatatatttataattatattttctataaataaaatattatctatatatagtttttttacacttggaattatatattgaccacacatcatgtgttaaattttttttttttttttttttttgcattgatactttggccatattttagttttactcataacatattaggtataatcacgatcagtcctaatattttgaaagcccaaaaaaaaaaagactttattttgagatattttttcacaaggtaaatttaatttcagtaaaaaaagggtttttaataattaaaaatatctgtatattaatattttgtatagactagttatatattaatcaaaaattgggaatcctagactatttttgtttcatcaactggacctggtactggatcaaacgttgctgcaaactaaaatgacaaagcccaaaaatcaaaacatactctcggttagggattagatcagaccggacggtttcctaccttttcaaacgctgtcgttttgaactatagagtaccacaaaccaacgacgccgtttcacttggcactatttatttcttctgtagttttttttcttctcatacatatatcaatcaatcaagatcaccaccacaaggcaaaatctaaactctctctgcaaaatttctgctaacttcttcctcccattttcttgccatggaaatcgattccgccaccaacggaaactctgacaccgtcatgacggaatccgccgctacgatcactccgtcgccggtcgtcgtctcgtcttcgagatcgaatcaatttacggaatctctcaagcttgagcaccagctcctccgcgttcctttcgagcattacaagaagacgatccgtaccaatcaccgttctttcgagaaagaggtctcaaccattgttaacggcgtcggagaattggctgattccgattggtctaaagacgataccgtttcgcgtcttacttgccttgttactcgattacaaggcctcaaacgaaaggttgatttttccgtctctctccctctgtgatcggtgttttaaattatgtagacgaaactgaatcaattaatttagcgattaaagtttctgattttgctaaatgatatccacttatctgtaaaaaatttgatcttcgatgttgaagatcaaagtaaagtatctgtctttggcaattatgtctcactagacattggatctcgatgaattcaatgtagtggtggagttggttcattggaacttcccatctgactatttgcattgtcttctaaatttttatcatttgggatagtttctatatcttctggagtaacatcacatggatatggcctggcttacgtatttttttggttttgtatctcagttggaagaagggagcaatgtggagaatttgcaagcccagagatgtcgtgctcgcatcgatcatttggattcagtagatgtggaaaatattactgaatggaataataccaaactgaaacggattcttgtagactacatgctgcggatgtcatatttcgagactgctacaaagctttcggaaagcagcaatattatggtttctctcatcctcttgacactcattatatcacactattatgctatattgctgtcttggttaatatatcagaacatattctttgctgtttcgtttttacaagcagtgaaacagatttgttgatttgtactgcatctctatgaaatgctaattataaatatctcatcttttcaggaccttgtcgacattgacatatttcgagaagctaagaaggtgattgatgcccttaaaaatagggaggtagcttctgcattgacatggtgtgctgataacaaaacgcggttgaaaaagtcaaaggtacgtgctctatgtactctcatggttaagttttactttcattttttatgaactccatgtggtttggctaaagtatccaattttttaccagaactctatgtataattgttcattgctaattatatattttccttttcataacagagcaaatttgagttccaactaaggctgcaagaattcatcgagttggtacgagttgatacagctgagagctacaaaaaagcaatccagtatgctcgaaagcatctggcatcatggggaacaacccatatgaaagaattgcagcatgttctggccactttggcttttaaaagtaccacagaatgctcaaaatataaggtgaagttttccttcttttgattatataactgttgaaaattgacgcttcaacttgtatcttttcctaatgattgattttgtctgaaatggcccaaaaacgtggatatagatttcactgtttctttcatacaccaggctgcttcagtaatctttttcgtctttgtttattgccgaattagttgtgttactttcaactcttgtcgaatcttaattgatcattgcatgtatttaggctaatcaactaacagatatgtttttcttttttctcaggttttgtttgaactacgacagtgggatgttttagttgatcagtttaaacaagaattttgcaagttatatggcatgacgatggaacccttattgaacatctacttacaggcaggcttgtctgcgctgaaaactccgtaacgatcaaactctatcaaaattgatgtttttgattgtctattttctgcatctgataaaggggcagaaagtaagttttcgaaatgacaccctaatgtgattcttactggtgggttgcgtttgtaccttgatatgactcagatatggtttagaagaaggttgtaccaaagaggaccctctctcacaagagaactttcggaagctagctttgcctttaccgttctccaagcagcaccattcaaagcttgtttgctatatttctaaggagctaatggacacagagaacccaccacaggtgctgcccaatggctacgtctacagcaccaaggtttgattctgttcttgtacaacttcagcttctctgttctttttctctttttagaatctttttctattagcttgatcagttacatcagtctatcctatacagttcaaaaaatttaaagttgggttactttttttatttatttgatgggtaaatgaacttgcaggctctcaaggaaatggcggaaaagaatggaggtaaaataacatgtccaaggacagggcttgtctgcaactacacggagttagttaaggcatatatatcatgaacccatatgctcataatcctcactttggtcaccttttcaatggatgactgggaggacagtattaaggccaaagaaactgaaatttccaactttctccattactctttgtgaatatgcacttgcagataaaactttgcatcactttagaaacagctcgttcctttgtatatcaagccatttcttcatttcagtcttatgacaattttctagtcaacatggttttagtggaaacatgtttggctgctttgctctgatatttttattcatgtttttcttcttatccactagtagtttctgtataaatcaaccggcaaagtacactttattgtcccactaccatttcacaaaccacagttccgattctactatcagtttcctcacttgaggtgtataatttggttctgtctggtttcatctatttggataccatcctgattcaacatgttcatcatttctcttttgtttgttggcttcggaaatggaacgaggtataattccggattaagaaatagagtaacactaatctttttattcactccaatatctcaatttattggtatattgctatcgtagagactgtaaaatcgattacattgtctctgaaagcaaggttgtgcaataatgattgagccattcagctgcagatctcagtacacgaagctcaccgtataggagatctcttgccatctgccttctaacagcaaatctttgtgatacaaaatagcattcttccatttcctgcaaaggcacccaccaataaacgtttttcaaaacctacattgtcagtcattgtgtggaaattagttgagtaaagcgttctatagtaccttgatgcaaacactatgatcctcaatcaatctgttgatgtgagacaagaggatcttatgtgcctccaactctctgttcccgtctttaaaaggaagccgagctagtcggccatcattttgtgcagcttcttttgacaaatcatttagctctgagaatcaactatactgttaatacttttggaattagcctcgcaagatgataaaagagagtgactaatttgatttgagcaccttggggaatgatacaacagagaacacgagcaaatgcacggagagattgtggaatgccttttcctttccctatagcagatttcacttccctgagagatcaccaaaagtacacttagatacacatgtaaaaagcactgttactgaaaccaattctaaagaagtaggttcattggtattttcctatccactgttcacatcactcttaactgctttcttactatctcccatgtttccattctttgagtacggatattgatatgtaagcagttaagaacttgtaatggcttggtaacattctaaagctaaactttaatacctacttgattgtgaaagtatcacaagaagagtgaaagatattgatatctttgacagttcgagtgtgatgtgtctggagaagtcccagcttcatgttgcgaagaggatcatcattcggtacatccatttggatttgaacctataagtcaccgcagcagtatcagtttgatactaatccttagataatgactgtgtgaagtttcaacatcccattcagtcaattaaatgacaatcaagttcaaggttggtgagtagcatcttcaatccaacatctatagatcaatgttgttacggctacggtcatgatattagaaaacaaacctcgtcatgaatgttgtaaggaaaggtaaatccaaaatctaacatgagtgtagcatttgagaattccccatacttgatgaatacctacacagagatatttggtaagcttcaacaagcccatgagttttaaccagtcactgagatcgacctcaacaaaaataacattcttatagaatctagtgattattaaaagaaataagtaatgcatcctctgagaagtgaatctcatcgtgttataatcttacctcatcaccaggactgtagttgcgatctgcagtgacctgcaaagttgaaaacttgaaatcaaaatgtactggcttgtttcagtctgtgttgcaagcctttagagtcaagagaaagtaatacggaataaaaaaccatgcattttactagatcgatgtaccacatatttaacaataagattatgctgatgtcgattcactctagttgatgtatggaatatgagatatggaggttagattgtatatcaagtagatgtgcacaaacccttgacgaagagaacacagaatattaaataacaggaatggaagtaaacctctgatagttgattgtcttcatccctcaaaacgattgatgcagaaagcccatcatggttcatgaagtctgcaaacggaatctgttatatcgttagaacatctatcgtaccagaattcaccataagtaatctggaaagatgccagagctaaattgaaagcaataccagtgatatgcgttttgagttttcccacgcacgagatcccactgtccagcaacaagttatccagattgagtaagaacaacacaatgcataaaacctcccttatgagagattgtacatggttgagtaacaccagaaacagatatagagccaaatgaatacttgtgaagtaactttctcacctaaagcatatgcatacatgaaatcttccaaatctgggcgttcagttactatgggacaatgttgtttgaatgcctaagaatcaccaaaaagtgattttagaactcttattcactaagatgaaaaataaattcgacacatggaaatacatctaccaaacatacacatatgacatatgtatactacgtacttggttagcttgacataggacataatcatagtagccttcgtaatatgctaagacttgttatgaactggagtataaaacttgaagaagataattcaaaatttaaaccgtaaataatttttcagcggtatatacacaggtaatatagcaccttgatagacccaactcggtttctcaatcaaaaggtctgatatcaccacgagaccaaacagacaagacaaataagttttgtaactatttagtctatatgtgtgtgcctgtcttatgggttcatacactattcttaacggtacataagcagtcgcttgaaggccttttaaagaattaggaacccaaccaaacagttaccagtatcactagaaaaacatacttacctgcgctacaaatgaaaagtccttttctatctgagctttttgttttactgtttcctggtgaactgcactacaacgaatcatgctgagctcatcttcaccccaaaatatctaagagaataaggaaaccacttttttttattattctgcattgtccaagatagcataggcaacaaaattgatagtaaggcaattaagaagctttttgcgtaccaggttatatggatcatatcttaaactataactatttatatttgtatatctcttttggtaaaataacacacattaaagaagtggccaaaacaaaaattcaagactcgaacatatgacataataactagagtgaaatctcaccgagctatgcatctctgcaggttgaggaagtcggctgatataagggacccatcgagacttctgattcaaaagcaatcagagactaagtcaaaaccaaaacactcacatgaaatgggagacttattttaagtcaattactcaaatgttgatgccctagcttacttgacccattttcttctctcttattagaacagcagcaagcattccgatattcccaacttcattgctcaataaaactctaatatccgaggggagctcatctggagttatttgctgaaattttaagttagaacaacactaatggcataaaaagaatttccaatacttcttaagacacatgataacagaaaagctcgtttcagtagacaacaatataccgcattaaaagggactttcaacatgcagtcaccagcatagataactttggaggcgaacagtgacctgctcagaagttgatatagttattaacatggttagtgtatttgacattaaagataaagcatcacaccaggagacagcctctggtaggaaatgaaattggttattctcacaatcactcattaaacaatcgcataaagatggaaaacaatcagattactaaacaagacaaaataacatgattcaaagttgtacaatgtttcaactattgatgacaagacagaaccatattaaagaacatcaagacaagtcatataaaaattaagctgccacagaaggtatcaacaaagaatctgatcattacattgaaagggaactatgaatagaattattgaatagagaaaatgtgtctaacaatccatattttaattgccggtaaacagaaaaccgaggtactcgaaaaacggattttgaaaaatacttgcaaagttgcatcttattcaaaacatcatcaagcccacctgccataggtggatttcccaatcgaaagagtattagttatctttgctccagcaattcgctctaaccagggtaagaagttattgtccaacgaagcctagatataaaatggataagatgatcgtaaatcctcttttgtgagagacataaaagttctgtacaacatcttcttacatcaattagctcccaaaatcaacagtctgtttggttaactatagatagaagaagctaaaagaacataaaggtttcatctttggtatcaattgctatcagtagaggagaaacatacataacttagaaaaattcttggaaccacactcaggtatgataaaacttttctaacacttgagataatcaagctgtgaacagtccatcacattgatttcacaaatttcacgaaagtctcaatctttcacaaatcaaacctgagtttggagctctaacgttagtttcccggcgagactgaaacgcttggctaaagagctaacattgcgcctttgttgaaacccgaaaagcttcactgtcgaaatgcagaatagcatctccagccaaactggatggcgcgtgagcaaccaccgctcgtattatggactcgtgtttcgactgcggctagagcagagcggccaggaccagacgatattctgatgctgattcggtccggtttgtttcggttttaaatttcagataaatcggtttgtttttaattgattttgtagatagccttccaattttgactttttgataccttacaaagtgaaatggctttgagagttacttgcctctagcaacagtgtctgtgtctcctcatttttcttccacaatctcaatgcctctatttgaaatgttgcattaattttctgagtaaaagcgattcataggtgctttttgtatttccaatttcctaaagaatgatattttttttattgatggcaaaagtaatacaaatgttaaaaagaatacaattcaaatacacaatcaatctacgaattacaagtaatgaaaaagaattacaatatatgtttttggttttaggtatcatcagtagtttcagtttcacctcctcttgtttttgctcccaagcaacaaacacaagtaaaacaaaatcctaaataggaatccgaaacctaccgtgataagcaagcagttccatttactaagctgtgtcactccttgctgcttcagaacatcagcacccgtcgttaaacacgtagagctcgatatcctcatacctatcgaccggctcacagaatccaaaagcctcagcttcatcccatacgtcaattctcccaaaggcgagttgtcgaaaagctgaacacctctcacaaaacattctgtaggatccgagaactcgttctgaagaaccgcctcgtatggatacttaaccagagaaagataatgaaaccaaatccaatactgagggattcgatctctgttgatgaagaagccactgaaaagcaagaagtaagctaaaatagcaacaacgatcgtgtagcctaacatcacatgtggaacgacgccggataagaaagtcacgaaggagcttccggaccagaaagaggctaagatgattaagcagtagaataaaaagcccattaggcctccttcaagcccaacagcccaaaacgtcgtcactgcgaaagctaaagagaggaagatgagcgaagggaaggtaacaatggcgtgagagagaacgtaggaggatctccggtaagcgttgtaagctgtttctctcatgaagatgtaacgttcctggaggaacacgggaagagcatcggcgcaagtgtagaacattgttgacattgcgaatgcgaagaaccctaaccgctcttgaactccttttggtgaattatccaatcgccagaatacggtggctaagatgaatccggtgacgattacggtggctaatcgcattccgagtagctccggttgtcgtcgggagttgaggattgagcgtctggtgagagttttgatttcgatccagaacggattcgcgaatgcagggacggctaaggttccgccaccgtggtttatgacggaggaaccaccgccgccaccggagactagttttcctctgcttatgctggcggaaatcgcttctttcaaggttaaatttgggtttggagaagccggcggagttagggtttgaggattgctctgtttcttcatctcttgccatttcttgttgaattcaactaatcctcttgttcctccagctgatccttcgagttctctgattagatcgagtgcaaactccgtttgattctcgttttccggtatcggattaccgaacccggcgaaaaagctcggtagactcgccggagaaccactaaagacggtgtgtccacgtgacaagaagataagacgatcaagtaaactgagaactctgtgacttggctgatgtattgacattataatgatactgccactctctgcgattctcttcaatactttaaccaccatgaaagcacttgtggaatctaaaccagaagtaggttcgtcgaggaagagaacaatcgggtcgtggatgatatcgattccgatcgaaactcgccttctttctccaccggagattccacggtgtccttcgtctccaatgattgttttagcagcgtttcttatccctaactggtcgattagggcttgaactcgaagcttcttcttggatttaggtaagcttcttggtaatcgaaactcagctgcaaacattaaggtttcttccacagtaagcatcgggaagagaagatcgtcttgcattacataagctgagataactttcagcatccgagattgaagagcttctccgttaagcgttaccgtgcccttcaagcttcctttagcgatccgattcgctaaagcgtcgatcaaagtggatttacctgacccgctagctccaagaacggcaagaatctctccgtcacgagtctcaccggagatattgtctagaagagtcttggtcttggagaaagatgtcctcctccatggaaccaggtcgtgaaagtcaagtttccggcgaacagagacgttgtaagtaaggttgttgaaagatagaacgaaaggaacaggacgcataagatgatcattatctccgtcaagtgaagaaccatccctgtcaaagaattcatgaacaggagtttcgtcaccaacttcaaccttacgaacgtcgctaacgttcttgagaagttggcctaaagtcaaagatgagctaataatctccatggaatgaaacggtgttgcattatcatcttctactagtatgcgagacatttagaacaaaagatggtaaagtgagaaatgatgtgcttacacttgaaaatcaaaacactctttgcatgatcaaaatgttagtctttgttctctgttttgctagtatctgtgtataggccttatatatatgaagtaacgtgtggaagcgtgtgaacacgaaggttctatgtgttgaatgagttgcatcatcatgagaaatctgttaggtttgtgttgttaacaataatattcttagcgtttggatggaaaatgcgttttggatttctcgtattcaattagggagaggtaatgggatgaccaataaatctagattttccaaggtgataatactaaaatacgtagaaatggctgacacgtggcgattagaatggagaattaggtgaagggtgttgatctaaccgaggtatagatagtatataggattgagatgagatatttcttgcgtttcacatagtgtttggtcaattaattaatgtttttaaaagattcttcgaatgttggtagcgatatagtgattgtttgtatcgcaagcaaatgtgtacctagataaactattcacattttcttttgttttcgcgaccgaagacgattgcttatgctgctaactgcctaaaagttgcaaattgcaataattccggaaccccaactaattctaccaaatataatataaaagttatatttgataaagtagctagatttgtatttagtttgggaatataaactcctgtttttgctatgaaagactacacacaatctccaagttcattttttctatttcttgattatttagttggtaacggtggaacattctttaccaaactcaaatattgtgtttggtctttgtttcctctgttttattcacagtatacagaagctgataaaacattctttttgttttgtaaagggtggagtggtggtttaagagaaatataataaaaatcgtcaagtttgttgctaaaattaaacatgcatgcgaaaattacacgagaatcataaagatggtgtcacatttcaaatactatttgttaagaaagtaaaaatagtgatgtctttgatccatccagggaaagaagaaacagatcaaaaggttaggcaacttcctcttaagtagtacttggtcaaacttctagtgatggacacaatggtaacatgaaagcaaaattgacgtactggcttagcttcttggatttccaatcctaaactttgacttcactgttacatctttttggttgacattttgaagtttaggtgactaacttctacctactgtagtcttccttaccgccataagaaaagggtcaaagatttataataccatctaataaagcttataagaaagttggctactttgaattctattttcgaccaactgtttagttgtatatacttttgtttttaaaaagtgatgcaatttgaattttgtcaaatacgttatgtttacaccgaccacgaaagatggcatatagctcacacgcacattaaaactactaaattacttcactggtagcttgtggtatctttatattagtttgaactttaaactattgatgtagttcatattgttaagttaaaaacattaccaattgtgaattaaactaaaatcttagtcctttataaaattgtgaacctaacatcatgtaaaatgttagatgtacgattctttctttagacaatatatgatagctatgaaagaaaaaaataataattatacaacatatatcatcaatatctcaaattcaaaaagacaattttgctttcacaataaaatttctgtttcggaaaaatttacattatggcgttcacgccctcttattcttgcttccaagcaacaacgaaaaataaaacaagatcctaaagaagaatccccaagctaacgttacccacaagcaaccccatttatccagctgctcaattccatgctgcttaagcaaatcagagcccgtcgtcaaacacgttgattccgttaactccatccccaagtaaccgctcattgtctccagaagcttagcctttgtcgtttcagatactccttccattattgtattatcaaacacttggtttcctctcacgaaacaacgggagggatcatcgaattcgttgtgcagaacagcttcgtagggatactttagcagagaaatgtaatgaatccatatccaataaagatggattcgatcacggttgacgtagaatccgctgaagaggaggcagtatgagagatagccaaaggtgaccatgtaactcatcatcacgtttggaatcacaccggagacaaatgtaacaaacgagcatcctgaccagaaggacgcgaagatgatcataagatagtagataaaacctgccagaccaccgtttagaccaacgaaccagaacgtggtcgctgcaaagcctatggaaagtgcgaagagatgaggcagagttactaaagagtgagatataacgtaggaagatcttcggtaagcgttatgcgcggtttctcttaagaaaatgtatctttcttggataaaagcgggtaagccatccgcgcaactgtaaaacattgtggccattgcaaaggagaagaagcttaacctttcttggacgcctctaggagagtcatctactttccagtaaaccgtagccaagagaaaaccggtcatcatgactatgaaaactcgtgttccgataagctcgggcgttcgggtccagtttatcatgtagcgtttagctaagattacggtttcgacccaccatggatttacgtatgaaggaatagatctatatgaagtagagacaagtttgcctcttgaaatgcttgcattgatggcttctcccaaagatgatgagttatggtgaggttcttgactaactcttagcttcctatgttgccaatttcgattgaattcgactaaacctcttgttccttcgggagatccttcaagatctttgattaggtcaagtgtgaattccgcaatgttctctttttccggtatgggactaccaaattccgagaagaacaaagggagagtagcaggagaatcactaaacacaatctggccagaagataagacgattacacgatcaagaaactccataatccgaccactaggctgatggattgacataattacgatgctgccgctacgtgcaatctttttcaagacttgcaccaccatgaaggcactagttgagtctagtcctgaggttggttcgtcgaggaacaagactataggatcgtgaataatatcggtcccaattgatacacgccttctttctcccccggagacaccacgatggccttcatctccgatcacagtgtttttaacagttgtgagccctaattgatctattagggtttctactctgtttcttttctttgatttgcttaagcttcgcggaagcctaaattcggcagcgaacattagagtttcttcgactgtgagcatagggaaaaggagatcttcttgcattacataagctgatatgactctcaacaaacgagattgcaaagcttctccgtttagagttaccgtgcctttcaagctaccttcggctatttgtcctgctaatgcatcaataagcgttgattttccagctccgcttgcaccaagaatggctaggatctctccttctttagcctctccagtgataccattgagcagtgtctttatcttagcagggctatgtccgaaacgaagaccaaaacgctgttgaagagtgacgttataggtgaggtcgttgaaagcaaggacgaacggaatgggcggtatctcagattcatcaacatcgatcacggcgtctctttgcagcatctcgccggaagattaacacaaagcgctgtgttattattttattgttggagtaaccttgaagcttatttgaagaagaagctattcaagaaaaggaaattaggattagacattattgtttaggaagctgcctaaataaatatgtaagttatcctaaaacagattaggaagttgtctaagttttctcttataaaagagagatactaaagtgtggtattcctaatgagttttgagattgagagattgtgagagagctttagtttttgagtaagtttctaaagcaataaaagaaagaagtcttttataatcagaagtcttgatctaagatttaagttcttaattcaatatttatatgatcagcgattcatctagagatcatgaaaacgattagaacattattaatagtatcaattatatcttccatttcttgagaaaaacttataggattggaagttttcaatctattaaaatgttgtatcattaagctctattttccataagctcttaaagaattcatatatgtgctggaaaaaaaggcaagaaaagagaaaaataaaagttttacctgatgacgtagtttcttagaagatcgttgttggtgtgatcacgtaaccaaattgaatgcatttagttacggccccatgacagtagagatcatagtctgttgcacttaaaagacaattattaatggtgatttggggtttttgatataagaaacttgtgagaggaattatgccataactcaagtagtaattaaattacaaacgttgagaagtttatgaagcgtcgttatcgattctaggcgaaattagatactgcatatatatactcgtgcaatctacaaaaggtttcgtgacgtatattaaaaggagtcttattaaaaatgtatattgcatttttgtgtgttgtgttgtgtacacacacacagttcctgttttcttatggctttgtcctctatcatcacatgcttggctatcgttgtatctgatgttgcgctaacatgcatgaagaacacatgcagtttaatcttgttcccctcttgcctttttctcacggcataattcatagtacaacagtgagcgatgattgttaattaactttcatttgcttatatattctatcggtttaattgattataagtatgtcaaaatggtagaagattaaattaaaacgccctttagaatgcacaattaagcatgccagaacacaattaaactttaaacaagtactatttatattatactactacttagatttgaataacacgtagagattctaaactcatattcacagatgtaaaatatgaaataatacaaactgatttaatcatggattcatgattactgtttaaatcttagcttgaattattacaacattctcagacattaccaaatttatctatgtttcactttattttctcgaaccagacgataactaatgtgtggaaatatttaattttcacggttctagttaaattgcgtttgtgtattcaatcaagtggttcaaatttaattgcattctgacatgctttaaatttttgtcattgaatagtcaattaagcgatgtctattcttgacccaaaaagtactattattgatttatggtttagtgaatgcattaatcagattataattcgctagattttgaatggtctattttttcatgactacgaatttcgggaagggaccattaattaaacttttaaatatttacttttaaacgtgctatgcgccacgttgatttgcatatccactatatttcgtagtcgactgtgtgttgatatttcgtaatctattttctaccaaacaactttgaggttatgaatcttttgatcttaatatgtatagtattcatttcttcttatcataattcaccaaatattttgagttaaggtattgtccactcttgttcgtgtatttcaaccccacatcttaaaaagttgtatatatatatatatatatatatatatatatatatatagatgcataatttccaacccattttctaattagatttagtaaagtttaaaatttggagacattaaaaattcatatgtatacgatacgagacactaaataatgctcttaagaatatatgaatgtctatctgtctgaaacctaacttcaatcattactacattttcaaacaacacctcagatttttatttttttagtacatagtaattttctacttttatgtatagaaaaataatatatatatatatatattaagtaacttcaactgaatcatatgttgaaatctaatcgtgtactcgagtaattattatgatactaaggattttaagaaaaaatccttttacaatattcccatgatgacacaaaattaaaaatgttacaacttgattagaaaactacaacaacgtatattatatgcgtttgttgtatgtttttgtgcttgtagactaccttcacgtcctcttattcttactcccgaacagcaaggacaagtaaaacaagatcctaaagaagagaccccaagctaacgtaatccataagcaatcccacttgctcaattgagttataccttgctgcataagtaagtcaggtcctgttctcaagcatgtggactctgttatcttcgttcctaaagagccactcagtgtatctaggagcttaaccttcatcacatgggacacttccgccaaaagcgtaccatcaaatacttgaactccctttacaaaacaacgtgacgggtcatcaaactcattgattagaacagcctcgtagggatacttcagaagcgaaatgtaatgaaaccatatccagtacaacggtatccgatcccggttgatgtagaatccacccagcagtagacaataggaaagataggcaatagtgaccatgtaactcatcatgacattcggaattaaaccggaaatgaaagtaacaatggaggatccagaccaaaaggctgcgtatattatgaggcagtagtaaaagaaactctctaacccgccgctcaaaccaacggtccaaaatgtagttgcggcaaatgcaatggagagagcaagtagctgaggcagagacacaagagcgtgagatataacatatgaagatgttctgtatgcgttgtgcgttgtctctctcaagaaaatgtatcgttcttggataaaaacagggatgttgtctgcacaacaatagaacattgtggacataccgaacgcaaagaagcccattctctcttgtgcacctcttggagtgttgtcaagcctccaatatacagtagctaagagaagaccagtcaccatgacagtaccaatccgcattcctatgagctcaggcgtgcggatccagttttttatgtaccgtttagctaagataaacgtttccgccaatggcgggtttgcgtatgaagatactgtttccattgatataggattggctccagatgagccagagactagtttccctctagaaacacttgcagcgatggcttcttttagagatacgcgactttgtgttgtggctctagcagtttggttctgttgccacttttcgttgaattctactaaatctctggttccttcagaggatccttcaagctctcgaatgacatcaagtgcgaactctgtgatgttttctttctctggaatgggacggccaaagctggagaagaacgaaggaagactaaccggagatccattgaacacactcttcccgtgagataagatgataagccgatcaagcaaaccaatgatacgtgcactaggttgatggatcgacataattacgacactgccactctgagcaattcgtttcaaaacctgcaccaccataaacgcattggtggagtctaaccctgacgttggttcgtcgaggaagaggaggataggatcgtgtataatatcaattccgattgacacgcgccgtcgctctccgccagatactccacgatgtccttcatctccgattaccgtatccgccgcgtttctaagccctagttggtcaattagggtttcaacacgctccatcttcttcgatttaggcaaacttctcgggagacgaaactcggaagcgaacattagggtttctttaacggtgagcatcggaaaaagaagatcgtcttgcatcacatacgccgatatcactttcaacaatcgagattgcaaaactttttctccgtttagagttaccgtgcctttcaagctatcctccgccactcttccggctaatgcgtctatcaacgtggattttccggctccgcttccaccaagaacggcgaggatttctccgtcacgagcctcgcctgtaatatcatcgagtaaagtcttcaccgaagcggtctttcgccgggagaaatcaaaccgccggcgaagtacaacattgtaactgagattgttgaaggataagagaaacggcacagatcgtgtttcagccgcgggagcgagatccaatatgtgttgagtcggagcattttcgccgggatattttttccggccactgtcgttgaaatctttcaggagttcgccaagcgtcggtgactcgttgccgccggtgtgagaaatatctaaaatttccgccgaaacacgtggcatcttcaacgatttagttaactatttttggttgatggaagtttaacggcgtggctgaagatgaagctaactgctaacagtgtagtatcatagtagtataaaccctgagaaaaccataaagccaaaaaaattataaaatatatgtaacatacttacgaaaactggattttagtattcttgagaaaagtacgaactaactgcttaaaattctacaaatgtacgaataagttatatgaaaaaaactcacgaaattaagaccaaatatatatgggataaattttataatgatgaggcaagattgatgatttcttagtctgttaacctttaaagtataaagacatgaatcatacaaataaatagaactcttaattactaaacttatgaaaatattgaacttacttgttaaatttttagttatcttcttttagaagccaggaaaaaaaaacttgttgttcaatttttatttttttgtctgtatataaattagcagtgggcacttctctcgctcttcgtatttatagagaagaagagagaaaaataaaactcatttattgttatagtttggattttgaaaattcgaaataaataaaattaaatacagaagaaatgagaaacacgtctcccatggtatttataggaaatcaatgagaaaataaaacaatattaaatggataaaagtacataatcatagaaataggaagaagaaagaatcaagagaagaaggagttagctgattgtatttcaaacaaagaagtttctatagcagcaagtaaatggcataaaagaagaaagattggtaattattgtaagttaggtaaatagtagagtgatgtaaaaatagattaaatagacgaaaccaactccatttatgtggagacttatacagtcatcaacacactatatagtttgaaagatttgagctacgaggtttttaagtatcctaactcatatgtcttgctcttagtttgtgcaatcatgacaatttgacatttgacaatcgtgattcgtgagtactctactaacgataccatttttcttattttctatttcaccgctattttttgtgattgtggataaagtatacgtacttttaagtaaagtttataacgaacgtatgtacttctttcgtcgtggctccctaatatccataaagatcgtgagtcaattctattattgaaatatgtggtgtggtagctagataatagtgaaaaacatatacggaagagatggtttgaactttgaagaaaaagaaaatcaagatcatgttgtagctagcatatgaagttgctactttaaagatgaatatgaagaatgaaaatatttatatctcgtagtctgttggcgagaaatgcatgcctaaaggaagcatcgtgtagttagtttaaaaaaaaaaaactgtaagtcattgtaaacatttcaaactaagttatcaagttaatatagttgttttaaatgttaaaataaagtaattaatcaagagaggttagttactattgttttgtataagttaggtctacctctaaatcttcagaaggaaaaactgagaaaagcaaaacaataattgtatggaacataatggggccatgaagttatatatatgtatataggtaattaggtttgtatcttaactttttgaaaagaaagataataaatgcagagctttaattggtgtgaagcatgcatgctggggccatgaatttagacgctaacgttttgtggctcgcatgactctacaattaaaacctcatcacagactgataggtgccaccaccatagtacgacttggtgccaccatcgcttctttcggtatggactaattggtgccaccacccatagtacgaataataagtctataaatgaaaaggagaaaatagatcaaaataaaattgtataaaaagtgtatttttcatttatctatatgaaggaaaaaattgagcacgtaagactgacagtatactattagaataagaacaaatttgtatgcatatttctgttttttttttaatgtatttccgtttttttttaaattaatataattttatgtataaagtaagaaattaccaacaccagtcgattttttttatgttttaggaaccaaagtcttgaatcacgtgcgcttgtatactagcgataactcttggttgaacgacaatgcaatttggtttttggcatttaaaatctgacctaccactcaacaatgttacgtttacaaccaaattttgcttgaagcgacgcctccataaatgataatctcgtgtttctttttatattttgtttgggaaatatggttccaaaaccgattatgatttaacatgtagaaaaatatttcaaatttaccatgtcgaatcgtgtattctcctcataactagatagtcgaattttgaccttaaaactgtaatctaattagctccctatcaaacattcactgtattttgtgtgaatattacacgttcttaaaaaaacaaactgcaaactaagtatattggtgcttagattgtggaatcgatttgataactataactatggagaaactagaatttggaatactgttttacgttaaatttgcagaatttgcgttttccaatcatgaaattatgttttgacaataaaattgcataacctcgtattaatgggccaaaaaatacatgtcagcccagtccaacaatgagcgagtcgctccacaatgtttttctttacatattacaagtgaaccacggactggcctgcggatccataggccaaatcaaagaccggatcaatatcttaaagtcaaattcaaatcaaaacataacatacaggactgaacctgtctgactcatcacaacaacctcaatgtaagaccaaattttcattgaaaatgctcgttgcttctttgttttgagctcgaaacgttgttgcttatgatctgtttcactcttctctattctctcttcttcaacagaattagactccccaaaaatgtaaccgaaaagtccaaaaccaatgctaaacgcaacccacaaaaaagcgttagattctctgctttaatacaaccgagtattccaatttattggaccataatttccttatgtcaagcaccatcctttaataacgtttttggcgaataaggtttatcagagttttttggaatctgattccgagtaactcccatctaaacctcaacggttgaatcatctttgacatatatatcatcaaatcaagttagaatagcatttcaaagaaaaacaccgaaattcctaaactttattataatgtaaatgcatgttctttattctccacttgagtaccgcataagaaattagatatagaaaacataagaaatagaaaatgacaaaaacacaagaaaaatctatcattctcagttctctttggctagtttttcctcaacagagtgatcactaacttccttttcgtccttgttcttcatcattagctgagataatctttctgcaacacttaacctagtgccaggtgacacaccgttcttcccgatgatagattccagaaccgcctccgccaacaatttgttctcgatcacagcgatcccggtttcagggatactatcatctttcgaaaacgcaacctacaaaacagtatagttcacaacaaacacatgtcaacaaagtattcaaacctacacgttacaactactatcgttccaaacttccaaacgccaacttttacaatagtacttacatttaaaaaacctaaaacagtaccttcgcaagtggtttaaatgcgaaagcatgtcaagtatctcattccaatttgatatttgcactaacgattaacaaaattcaagcaaagtataaatcaagcaaaaattaccgtaagagagccggtaggggagagagcgaagaggatcgatgaaccgggagggaatgtttcttccttgaagatctccaagaacttctccacagctttagcttcacagtccgtataaagccctaattgtttccatatagccacacaattctccgtcactttctccgaatattgttgtcccgttaacggcagtttcattgtcaccttgataaacttctcaaacgcacctaaaaaggaagcaaaaaaccaatcataagattgaaaacaagacgattaaacctagcttgacgtgtacgtttagtaattggtgtttataagaaagttaccggtgactatttcacggaagaacgggatagattctgttagctcctccgtagtttttcccttccacttgacagatagagaaggaacggcgttaccctctaggtatactccaatgacggtgaagatcacgaatttaccttggatatcaaggcctcggacacctgcgtaagttagcaaaacggaacgtagtcagcaacacgaagaaaaagaagaagataaagaagaacagagcaaacaaacgaaccggcgccgccgaggaataatggattggaggaggccggtgacttgacggacggtacaaacgtgacggagtctacatgaagctt

SEQ ID NO: 1086 - DNA, 88997 bp, Arabidopsis thaliana
aagctttgagcccttaaatatgcagagcacatagttaggataatttcaaatattttctatcgttatctttcatattattgattttatatattttggttatttgagataattatatgattattttagagtttatctaggtttttgaattatattataaataaattgagttttattataaataaatcaggttttcttttgtattcagtattcagttgattgatcaataaaattaaaaaaaaaaaaaatagcttttcagaaaaagtattctctaattcttactttcggaaaatcaaagaaaaaatcaaagaatttcttacgttctctagtttctaatattcagaaatcctagttttttgggtattctcaatatcaacatatctctttcttttcttatctattaaagcttctacgacttcagcccttatttcaacaaatcgttttgtgaattaaaaacaataattcaacttggttcactttggttttgaacaattgtacttagatttggttgggttttcgtttaactatgttcattttagataaataaaaacttttaacactcttttatatttaataaaacgtttaatataaatttatcatatctattatatgacttcgtttagtttgagttatggttttgatttgtttgttccgtaatattaaaactaatcgggttataaacacatttcaattcaattttggatttgtcagttctgatgccgggaagtgggctattacatgggctattgaaccccaccatgaatgctctctagattttgggttccggttgttcctacactgggctgaagtataataaaatctaactgaatctgaaatgaaatccatgtgagtttgtcactgaaaaaacaaaaaacaaaaatggcaaaaaatttaatagactcgagggaacgaacgttgcccaaaaaaaaaagcaaaaaaaactagagaaaaaaaagttttaaaatgctccacactttcttaattcttcatatatatatatatttactttgagtaaaccatttaagatcatctaatatttaaatgaaaaatatttaatggaaaagtttatagaagggccctttaatcagtgtgaaagcataaatggtttacagtttgaaagcataaattttcggtttgcaaattttatggcttcaatttaactgcgcatttaaatactttaaatgtattgtcgatttatatacataagtagttcgaaattaaacgtctactgtgatatgtttgaactttattcatttaatagtcattattgcaaaatcaacctctaccaaatttaaaagtaaattaattatttactttgtagtttagtgaatacattaatatcacattatataagtcacaagattttgaattgtcccaaattatataaaactttgaatcatttaactttaaattttctaacatctgtgccatgtttattgcagtagccaatctttttacacctcagataaccagatttttttgatcatttactctctaccaaaatgttctaatgttccatacatatagacaataattttaaaactatttttcatatcctaattctccatgtatcttgatttgtccatttttgatcttctaattttctcatcaaaatgacttgcgcatcaaaattcaattataaggacactaatttcaaatgtgtattcaattggttcgaatttaattgtgttctgacatgcatgttttaaattttgagtcattgaatagtgagtaatgtctatcacaccagaaaatattatatctcaaatttaggtgaatacattaattcactagattttcacttgtccattttttttctttgagtaaaatatactatatatgaagtatgaagtatgaagtaagggagtccggaccataaaacttatatctccaacgtgggatgcgcaatattcatttcatatctactaaacttcgtggttgaacttttgttgatattttattttgctgaccattgtggaaaagaactatcaccaatacttgaatattgatataactatatggttgaaaaattcgcaaaacattcaacagcagcccctagattttaattttttgaactgcacccaaagggacaagacagcaaacaaaggagagcaacactacgaaacagaactatcaccaataggcaataagtaaggaaaacgaaacagaaaaacagaggccaagtcaagacaaaggaacgagcagatagcgaaaccttgaaggagggtaatggtcttgctttacttaagcaattgttctgcctcgaaatttaaatgtgtattcaagtaatcagatgctaatttggatatttaagaagaaatacttgtttattttacagtatattcttttaaagaaacaaagatgaaatgagtataaattttacaacttcttcacaaatgtatagtaacatcgagaagctaattcttcaagcttcacttaaatatgtagctaatgcgcacaaatgtatttgtgggcgctagtaagtagtaacctcacgtcctcttattcctgctcccaaacagcaaggcgaagtaaaataagatcctaaagaagagacctgaagcaaacgtaatccacaagcaatcccacttgctcaattgcgtaataccctgttgtgcaagtaagtcagaccccgtcctcaagcatgtggactccgttatcttcgttctcagagatttactgagagtttcaaggagcttaaccttcccggagtcagacactcccccgagaagagtactgtcgaaaacctggacacccctaacaaaacaacgagacgggtcatcaaactcgttgattaagacagcctcatacggatacttgagaattgaaatgtaatgaaaccacgtccaataaaacggtattcgatctcggttgacgtagaatccactcaacagtaaacagtaggcgagataggtaatggagaccatgtaacataacatgatattcggaacaacaccggatataaaggtaacgacggaagatccagaccaaaaggaggcatagattaggaggcaatagaagacaaaaccctctaatcccccgctcaatccaacggtccagaatgtgatcgcggaaaataccaaggaaggtgcaagtagctgaggcagggacacaagagagtgtgatatgacgtatgaagatgttctgtacgcgttgtgtgttgtctctcttaagaaaatgtatcgttcttggataaaaacggggacattgtctaaacaacaatagaacattgttgggacgacaaatgcgaacaaagtcaatctctcttgtgctcctcttggagtgtggtctagcttccaatacacagttgctaaaagacaaccagtcaccattaccgtagcaatccttgttcctactagctcaggcatccggatccagtttttcatgtaccgtttggctaagatgaatgtttcgaacaacgacgggtttgcgtatgaagatactgtttccatggaagtgggattggatctagatgagcctgagactagtttgcctctagaaacactcgcattaatggcttcttttaaagataatgaacggtcttggtcgagcttattggtttgtggagcagattggatcaggctgatcttgttttgttgccacttttcgttgaagtctactaaagctttcgtaccttcattggatccttcaagctctcgaactaaatcaagtgcgaactctgatatgttctctttctccgggatcggacgaccgaagtcggagaagaatccgggaagactcgccggagatccattgaacacacttttgccacgagatagaatgataagccgatcaagcaactccacgattcgagcactaggttgatggatcgacataattacgatactgccactttgagcaattcgtttcaaaacttgcaccaccataaacgcgtttgtagaatccagccccgacgttggttcgtcgaggaacaagacgataggatcgtgtataatatcgattccgattgaaacgcgccgtctctctcctccagaaactccacggtgtccttcgtctccgattaccgtgttcgccgcgtttcttaaccctaattgatcaattagggcttcaacacgctccatcttcttcgacttagacaaacttctcgggagacgaaactcggaagcgaacattagggtttctttaacggtgagcatcggaaaaagaagatcgtcttgcataacatacgccgatataactttcaacaatcgagattgcaaaactttctctccgtttagagttacagagcctctcaagcttccctcagcaactctccccgctagtgcatcgatcaacgttgattttcctgctccacttgcaccgagaacggcgaggatatcgccgtcagaagcctctccggaaacatcatcgagtagagtctttactccgttttgccgtgagaagccaaaccgccggcgaagtgtgacatcgtattgaagattgttaaagtttaagacgtacgggacaggttttacgtacaaggcttcgacatctattatgtgatgtgcaggatcgtcgctttttacgccgtcgccggaatctccttttcggaaactgtcgcagtctttcagcaactcgtcgagggttggtgatccgatgggagtgatatactgagtttccgccgaaacacgtgtcatggcaatctttctaccgctgagtgatagattcatcggacggcgtcgtttagagttttggcttaagaaatcatcaaactgattgtgaagtatatatggtggaatctgaaagttcttagtagtgatattttttatgatgggacgtatagtttcatacgttggttatttataagaaaaatgtaacatgtgttgtaacttctgtaactaaaaaaaaatattagatagaaatttaacgttcgtgtgggtcgtggctagtaataagagtgaacaataattcagaagtttcgttttcgacattaaatgtatgtaaaaagcaaaatactgtgaattacgtggtcattaaattcttgataagtcttaaaagaaaattcaaaattgtatacagtactttgattttggcttctgctctgcaccacgagtcgcatttaaatttgacatatgtgtctcatcaaccaaatttgaagaatgtgttcttgtacatacagcagagaacgtttgttcatagtaaccataacacattctttggttttaatatcatccaaaacagttttctactcctaatcaccaaatcaaatattaacaccgacacgcaaaatgatacaaaatatgtatctccctttattaatatatgtcgaatcaattgatgaaataatccaaaaaaggaaccatgctgaacctagtgaggaatgcgttgacaaatatgcatgtatacagtagatgtggatgtcaaaactactaagagaacgactctctcttcaatgtggctccacaaaacggttggtaatttgggatggccgtagtttccattaattggttaaactccaatttcccaattttgttggattcatgattaatctatcttcgtagaatattggataaattgtgatatcagagattcagtatataactaataataggttagaaattaattcacaaaaaacaactttttcaagtcaactatagtttataaacaaaacaaataaagagagttaactaaaatttgtgtgaagcatgaaggagcccacgaaattatctcaaagtgtgtggctcgtaggatttgacaaccaccatcatcatcgccatcccttactgattacggtacatgatttcatttaatgttaatttcttaattttcttttatttcatgaagtttcattttcgacataaatgtatatttaggaaataaaaaatcgtgattttcgtgattgttttttttttgaatccgtgataaaggcaatttggcttcgtcaactcgatggccatttcattattatccattatcaaagctaagatagttaccaaattttgtttaaagccttgtttcgatgtatatataaaacatgttctctctcgttagtaaccaatcagtttcaaagcataacatgtaaaattaatacttttcttttctttgtcggccacaaacacattcctttgttttggaattatggttcgagtatacacaatcgctaattcaacagttctactcctaagaaacaattcaagttttaacatcaatacacaaagccaaagggaaattccattttttatatacatgttggatgaatgattgacgaaaatatcgaatcgagtcaaacgatcgacaatgaaatgataaacatgtaggaaaggaaccgattgagatatgaaattcgagagattactaaaaataggaggaggaagccggtcctaacatttatgtggcctaaagcatattttaaaaaattatatataaaaaaaacattatgaaaaacaactaaaaatcatctattgttactcgaacatgggggagattgaagatttactaatggagtttagtacaatttcaaaggagacgttaatggctaagttttgtttgaaattgactattggatgacgactattggatgatgtaacccatacaccaaatttgtactagttacttcaaagctgctgtgacatctaccaaattgtgtttaacgcgatgtttctatatcaaacatgtcactcgtaagtcccaagtactctaataagtagtctaagtttaaaaccttatcgcctataacaagacatgtaaattagtactatcatttatttttggtcggcatggttgttacggcaataaatacattttactctgttgtttctgaattatgacagtaccggtattgagattttgggggtcccaaatatgaaaaacagtcaatatttttctacaaatataataaaatttgaattttaatatttcaaccaattattgagagaccgttaaacttacaaaagataccgtcaatggtaaacgagagattactaaaaataggagaaataagtgcaatttcaaaggagacgttaatggcaagtttttctcttccaaaattgactagtcgatgatgttaattgttaatgttgtccacgtgactcatacataaaccaaatactgtatgtactaaataatctacccggtccaaaccggtttggtaaactgaatcaccgatctagagaatcaaccttacttgtgcctttctcgctcaagtagagaagctcgacggtaaacagaaacacttgatacgacgtcgcataacaacgaacgatgacgtcgctaccgtacgccgatgccgattgtagcctcagggctttagctggccgtgcagagggattcggacgcttcgccgtcggtggtctccacggcgatctctatgtcgtcacttctcttgcaggtgatgtattcgtaaaatctatctacgaatctatatatgtatctctatgcccgatgctttaccgatgatcatactggaatgtatggataaattcgccttcgtattgattatgagatgcatttgttgattgtgttcgaagatcttgagattggttatgtgtggattttagatgatggacctgggactcttcgtgaaggaggtaggaggaaagagccgttatggattgtttttgcagtttctggaactataaatctcaattcatacttgagtgtatcgtcttacaagacgattgatggacgaggacaacgaattaagctcacagggaaaggaataagattgaaggaatgtgaacatatcatcatttgcaatttggagtttgaaggtggtagaggtcatgatgttgatggtattcagattaaaccaaagtctagacacatttggattgatcggtgtagtctccgcgattacgatgatgggcttattgatattactagacaaagcacggatattactgtttctaggtgaggtttgatgattttggatggttatggttagggtaatgtatgctcttgactggtgcttaatgttgcttctggtttctacagatgttattttgcacagcatgacaagacgatgctgattggagcagatccttctcatgttgaggatagatgtatccgagtgaccattcaccattgtttctttgatggaactaggcagagacaacctcgtctcagatttggaaaagttcatttgtacaacaactacacaagaaactggggaatatatgctgtttgtgctagtgtagaagcgcaggtaaactcttttgcagatcttagatcattgcttgaggtctcacctgaagattcttatgtttctgaaatcaggtgttctctcaatgcaatatatacgaagcaggagtgaagaagaaaacttttgaatactactcagaaaaggttaattctcgcttttcatttgcatcagagaaaatcttgttcttattttgaatccaccaccatcatcttgtgtgagtttgtttgtaggctgctgacaaggaagaagcgagaactgggttagtacgatctgaaaatgacttgttcttgaatggagctcaaccttccttgatgacaggagccagtgaagaatgtgtattccatccaagtgaacactacccaacatggactgtggagccaccatcagaaactctcaagcaaatcatgcaaatttgtaccggttggcaatctttgtcccgtccttctgatcatggagttcctaagtaatagttgcgattcaaatgttttcttgcatatcatatttccttctttttctagttattgaaggagtgaataatgcttttgttcttcagcacattatgtttacagtatgctgtgtgtgattttttatgcctttttcttctttgtgatttgtaattggcttcttgaatgtatatcactgaatcgaattctttatcagatttatatcagcttcggttattagagactactcgttttattcttaaagcgtatcgcaagtttgttttttcttagataatgaagaactcgtcataaattatgtaaagaaaatctcatttttttttttttgttctcattttctgttgcacacacaatgcaaacacacgtatctacatttttttcacttcacatcatgtaaaaaatggaatatttagccaaaactatggatcaagtctctcagcctgaaacacacccaagtgatttccaggatgaagaggaagaagatgaagaaaaagaagaggatgcatgaattggtgtaccgtggaaaagatcagagatgtaattctccaaattatctggcttgaatctcaccaagatctcaatgtttctctcctggccgagcattggtaagtacttcctgtaaaactctctgtattctggtacaagtttctttgctattgaaacctttagttcgtccctaagtttcgcatttggtacaactcgtgatgattgtttcatatatgcttcctcaaatgccgtgtgaaatcttctgaaatatattttagcttcctctggtgataggtctgtgggttcttctggtaaagacatgaaaacattggaccatgctgctatctcataattcccagcataagcgcagagtttatcttcgtgcttattgagccaatcatctccaaggagattccttaggggagttgaaccaaccgtttcaatgatgatctgaaggttgtttgcaaggaaaaggtaagacaaagaaacatccttgtaatgctctgctttggtgtctagtttgcatagcaaaaccaggattagccaagcaaaatggacagagagtgcgtgattgtgttgttcatcttccgaaattggagctctgacataggattccagcaggcgagtgtttctcgggagtggatggtctgctaggatttccgacaagactccgctgtacttagaaagggaagagatgaagttcattgttgatcgtgtcagtttatgaatccctcctccaggtgttagagctttcgtcgtatctttctgaatgattgattcaaaatccgtgagagcactgtggattgagacctttagtttttgcagcgatgtgagcgcctgagatttcacaccagctactgcatcaaagtggaatatcatctctatgtcttgccagagatcagagattgcagcctgcagatccattagcgggaagatcctctcgtgcgatttcttctccttggcaacaaattcagggaacttgaaaaggttagtggctgcttcgtttgcaatctcgtagaagcatgactcccttgttgaattggaagcagaaaagacatgatcacaaagaagtttctctccacggaagagcgtggcaatgccaatctttgcagcttttatccagttcttgatcatatgctcgagcgtgacccagtccgttctgtgaaatctggagcctttgtagatttcaatcccgagcaagctcagcccttcatctacaatagattttctgacccgcttataaatctttacgcactccttaccatatccgcaacttatcatactctctgctatcgccttaaggtcagacatcaccatagctgaagctttctcaacctgagtgatcgattcgccagctttcctcatctcattgtcactttcatcgtcgtcgtcagatcccataacatcttcaaattcagaattgctggagattgaggattgaccggaaactgattcaggatcaagcttgtctctgtttgaagataatatctggaagaactctttttcgagccttgccatggcgatctgcatcagggtctgagctagagcaagctttggagattgagagtcttgagagacaagaaagtgcatcgctctgcgcaaatcacggacacatctgatgaactctttagcctccttcctgctatggttgaacagagagacaatcttggtgaaggaaggcgtgttcgggtcccattttctgatgacggagtccgctgtctccacggtttcctccatcatagcctgagtaaagttctggtttagaggagaagccgggaaagaagtgaatgaagaaggcgaagaaggatgatatttaggagatgacgaagagaagaaagaaaatttcgccattttcgccattgaagaagaagaagctctctattctcttctttctgaattgaaagcgaagccttttaaaatggtgttacttggcttttactctttctattttaattagaaagatggtttttaacaattatatagagagcgagattggtcttgactttgaaaatgaaatcgatgacgatgtgcttacctgtgattatagacccagaccacaaagaaccattgacttcgatgtataatataagccttatatacttaaaagataactagagtacaaattttatatacatatgggcgacaaagtttttgctatccacgtctagaactagaattatatgactatttcattctgtcaacttataattttatataacagttaaattcatcaatttcatttcatttgactttttattgcatcattcgcattattgatcactaattatacttcttgttcgaatttcgtattggaagttttttgaccaaagaaaaaaaagaagactaatagagtttcactagaaaagtccgaaatttatatatttagcgttctcttatataaacgcgtttctacatttcaattcttgtgtgtctgtcaacgtctgcatttcagttaataagttatagttatcacagtaattaacgttttgaatcaatactatgatacaataagttgttaacgctgtccttgcaaactaacagctatacgtttattgtaatagttaagagaaaagtgttacaaaatatttaagttgattttacagcctaatgttatattagcactgttgatgtgtcataatctgatagtatatgtttgtgcttatagaggatagaaaaacaaatcacaaattatgtattatataaaactaatattctttcgtctgaccaaaaagatgatcataaaagatacgtactatacttcatgatcttgtctagaagaaaataaaacctatattccaagttttcccatacattagatatcatatacacagacacaagacattcgcatgttatgtatgtatggttttgcaagaaaaagtcaaatatacgcactcataaatcatgatataaagatatacgaaccggaggtattggcaatttccaggcgttacagattcttaaaagaccaaaatggagattcgcttaccaaagtcaactacatttacatatacatttcaactaatttggcttcaacgtcgtatatacgtgagttgtctaaatcattataagagcatataagctagtcaacgttttgtttcgacgactctctttctttaaacaatggctagtgttacttcacgtattcggttacattgctaacgaaccttaaagaatttagttattgtagctgtcttttttccttaaaagtggaatcttcttcaatcaacaaagcaatgactattgatcaatgccatcatttgattacaactcacagtttttgttttgacaattatcttgttatatacatatgagagaaaatgaactatagtagtgtttagttcgtttcagattgagattgattatgtttatgttatttgtttttttcccaaactttactaaggaagattgtaagcttgggggagccctaacgaatcagaaatgaatgatatcgtaagtgcgaaaacaatttgaagactggactgtgaagcggtcaactctcaggcgtagatcatcggagtaaagacaatgccaatgcaaaagtcaaaagtttataaagtatctttgataaccccaaaaatgataagaacataataatccaagtgggtatttttgacttattattatatagatacattaaactctaatgtagctggttctacttctagtcttccttctacaatgtgtattatcgtgtgacacgaaccaacattttggatgaataatataaacatttcttttgctcggaatgcttacatgttttagaatatgaacctctccctctccggtataatgatatgtttgaagaattaaatcttttagtttaaatatatcagaggagatcaaagatctttgacagcaaaacagaggtatacatacaacaagagaatattaaactttgatgtcttactttctacaatgttttcttcttctctcattctgtattatcaatgcagagaataagttatttcgtatggaccagacaaagtataattccactaaactgattagaattgaataagtaaatccatcacttcctggtgcttggttagtcctcccctgatggatcaagtcttcttgtgacagagatcgagtggcaacttcttgtttttctctgtatgcctctcctagagtagatttttgtttctgtagatcacagtcaacccttacgcattcgacttcctcgccactttgctgcaacaacacaaaagaccctgttcagattcataatgactttagaactgaggcttagaaagatagataaacgtctaaggcaagaagatctttggttgcccatagattcaagtaactttattttcctttgaagacactaacgggtacatcgcagacaagataaattacaaagcccataagaaaaactggaaatatgagcaaggtgtgcaacagaagcagaagcatgcgagtaatttctatttggtgatccttttaaacagtcaatttctctgtttacggtcacaattaacaagggacttttgttcaagaaggtaaaaatgtggattcatttgggagtaaaacacacacacaaaacatagaagcaacacaaaatttaacaatcataaaatccaccaggcaggtaacataaacgcacacaaatcacatgaatgtgtcaaatatctaatcttgtagaaagaggtaacatgaatttttttacagaagtgcaattaataattagaaatccataagccaggctaaaccaaattttttggaagataaggtttcacttttctcactagccagatcatactgagaaaaggagctactaaatcctcaatgtcaagcagcttgaaatattgaaaacccagaatcccaaatgctacatcagtaatgaaagcataaatgtttccgtaatagagaggtgagagaacatacattttagagagcttgttaggagtaccaccagtgaccttagccgagaggaggagagcaggctccgctttcatctgaataaaaagatctgactttgatttctccctcagtgagaagaaaatatggatcaaaaccttcccaaatctctccagaaagaacagtagataaatccatcaaagaatcatttagcaacttctcatgtaatctgacaactactcggaacatattagacaccaaagggttcctcaaaaagggtttcagtgcctccccaagttcaatgatatcagaaaacagagttttcttgtcattgctatcagttgagaatctgaatatgcagtcggaaaagacgtagagaccaagaagattaccatagagtggcaaaaacacatccttgtggttcccaacaccgcctacccagctttctctttgtttgctgacatgatctttagcgaaagcaagtagctgattgtggaatttactcctccagtcgagtagttgtgccagggaaaagtctctgtttggtagtttctgtagatggtaacagcaaaactgcaagatcagaagcttttcttcatggtgattatcgatttccttgtcgaaaacccgcctcactagatcactacctccctttggtggggatgtgtaatctgcggtgttgaagacccatctcgagagatattgcgaatactcattccagtgccctaagatggaagataaatggttgaagctcagttccaagactttatctacttgagtaggaacttccacggcagtgaagaaacacttctgaacatccgtagcgagttttgacctgatgacatcatcttcgtcctccaacaatttgatacaagtgaaccacatctctagaatttgatatgcgtatacatcacaagctttttgaaatttgcttggtgtagtttcagaggaaatttggtgatttgagacaagaggacctatgagcttcgcttgttccagtataccggatgctataatagcctctgcagatgcatggcgaacatttacttgctcggatggtaagcttttctgtttgatcaagttaacaaagtaggagacacaatcagttatacaactccatcttggttcctcttctttttcagattcgtttttgtggatgaacaaccccgtgagatgcttcacacaaattgccaggcaacacatgagtgtacctcgggttttagcacgtcgtgtgctctcatatagagaagtcagcctgccccaaagatgaaacaccgaatcatagttcaacgaaccaacgtaaatgccttcaacagattccttgttacatgattttttgaacataagaagattccactggaaaagaatccttaaaatgtagttctcacatttatggtttttctccttgtccaacagctctaataatatcacctggagaccgttttttgcccagttccaaatactgctcgactctgagaaactggaatcttctgacttcaaaaaccgcagaaaccacttcagtgttgcaagacgaacttcatatgattgatcagatatacaacgaaggagcctttcgttaaggtgaggaaaatctaatgcttcaggaactttctgcgattgcaaatttggtctttgagtaatctgaaaaacttccgctgcttcatcagatggctgaaatacgcaaccaaaataagatacagctgcttgttctctaagctcagcgattgaagggtcataataggagaaaccataagaagcatctgcatccaagcaatttgtagatagatccaagtgcaatttatagatgtccctgagatttttgctttcagagcatgtccattcaattactcgcatatgatcaagcactctcaaaaaagatgtacagaggatcgggcaagggcacgtcaatggagaagccaaccatgagcaatttgcaaggacattgatcaattttccaataatctgatccttcttagagttatcagcaaggtctctacagtttgtatctaggagattaccaagttgcaacaaaataccgtgaagataattgaaggacccaccttgggccccattagaaggtaatgttgaggcaattcggagcagaacgctttggagtttctcattggaaacaagacctactagagcacgtgatgccaaaacacgaacacggagattactttgagtagagcatttcataataaagggcataaaaacgaacgggtccaggtcatctccactttcacttgcaatgggtgagggcttaagcctagataaaagaatcagaatgggccataaactcggatggacaagatttgcgaggtttgaatcagatgaaccagatgtgtcaagtaaatcagttgctgcctttagttcactgtatatgaaagggtgcaacaaggggtaccttcaagaaaaccaagacaacattaaataatggatgaaaacaatgcattttcaattcaatgtagagacagctacctaaaaaaaagaatatcaggtgaagatcttatcagacatacctgtgaaaaaattcaagtccagtcaaggcacgacgggtagatccacgtttttgaacattaaggaatccaatcattcgacggaccaaggcagtgtatgcaagtgtggcactgtttctgacctcccaatatggtgaagagaaggatcttattgaaacaatcatagcctccgcagaaaacccagaagtatcagtgctcaagtttgtgtcattgaaagtagctttgagaacattgaacgcatgcaccgtcggaacaactccttcatcacggacctttgaaagtttttcatttgaatgcatatcagaagaattgatctcctcaaccatatgtttagaccctttctgttccaggggttccatgagaggcttctctgcaagacctattagccacctaagcgcccgtgggagaagcttctttggtgaaccttccggttctgagagaaaaagagcaataaatgcagcgggaattcctgcacttcgtcttaacacatcgtccactgtctgtccttttgccacagttctttccataagttgctccatccaggattctgtcagcttacaaagtctatgaaaagaaaaaacaaacacaatacgtcagtgaatagaaaaacaagttacaaggacacacaagaagcgtaaagttaaaagcataccttggatcgttcgaacatagtaaacggtggcacaaagctgtaaatccagctcttgtcttatctattgcaccattgtgcttcatttttaaaagtacttccaagaagtggtctccaatcttttcaagttgcttcaggtcaagcagtgattcagaatttcctatcactaaatcattggggactgaagaagctgtatcaccattttctaaaggtctaaggctgctggtaggcaatggaatctttcttataatggttcccaaaagaagactcacctgaagaaagaaagcagtttctatatgaagtttctcaaaaaaaattagaaataccatattctgcatttcaggatgaaaaagagcagctacttgagacaagtattaagaaaaatgaaaacgcaaaacaagtgataccaaagtaaggacaattatcagcaagatgacagaatcaatacctctttcatagcgagccagcaaccaaccataactacctgttctgattgtactgtttcatgcacatgttttggatatgtacttgtgtgttcctctgagagaacagcggcagaatcatcttgaacatttgaaaagaaactatcatcatctattatgtcatccatatcctcaggcaaacacaaagcatctgcagaaaccacccaaagtgctaatgtagttattctcgtcaccagtttcagaagcttttccagttcctttctcatctctgatatacttaacactgcattagagttccagtccaattcctcaaaagtatatcgcaaagctaataataccccatgaacaaaactgtttttacatgcttcagagagatcacgctctccctccgtcacagaagcatcaagccactgaataagtgatttaatatactcaaccacaggatacttcggtttagagttctgattacgacaatctatgttttcacactctctttcacaacaaaaaacagtagtggaaaccttgactatccaaccaaggtccaatacgtactttctgaagataagcctaagagtcaaagcacctgcatcactctctcttacccgtggactgcagactagttgtttggcccaaggaataatgatttggaccatgtcttcacttgaaatgccagtaaatggagttggaaaatgtagcaaaatacggaaagaattttccctaagcctgtcccaactatcaacaatcgatccaactagcaataacgttgaatcatgtgaagtgacaatatcacagtatgggtaaagatggccttgatgagaagtgggatccttagaagccacaacaggccagacttcaatcatgatctgtataagttctgtcgccattatttttctcctgtaaggggcagaagggtagcaagataaatacaaaaaggaacttagccacctcataaacttgaacaaactctctgctcgtagaactgcatttttgtcgcttttaagtggttgcaagctccctagcttatactgcttttccagcgacgtacggacccggagaaaaaatttcctgaacaaactggtccatttcatttgaaaacctgtagacgatgacctcatgttcaagggaacagcctccttcatgagataaagctctaagggagatggaaggctagaagtcttggggtttaagaagagtgtctctgcagcatccacacgaaccgactcatcaacatgggttaaggccatttttagccactcaatgggaatttttaactcaatacccttgatttgaacaactgcaaatgcatctgtacttcttttttgttcaatatccccttcaaggaatgcaagtgtacgacaaactttcagcaatgatactaaaacaaccactttctgttcaactgttagttccatactcatgttactcaactcagtatagtttagcttggtttcttcctcactcggtccaatagatatatacgcaagcaaaagaaatatactgtctacatccagttctagcaaaacttgtactgcataagtatttagattggacctgagtttcgacttgccagaagcaagcccgtaaaggaaaggaggcaaacaatgttctcgataacgcgcataaccctggtcaacaccttcgctcccccagctttcatcacgcaacagttcaaggaaacattttataaatgatgttacagcatagcagacatcatcatcaatatatgcatttgccatctcgaacaacaggttaggactcatatccatcaaagtcttcgcacctaaccgccttgtcaaggatgctaatggaacatatcttcctttacaacgtgatcctaaacgaagaagatagttgacaattttcaacaaagattccctcattcccactttatcatctgtctgatgaacagtggtttggatgtctagtaagaggtcaaacatgaggtgaacttgtttgactgtctggctcaaagggtcctccaaattgttccatataattctgagtactcgagctgccatgctgtctggcattggatcataaccttctgataaatcagttaacatagatgtcttgatctgttgcatgcaaatctgcatcacagttagtacgtgaaaatttaaatgactgtcaatggggttctcgcataaatcacaaagttcgagcaaaattccgtcatacagaatagttttgtgatcacaatcactgttgctcaatcgagcaaaagaggaaacaagaatacccctagaaactgtagtaagaatgcctcggatcaagcagagtctactcaaagatgaaaaactgcagatctcagaacaaatgtccccggcaaatggaattttgctaacaatatcagccaacctaacgacgctactccagcaaaatatacattgcgctataaacaatccaagctcttcgtctttgagacagacctgcagagcagcacagaaactcacaccagcagccacataacagtccctagaaaatgccagcgacttcaaaatgcttacttgaacagccaaaacactctccataaaacttgcatcctccccaactaaacccttaaacttcaaaggaaaccgctgaaacaagtaatacgagcaagacaaagcttcttggcattgctccataacagtaggaggaggcctatcacaagcttcagtgtctaagactataccattcaaccctgaaacgatatcataaccaaccagaagcgcgcaatcttcaattatatcaactaaatatcccaactttggcatgcccatcactgataaagcaactctagacacacagaatcgattaccaccatcttcaaaaccgccatattcatcacaaagctccttaaaacatgaactgatcactgaatgaaacttagtggttttagccaaggctgaaacaagggtcttatgaagaggcaaagaattctccatgaagagtatctccaagtaaaacctaatagcttcccttacagaaactgtctctctctcgcctccttcattctcattggccttggcgagaaactctccgaacgaagcaacaactttcttggcgtgattaacttgcgcgtagattgaattcaacgaaaccaattcttcaatgttggagtaaaacttgggacaagactgagacaaactagattggctcaaagaagcagtgaacgagctggggaacagaacagcactgtaagtataacgatggcgatgctgcagagctcgccacttcgcagacatgtttcagtgagctgaggaaaaacagagaaacaataaaaatttgaactttatttttttcacttgaatgaaaaatagaaaatatggtaaaacagattaaagatcataccgggaaaagcggctaagtgtacgagagagcttattaggaggccggagcaataccagtgagtaacctaagaggcgacgcggcggaggcggaagaaagcacccgccttcaaatctttcaactggagaagatatgggccttacttgtgtttttaatgggcctgatttttagacaaatgagaaaacattttggttgtctaggacgactgcttagttgtgctataatgagttcttgaagccaatatttcagttgatttgagtgtaaatttcagttgcaactggttgcatagctcatcaacacagttcgaacatggtaatgctcttgtctcagattgcttataaaacaattagctaggttcttagactgtcccaaagtgaataataaacaggtgatgatgttaagtggcttttgttcgcagaatcttacgtttttgcagattttattgccgagaccaaatagatcagcccacgagctagttctcgaaagtcaaatagggtaaatctcaaatttataacaaagaacgtgcgtgagagatcatacaatcatgtttgaagaatcaaatctttaattgaaagaaaattcagatatattagagaagactgagggaggactctctgacagtagaaagataattaaactttgatggcatactttctaattggaaagtacatgtctttcttcttctctcgttctgtcttcagcgacgcctatccaatgcagagaaaaagtcatgaagtatggaccaaaacaaagcatgtcactgaattcaaaatacctggtgtttagtgagtctccttctgatggctctagtcttcttgggacggagatcgagtggcaacaacttcttgtttttgtatgcttctctaagagcagacttttgtttctgtgagctcacagtcaacacttgcgcaatcgacttcctcaccactttgctgcaacaacccaaaaacaaaagaccacaattagatccataataacttaatttgaggccttaccaagattgctaaaagtcctaaacaaaaacaatggtcttgcttgttcagagattcaaatagattatataaatatctttcttttcccatttcgcagacatacaagataactaaaaatcccaaaaactgcaacaataaacccaagactaatctaagcctcgattgttttaaacaccaatgttttggcgtctgtgtgcatagggattttgcttaagatgctaaagatatctaaaaacaatgaacataaaagcaaacacaagcaaaaaaaaactgatgactaaagactagaaatcaacaattccataagccaggtaccaataccatgcaaagggcaacacactaatcacatgaatgtatcaaaatgcctaatttgtaaacactggcaccataaacaattcaatataaatgcaattaacaattaaaaaatcaacaatctagtaatctactattctcagtagctttagatcatactcagaaagaggctagtgattccaatatcaagcagctcaaaatattccaacatttgtataataaggctgagagtagagaacaattacatcttagagagcttgttaggagcaccaccagtgaccttagcgacacgtagggaagcaagctctgccttcaattctttcaattgagtagaaagatccgattttgatttatctctcaactcatgaaccttgattctcgctgttcacggatccatttcaacacaacacaataagaaaatggagccaaacataagcaactcaaacaataatggtggaaatgattcaagagtagggacttacccatggcgtcttcgagccctctctgactcagtctctttgcactgctatagtaagacacctgaaaccctaaactgaagaagatgaagagttctaaatgggcctcaatgatataaatgggccttaagtttagtacagacagtgaataatttattctttttagtcatggttaatacgttaatctgactcaccatgtggtatttacaaaattaatcagattgtaatatgtcactttatgtataatgtttttgtaggattgattcaaaattgaccttcgtgtgtcttgcaaatatattttttcttttgccggcaatgtgtcttgcaaattttccatatatatcgaatttggtaatttgaggtcaaatgttatcttcccctaaagaaaagttaggtaattaacaggataaatttattttagtcagctggtcccataagtaaaacgcattaagcggtttttcgttaaaagcttaatctgatttgactctttgatctctccctcttactaatttttttttttggtcagatataaaactctcttatctcgtgatcctcgtcgtctatatattgaaacaaatccagttttctttcttgaaacgtataacaaaaatagaacatcatggttatgtacaaagaggtatgtcttaatctttctctcttttcaattacgagttagctcttttgtcatgcaaagctctttgctttgtatctaaaaacgaagattcatgatacaattattgttttaagcttatataaaaatttggggtttcgtttgtcgttgtttaggattatgtttcgaactcacgagggatacaacttttcacgtgttcatggaaacaagaggagcagcaagaaccaaaggctttaatctttctctgtcatggctacgccatggaatcaagcatcaccatgagcagttccgtcttttaaaatcatgattataatatactcgtcaatatatatacattcatgattacattttaattgatattaaaacatattcatcaggcactgcagtgaggttggccaatgcgggtttctcggtctatggaatggactatgaagggcatggtaaatccgggggattaaatggttacgtcaaaaagtttgatgatcttgttcaagacgtctcttctcattactcttcaatttgcggtaagaatgtttttttttaagaaccaccaaaaaaaaataagttttacctccgaatagaccactatttttgaaaatatcgtaaacctaaatcttgtggtcttttgagaatttctcttcttcttcttctttttttcctccgtttgaaaatgttattaattattaatatattttggaaatgatgaatgtgaagagttggaagagaataaggggaagatgaggtttctaatgggagaatccatgggaggagcagttgtgttactcttggagagaaagaagcccaatttttgggacggtgccgttttagtcgctcccatgtgtaaggtatgtgtatgatcgatcggtctcgtgttcttcaagttttagggtagcccttagtatactatatccttactatataagtgttgacttctaaactttaagattgagatttttaccaaattgagttatttttcatgtaatataatgtctatttcactatttttagtaattagatatgaatcacttgatttttttttttttttttttttgagtaaagttagcagaagacataaagccacatccaatggtgatctcatttctcacaaagctaactcggtttattccaacttggaagatagttcctagcaacgatattattgacgtagcatttaaagaaacccacataagaaaacaggtaacatatttgattatcatcattttagtatagttttcgacgtttaattttctttatctaaaaaagaaatgattttaaaggtaagggacaatgagtattgctacaagggccgtcctcgcttgaaaaccgctcaccaacttttaatggttagcttggatcttgagaagaatcttgatcaggttaatttttttattttttttattttatcgatctcctttgatatctccaagctttgcttttatttaattaacaaaattggtgagtaaatactaagaaattgaatttaaaaaaacaggtatcgatgccatttattgtccttcacggtgaagatgataaagttacagacaaaaacgtaagcaaactattatacgaggtagcttcaagttcggacaagacttttaagttatacccgaacatgtggcatgggctcttatacggagaatctcctgagaatttggagattgtgtttagtgatatcataagctggttaaaggagagagcttctgtcacaaaccaaaagttggagactgagttaaagcatgtagatgatggtttttctatgcaaaaatgagtgtttaatttgcatgtgaactacaacgatgggttttatgtattactactagatcgaagaatgttgtaagttatgtacaccaaacagtacaagtcataatagaggctcgtaaatctttttctgttatcataccattcaaatgaaataaaagtctgtttgattaattttaaatccattggggaacctgaaaaaccaatccaatacacttttttgtttatatatatatatatatatatatatatatatatatattatgattcaaaacatccaattataaacaagctaaatgctaaacccaaaatcttttgctgatttgacgtaattttgaagcatcaatattttttctttttgaacatacaaaaaactcaaattcatgttcgaagattttacttctcaagaatagtacttaaaaaagattgcttctcacccaagatgatccccccaatctactctgcgtgatccaaggggaaactcgaatttaagaacaatatccagtaaattgtttgagtttgatggaaaacatgaaaaccattaataaaaggatgagatttagaacatcgccttaacttttgcttgcaaaaaaaaacttagcgagaccataaagcatctatgaaaggttggctacactaaatctagactacagaaatttatgttgtaagattttatcacatcctacgtaccgtctacagatgtatcatggtttgaattgcacgtcgaaatttcattttgttcaaattttagacctaaagtttgtggcattttgagttttattgaaaaaacgtgtgatatttttggaaaacaaaacatgaactgtggtatttatttgagtcaacatttatagtttgcattcggtctttttacctgcgtttactagctgcaaatggcatctgattttaaaacattaaaacaatcgataatgcgctttcatcaatttaagcccaccagccttatacagaacaaacgtatcaatgataaggtctaagtgagaaactgaaatttaagaacgaaaagtaaccaaccttctggttttacagagttaattggccacattattatgaagttacaacttcactaatgacatttaagaaaaaaaaaagaaaactcatcccgtcattagtgctttacttttggtgttatgaaattgctaaatttaggtcacctctaaaaaattagtaatagctccttcgagcgaagaaaaaggaaattactattgtcttattcaacccttttcaaacatttcttcttccacaagaaacaacaacgaagccatatattcttttgtgtcttagttgctactctcacattacattatctgggatcaaatatggttagtttcgttcttcttctctggcttacaaaaatctttacatgtcatgtgacttgacttttgtcaattacaggctcatgtggatgggcaagttggatatagcgaggtaaatatcattactctgatttttaagattcattgtttttctaatctctcatatgaataagagtcgatgattatgtgatgatttaggaattcatcgagaattcgcggggaatgcaactcttaacatgcaaatggtttccagtcaatcaagaaccaagagctctcatcttcttttgccatggctatgcaattgattgcagcaccacctttaaaggtatctatttacatatacctatatatgcattcattgaagaagaaaggggtgaatattaatgtgggttattcttacctacagatatagcacctaagtttgcaaaagaaggttttgctgtgcatggaattgaatatgaagggcatgggagatcaagcggtctctctgtctacattgataacttcgatcttctcatcgatgatgtctcttcacatttctccaaaatatctggtccatctcttctttgacctcattacacattgacattgctaacttacttgtcataacgttagatataagcctagactgttttaaaaccaaatttctgcgtttactacatgagaaaacaaaatttataaaaacattatcagtttttttttgcaaacaaagaaaaggtctgcttaaaaaattttaaatgtttttattcatacatattcaaataaaaggtttttatttatacatattcaaaaataatttgttctaaaccattgtccattgtctacttgtctaatgcaaattaatgcactagttatccttaatactaaaccgtgtgacttggattgtgtttgttgtgcgaggcagagatgggagataacacaaagaagaagaggtttttgatgggagagtcgatgggaggagcagtagtccttctcttgcaccgcaagaaacccgagttctgggatggaggaatccttattgcacccatgtgtaaggtgaacatatatattcagatatatatcattttatataagaattatgtataattactaatttgatgagagtcagattgctgaggagatgaaaccatcacgaatggttatatctatgataaatatggttacaaatctgatcccatcatggaaatcgataattcatggacccgatatccttaatagcgcgattaaactgcctgaaaagagacatgaggtatcttactctctttcggctataagataagagattttgtttttggtaaccaataaattctggaccttctcggaccagagtcgatatccactgaccgtttaaaacacagataagaacgaatccaaattgctacaatggatggcctcgtatgaagacaatgagcgagcttttcagaatcagcctcgatctagagaaccgtttgaacgaggtaatatcctatatacgcattgaggcaaagttccattggcttgttccagtcacttaataaataaaattacacaaacacacacacacacaattaatctacatgtctaggcaaaataaatgttaatttggggatatgttcatgtgagatataggtgacaatgccattcatagtcttgcatggagaagatgataaagtgacagataaaggagggagcaaactgctttatgaggtggctttgtctaatgacaagactttgaagttgtatccagaaatgtggcatagccttctttttggagagcctccggagaattcagagattgtgttcaatgacattgtccaatggatgcagacaagaatcactactcttcaagtaaaggctaataatcatgaagcaaaaacctcaaatctgattacctcagattcggtttagactataaccacgtcttgttttttgctccaagtgagactatatttttttctttccaaggtctgaatagataaaggctgcatgatagcttatcagattatagatggtttttggaaaccattttttttttttttttgtaaacaagatttgtatttttaattttttggatgttcttgtgattgtctcttctaaagcactactgatttaactaaatacaatttgaattatttttgaaaaatatcaattaataaaaaagaatgatttacaagtgaggaaaaaataaatcaaaattgtagttcaatagtttctagataagttttttttttacaaacttgtcatgattacagttcctcactgtttctatatgggcttagagtaaacttgttttgggccggtttcgttctaaaaaaataggcccatgattgaatctccgccgttagagaacaccactccactctcatagtcgaccttcgagcgagctatggcggtaatacttagggtttattcaccataatctgtcaaatccaaagttgaaatatgctctaggagttcacctaaactcggacgccctgcgaaaaacgtaaattgaaggctaaactctaaaccctagcccttgctggtggttgtagcttgctagtttgagagatgtatctgtacagtcttactctgcagcaggcgacgggaatcgtctgcgcaatcaacgggaacttttccggcggcaagacacaggagattgcggtagctcgtggcaagattttggatcttctccgtcccgacgagaacggtaagatccagacgatacactctgtagaagtatttggtgcaattagatccctagctcagtttaggttgactggtgcgcagaaggattatatcgtagtaggctcagattcgggtagaattgttatacttgagtacaacaaggagaaaaatgtgttcgataaagttcaccaggagacttttggcaagtctggttgcagaagaattgtgccaggccagtacgtggctgttgatcccaaaggaagagctgttatgattggagcttgtgagaagcagaaattggtttatgttttgaacagagataccactgctaggttaactatttcttctcccttggaggctcacaagtctcataccatttgctattctctctgcggtgtggactgcggtttcgataacccgatttttgcagccattgagcttgattactccgaggcagatcaggatcctactggccaagccgctagtgaggctcagaagcatttgactttctatgagctcgatttggggctcaaccatgtctctagaaagtggtctaaccctgttgacaatggtgccaatatgcttgttactgttcctggaggagctgatggcccgagtggagttttggtttgcgccgagaattttgttatttacatgaatcagggtcatccagacgtgagggctgtgattcctagacgaactgatttgcctgctgaacggggagttttggttgtttctgccgccgtgcacaagcagaagacaatgttcttctttttaatccagactgagtatggcgacgtttttaaggtcaccttggatcacaatggcgatcatgtctccgagttgaaggttaaatacttcgacaccattcccgtcgcatcctctatatgtgtgttgaagctgggattcctcttctctgcttcggaatttggaaaccatggtttgtatcagtttcaggccataggagaggaacctgatgtagagtcttcctcctctaatctgatggaaaccgaagaaggttttcagcccgtcttttttcagcctagacgacttaagaatcttgttaggattgaccaagtcgagagtctgatgccgctcatggacatgaaagtcctaaacatttttgaggaagaaacccctcaaatcttttcactttgcggccggggtccacgatcctctctaaggatactgagacctggtttggccatcactgagatggctgtctctcagcttccaggtcagccaagtgctgtgtggacggtgaaaaagaatgtgagcgatgagtttgatgcatacatcgttgtctcttttaccaatgctactcttgttctttcgattggtgaacaagttgaagaagttaatgacagtgggtttcttgatactaccccatccctggctgtctctctgatcggcgatgattctctcatgcaagtccatcccaatggtatccgccacataagggaagatggacgcattaacgaatggagaactcctggcaagaggtcaattgttaaagttgggtataatcggcttcaagtggtcattgcattgagtgggggagagcttatatactttgaggcagatatgactggccagctgatggaggtggagaagcatgaaatgtctggtgatgtggcttgcctggacattgcccctgttcctgaaggaagaaaaaggtctcgctttcttgctgtgggatcttatgataatactgtgcgcattctatctctggatcctgacgactgtctgcagattctcagcgtgcaaagtgtctcttcagctccggagtctctgctattcctcgaagttcaggcatcgattggtggagatgatggtgctgatcacccggcaaatctcttcctcaattctgggctgcagaatggtgttcttttcagaactgtggtggacatggtgactggtcagctttcggattctcgctcccggttcttggggctgaagcctcccaagctattctccatttctgtgagaggccggtctgcaatgctgtgtttgtctagccgaccttggcttggttatattcaccgaggacacttccatttgacgcctctgtcttacgagactctggaatttgctgcccccttttcatctgatcagtgcgctgaaggtgttgtctctgtcgctggggatgctctgagaatttttatgattgatcgtcttggtgaaacattcaacgaaacagtggtccctctgaggtacacgcctagaaagtttgttctccatcccaagcggaagttgttggttattatcgagagtgaccagggagcattcaccgcagaagagcgtgaagctgcaagaaaggagtgcttcgaggctggtggagtgggagaaaatggcaatggcaatgcagatcagatggagaatggtgcggatgatgaagataaggaagacccgctttctgatgagcagtacggttatccaaaagcagagtctgaaaagtgggtctcttgcatcagagttcttgatcccaagacagctacgacaacttgtctcctggaacttcaggacaacgaagctgcatacagtgtctgtacggtgaatttccatgataaagagtatggtacactgttggctgttggtacggtcaaagggatgcagttctggcccaagaagaatctagtggctgggttcatacatatttataggtttgtggaggatgggaaatctcttgagcttcttcataagacgcaagtagaaggtgttcctcttgctctgtgccagttccaaggaagactgctggcagggatcggacctgtcctcagattgtatgatttggggaaaaagagactgcttaggaaatgtgaaaacaagctctttccaaacaccattatctctatccaaacttaccgtgaccgtatatacgttggtgacattcaggaggtgagtggtagatcctttttcctatatattttacttactactgtgtgctttgttttatagaaatatctcatgtagccttttcattatcgttttgcagtctttccattactgcaagtacaggcgcgacgagaatcagctgtacatatttgcggatgactgcgtgccgaggtggctgacagcatcgcaccatgtggatttcgataccatggcaggtgcagataagtttgggaatgtgtattttgtgcggttgcctcaggatctgtcggaggagatagaagaagacccgactggcgggaagatcaagtgggagcaaggaaagctgaatggagcaccgaacaaagtggatgagatagtacagttccatgttggggacgttgtgacgtgcttgcagaaagcttcgatgatcccaggtggatcggaatcgataatgtatggaacagtgatgggtagcataggggcattacatgctttcacatcccgtgatgatgtggatttcttctctcatctggagatgcacatgaggcaggagtatcctcctctctgcgggagagaccacatggcttacagatctgcatattttccggtcaaggtaataaaccaaaacccatttgcttttcctccaaatcaaaagaagtcccttgattttgaatttgacactttttgcatcttgtaacaggacgtgatagatggagatctgtgtgagcagttcccgacactcccaatggacttgcagaggaaaatagcagacgagctggatagaacacctgcggagattctgaagaagctcgaagacgcaaggaacaagatcatttgataacacacgaaaagagagagagagagtcattgttttgttgaaggacaaagtagagagtagagaagaaagaggttataatagattttgtaaagctcttcaatggtttgttaaacaaaaccccgctcttgtgaaaactgatgaattaattgcaagtttacttttgaatctacaacagcatgaaacagttgcaccggtaaggtttcttccatattcaggattcctagtagctatggtagttcttgattcgttcatgagaagcattgagaattgtgaagcagcagacaagtgggagcctcgcctgtctcaacaaaagatcaggaactgcagacgaagagatctgagttaattcagaggctcttaacaccagccattctcgttgagagcaaaaacaaagattgaggatgcaggtgagctaaatgaatcttctgcaacatcagacttaaaaagtacctggtaagatacaaaaacaaagaattatttcacattttctgtaatcaacatttatctctttgttaactttgttagctaaacatgaaacttttccttttccaaatctcaatcacaaattgattttcaacaaatccgatattatctgaatcccatattatctcaaattcgataaattttataaatcattatatacaccgtcttattacattcttataaataagagacaatataactaactaaactaactatatctcttacgaaacatacttttctttttgtcaaagctccaaagttacttgatgacgatgcctggaagaaacaagcgcaaagaaagatcctggccggaaccgcaaacgcaaccacagtcagagattccttcttgtcttctttggcagctgttaacatgtctcctccgtcgacgatagcttacgtattaccgccaggttttaagtttgtgccaaacgatgaagaagtcatccattgttacttgaaaccttactcggacggcaacacgaacgtattgctccatgttcctattcatctcgtcaatatctacgagtcgaatccacaaacactttcaggttaacttgtctccgtccatatgtattgtttacttagttgaattctttagtttattaagttattaacatatatctatatatatatatttttgaaacagaggaattccagaagggtaacgataaagaatggtttattataacggagaggaacaaagttgatcaaggtttaagccaaacaaagagagttggttatggtgcgaaaaggcagaaacgtgtcgacactaacggaggatattggcacgcaacagtggctgcccaaaagatcaacgctggagatggtgtcgttcgcaacaaaaggccactggcatactacgttgggaaaccatcagaaggcgtcaaaactgattggttaatgcaagaatactctcttgatcactcttctcacaacaacgacaaggtaagaagtgtttcttggttcccaagttatttaggttttcaagttttggattctgttttgagtcttgtttttgttgtgcgtctaggattacactttgtgcaagatctatcttactccacaagcaacaaagatgaataaagaagtgggagaagagaagaagaagcagaagaaaggagaagccgttgtttcagttgcacctgtggaagcattggaagagcagctgccttgtaatgtcgagtatcatcaaccgctagcaccgctagattcttgccaaccgcagcctcatgatttggcgtatcaacagcagcagttttgtccaggcccactggattcttatcaaccgcagcctcatgatatggagaatcagcaaccgcataatgagaagctgaagaaagaagaagacgttgagcagctggatttgcatcaaccagaccaaggaaaaggatgctaattgatctctttcctctatcggcaatgttctccaaaaccagagataattctccctgtctttattgcttttgatgccttgatataaaacatttatactcaatttgtccaacattttcttagcgtcttagacttataaactaacacatacagatatagatataaaacaccggtgtattccagtttcagattacccaaatataaaaaatttgtgttttgatttgtgggtgggttaaagattttcgttatataatacattagatcttaaaaccaacaaataagtttcttcaaagcctaactaaatatactctaaacaaagttgtagatttaaaggtaaatttggactttgttacatcagttttcacaagagcggggttttgtttaacaaaccattgaagagctttacaaaatctattataacctctttcttctctactctctactttgtccttcaacaaaacatttagctcacctgcatcctcaatctttgtttttgctctcaacgagaatggctggtgttaagagcctctgaattaactcagatctcttcgtctgcagttcctgatcttttgttgagacaggcgaggctcccacttgtctgctgcttcacaattctcaatgcttctcatgaacgaatcaagaactaccatagctactaggaatcctgaatatggaagaaaccttaccggtgcaactgtttcatgctgttgtagattcaaaagtaaacttgcaattaattcatcagttttcacaagagcggggttttgtttaacaaaccattgaagagctttacaaaatctattataacctctttcttctctactctctactttgtccttcaacaaaacaatgactctctctctctcttttcgtgtgttatcaaatgatcttgttccttgcgtcttcgagcttcttcagaatctccgcaggtgttctatccagctcgtctgctattttcctctgcaagtccattgggagtgtcgggaactgctcacacagatctccatctatcacgtcctgttacaagatgcaaaaagtgtcaaattcaaaatcaagggacttcttttgatttggaggaaaagcaaatgggttttggtttattaccttgaccggaaaatatgcagatctgtaagccatgtggtctctcccgcagagaggaggatactcctgcctcatgtgcatctccagatgagagaagaaatccacatcatcacgggatgtgaaagcatgtaatgcccctatgctacccatcactgttccatacattatcgattccgatccacctgggatcatcgaagctttctgcaagcacgtcacaacgtccccaacatggaactgtactatctcatccactttgttcggtgctccattcagctttccttgctcccacttgatcttcccgccagtcgggtcttcttctatctcctccgacagatcctgaggcaaccgcacaaaatacacattcccaaacttatctgcacctgccatggtatcgaaatccacatggtgcgatgctgtcagccacctcggcacgcagtcatccgcaaatatgtacagctgattctcgtcgcgcctgtacttgcagtaatggaaagactgcaaaacgataatgaaaaggctacatgagatatttctataaaacaaagcacacagtagtaagtaaaatatataggaaaaaggatctaccactcacctcctgaatgtcaccaacgtatatacggtcacggtaagtttggatagagataatggtgtttggaaagagcttgttttcacatttcctaagcagtctctttttccccaaatcatacaatctgaggacaggtccgatccctgccagcagtcttccttggaactggcacagagcaagaggaacaccttctacttgcgtcttatgaagaagctcaagagatttcccatcctccacaaacctataaatatgtatgaacccagccactagattcttcttgggccagaactgcatccctttgaccgtaccaacagccaacagtgtaccatactctttatcatggaaattcaccgtacagacactgtatgcagcttcgttgtcctgaagttccaggagacaagttgtcgtagctgtcttgggatcaagaactctgatgcaagagacccacttttcagactctgcttttggataaccgtactgctcatcagaaagcgggtcttccttatcttcatcatccgcaccattctccatctgatctgcattgccattgccattttctcccactccaccagcctcgaagcactcctttcttgcagcttcacgctcttctgcggtgaatgctccctggtcactctcgataataaccaacaacttccgcttgggatggagaacaaactttctaggcgtgtacctcagagggaccactgtttcgttgaatgtttcaccaagacgatcaatcataaaaattctcagagcatccccagcgacagagacaacaccttcagcgcactgatcagatgaaaagggggcagcaaattccagagtctcgtaagacagaggcgtcaaatggaagtgtccccggtgaatataaccaagccaaggtcggctagacaaacacagcattgcagaccggcctctcacagaaatggagaatagcttgggaggcttcagccccaagaaccgggagcgagaatccgaaagctgaccagtcaccatgtccaccacagttctgaaaagaacaccattctgcagcccagaattgaggaagagatttgccgggtgatcagcaccatcatctccaccaatcgatgcctgaacttcgaggaatagcagagactccggagctgaagagacactttgcacgctgagaatctgcagacagtcgtcaggatccagagatagaatgcgcacagtattatcataagatcccacagcaagaaagcgagacctttttcttccttcaggaacaggggcaatgtccaggcaagccacatcaccagacatttcatgcttctccacctccatcagctggccagtcatatctgcctcaaagtatataagctctcccccgctcaatgcaatgaccacttgaagccgattatacccaactttaacaattgacctcttgccaggagttctccattcgttaatgcgtccatcttcccttatgtggcggataccattgggatggacttgcatgagagaatcatcgccgatcagagagacagccagggatggggtagtatcaagaaacccactgtcattaacttcttcaacttgttcaccaatcgaaagaacaagagtagcattggtaaaagagacaacgatgtatgcatcaaactcatcgctcacattctttttcaccgtccacacagcacttggctgacctggaagctgagagacagccatctcagtgatggccaaaccaggtctcagtatccttagagaggatcgtggaccccggccgcaaagtgaaaagatttgaggggtttcttcctcaaaaatgtttaggactttcatgtccatgagcggcatcagactctcgacttggtcaatcctaacaagattcttaagtcgtctaggctgaaaaaagacgggctgaaaaccttcttcggtttccatcagattagaggaggaagactctacatcaggttcctctcctatggcctgaaactgatacaaaccatggtttccaaattccgaagcagagaagaggaatcccagcttcaacacacatatagaggatgcgacgggaatggtgtcgaagtatttaaccttcaactcggagacatgatcgccattgtgatccaaggtgaccttaaaaacgtcgccatactcagtctggattaaaaagaagaacattgtcttctgcttgtgcacggcggcagaaacaaccaaaactccccgttcagcaggcaaatcagttcgtctaggaatcacagccctcacgtctggatgaccctgattcatgtaaataacaaaattctcggcgcaaaccaaaactccactcgggccatcagctcctccaggaacagtaacaagcatattggcaccattgtcaacagggttagaccactttctagagacatggttgagccccaaatcgagctcatagaaagtcaaatgcttctgagcctcactagcggcttggccagtaggatcctgatctgcctcggagtaatcaagctcaatggctgcaaaaatcgggttatcgaaaccgcagtccacaccgcagagagaatagcaaatggtatgagacttgtgagcctccaagggagaagaaatagttaacctagcagtggtatctctgttcaaaacataaaccaatttctgcttctcacaagctccaatcataacagctcttcctttgggatcaacagccacgtactggcctggcacaattcttctgcaaccagacttgccaaaagtctcctggtgaactttatcgaacacattcttctccttgttgtactcaagtataacaatcctacccgaatctgagcctactacgatataatccttctgcgcaccagtcaacctaaactgagctagggatctaattgcaccaaatacttctacagagtgtatcgtctggatcttaccgttctcgtcgggacggagaagatccaaaatcttgccacgagctaccgcaatctcctgtgtcttcccgccggagaagttcccgttgattgcgcagacgattccggtcgcctgctgcagagtaagactgtacagatacatctctcaaactagcaagctacaaccaccagcaacggctaggatttaggagaatccccgaaactggaaggacttgaggatggttttggctccgagtttaagtgaactcctagcgcatctgcaacttcggatttggcagattttggtgaggaacggaaagaataaaccctatataatgaattaccgccatagctccaaagctctacgacggaagtggtgttcctctgctaggcggtgattcaatcatgggcctaacttttggatctaatatagcaatattggcccatcttattttagatttaagcccaaataatgacaagagtccaagactggttttgtctccgattatcatttttcattaacaaaaattgattacaagaaattgaacttttttttttggtggaaacaagaaattgaacttaatataaagataaactatagaatgacaacattttctctcattaaatttgtgaagtcacaaaaatagagtggtattgcataattatgtgattggttaatattgcaaatataattatgttacttatgtatgaaattaacatggctaattaagatctctcttccatttaatttcttaacatgatttattctaatttctaacgaatagatagaaagaaacaaaaataggtcaaagaaatcaagaaggctagaagaagcaagaggagtaagtagcaaattaaaatgaataaaacctagaggtttagttaaatccattaatcaactagagtatgagaatgcaacgacaataacaacaacaacaactccactccatgatctcatcatcctccgcgcttcctatataaacaaacccattagccttagaaaataaacacaaacctaaaaccaaaacaaaaagaaagaacaatggccaaagctcttagccttacaatctttctctttctcttgatagcttccaatgtccaatccgctcgacttctcgatgaggttcaaactcagccacaattagtcccccaggtaccggaagaggaagatgatagtccacaagccgtaacaacaactccaacaccaattcctctcccaggacccgccacgggaggacccgagccaatcctagagttctttatgcatgacgtgctaggcgggtcacacccatcagcacgtgtggttacagggatagtagcacaaacagaggtgaatggaataccgttttctaaatccagcaacaacattttcccagtagataacgcagtgccgcttgtgaacgcaaacagcatcaacaacttaatcaatccaaacacagctccactcctaacaggacttagtggctctcaagccaacaccgtaatccaaaacagtaacggtaactctcaaggatcccttagctccaacaaccttccctttgtaaccacgggtcagctccctcccatagctgccctccaacagcttatgtttggctctatcaccgtggttgacgatgagctcaccgagggccatgagttgggctctgcgatcattgggagagcccaagggttttatctcgctagctctttggatggaactagccagaccctttcgttgacagtgttactccacgaagatcatgatcatcatgacacccttgatgatgccatcagcttctttggggttcaccgaaccgcttctcatgcgtcgcatatcgctgttgtgggtggaactgggagattcgagcatgctaaagggtatgctgtcgtggagactctacacaaccaggaagaccaacatgttactgatggtcatgataccattctccatttcagtgtttatcttacatactacaaagcttgaagagttatggcatttgttgaaagaaaattcctctgtttcgtttgtatgttcttctttataagtttaatgtgtggtctatattgtgttgtgcacgtttactgtactgaaaaaaagaaagttaaatgacaatctttgtctttaattctttatattcaaaactctctgttttttggcaaatacataccttttgcatttcaaccggtctatttattcgtttgtatatactatatactctcgaaattccatttttatatcaagttaacgtaagaataaatcctttttataattttttgtttacttaccaacaaaaagaaagaattattacataggagccatgtagtctagatttacgtgggctggaaattgaaacgtgttactactcttgtgagtagtcactcacttaacaacgcatgttaagtgagagttttcttatgaactttgacccaaaaagacatttctgcacaaggtataacaaattaacaacgttcaagttatgggctgatcataggatcggacacattttgaccacttaatcgcaaattaattggatattgttcaagaactttttctccatgttattgtttttgtttaattaatgtaaattttcaatttgaagaaatttctattaaaaacaaaaatggctgcatagacgttccccaaaaaaaaaacagccgatcatggaccaaaaaacagctgatcaacgtttttactgatctggctaaaatctggacttttgggttccgaaacttgcaagcatatggaaaccatgatacaaaatttccaagagtgctaaagccttttaaggtgaccaaaacccgaaataaatagtttatttgaaaatatatacacacgatacattcaattaaaacaccacaccatcgatccatgtatgagctagcgtccgtttcattatatataattaaacagaggcaatattatgtggaccacgtacgtataacgtaccaaaaagagtgtcatcactcctttttttgctgtcttgcttgttggaccgatgctaagatgaaaaaacgatttacttataaacatgcatgcgtcagggataaatcgttttcatgagattcatatatataaactataaggttttcgaaatctaacgatcgaacatcgcgatcagtcgtcggattctttagatgaatccgagataatcttctggatcatctggtttgtctcttcctccgacatttgctcttgtttgctttgcctctcctcatacgccttgaagaattccttgttctctttctccagctccttccacactgtcatttattttgttccaattcattaatattatgataacaaaatatataggccggatatatatgttgcaaggatttttatattttctttggctttttttgtatatgtataagttctagtcgccaggtagtcaagtcagtgtatataatcattaatttgattatgcatgagcacttatatgaatagaaatattgaagatcgatccatcacgctagatcctatctgtagctaattaagtacatattacatgatcaaattctaaatgatggtatcataatatgatgatagctccataatttatacatataattaatcccgttagagagtacataggtacagatatgtttgtgtgtttataaggattacggaaaggtaaaaagtattaaaaaagaggagagagagagagaggaattaaaaccagtagaggtgatgacaggagtgatgtttgcatgcttagagagagcttccacacactcttctttgctcatatggaagatcaaacatttctctatcatgtgctgcacctatacatacatacacacatccaaagatattgaggtacatacgtaaaagataaatagataagatcattcatagaatcgacggccggagaagtacatgaggttcttgaatcaatataatattaccatgtgaatgtaagaagcagaagaagaatctgccattgttaatggaaaccctagaattaacacccaaacttaaaagagagtcttctttctaaaagccacttgtggagataaagacagccatatatagaagaagatcacgcaaaaagatgaagaaggagacaaaagagtgaatagttgaaagatgatatgcatgcatggggccagaagccccacgtgggagattgatcataattggctgagaaaggattagaggagatttgtaaaatcactctttctctcttctcccttcgttttttcatttccatctcacgcatcctccacgtgatccatggcccctctctctctatacattttctgcaaaaaaacacttagtcgtgttttaatttccataatcttctagaaattaaatctatacctatttgttaatgttttaacttatataagaaaatgaaagttagttgtattggctctaagagcacatgattacataaaaggagagtaaacgataaattcggaattttaaaggattgatactttaaaaaatggcaaataaaataatgacttcaacaattgtaactcaccgaattccttttgaaacaatataaaaccatagtgcgaaatatacaaggcatataatcataagtcttaacacttatgttaaggcttaccattaataaagaaaagataactgttgtaacaaacatatcaaatgtatatctacgatgactaccgttgtgtgaccatcgatttgacaattgaaatatcataagaagacgtattagaggcctaggtcgcccctgaacatcggtacgtctactcttaaggtgaggcaagagaggcatgaacttgttttcctttttctttttctttttgttaaaggaatgttgaacttgtttaaatagggaataccatgcatataaaatatataactggtaagttgattgataagaacatttgaaatcacttgagcactttaagaaaaggagaagtgaagaaatatgcggatgagatccaaacgtggtttgcatcgagcaacattaaggatagaaaatctttgtaatttgttttttaaaaagtttgcattttgcattcacatgtataaatgtttcttttttctttgaatataatctagattcaaaaaagttataatatatatatatatatatatatatatatatatatattgtaactacatattatgagtatgagataatccatatacattagtaaacctctgtcgtaaaaagaaccaacgtaatttacacgacatgttatagataaatgtttgctactgaatttttcagttctgtcatatatgtatgagcctcctcctaattaagtcctaactcttaaccatgcataccaacatgtttattaatattaagaccggtaaaagaaacccagaaattatcatgtacttgttaatgtagcataaaagacaaaatcccactccatctcataaatgataatattgatatggattagtggaacctattacatctaataaacattacatctgacgtaagttacacagttgattttgtttttttataattagttttttgaagttacgctattgaaatttctgtctaatgattaacttagttctttttcttctgaaatttttgttatttatgaatgacacaaacccccgaaaaagttgattacaccaaccaaatgtcgtcgatctcttccagataatattcataatttaatcatctacgtaattgactcctcaaagtattaatttgggtatagtcgtaccaccatgacaagtgtagtatacgttacaataatggacggccaaaaaaaaggcaaagtgatcatcaatagttttttggttgggtaaggggacgcgggagattaaagtttttgattctaaaccaataggacgatgacatgtcacgtataacaatccacattgagatcaaataatcgcaaatggtacaaccatctgagtgacgtggcgcaaatggacatgagagagagtgagagaatctacaaaggttacgtaaagaagtgagagacaaacacattgtgggtgttttgtcgaaatcaaaggtttcagaaggatccatcaaattcagacattaaataaaactacacatattcctcatcatgtggacctctcaatttgagtcctgaaacagcaactattccctcgaatcaaattcaaaccctattcatgatcactttctctctcattccctctcctcgtcaacaagattacaaaccaagacgcctattctctctcatccacttatttcttttacctaagatacttccttatccagctcttaagatcatgctatcaaagttcattcgaatccgtatgagtgattatgtagttataatgagcgtatatttcatttataaggaatttgaaaacggtttatgtgttacaagaaaatagtgtatgtattgtaacgagtaacgtatatattacataaaaattactacggagtttactctattttcttctgtctgttcattgttctattttctctgtgttcatacttatattcttttggcttagagataatcatatacgtatagtataccggattttacttctaaagcgcattcagttaaatatgaactttcagtttttaacttttctaccaaataaattaaggcacatcataactactttccatggttattatgcttggtatcttgtggtcgtggaagctgagtcttacatgacttcatatagttattttctttcttttttctaaatcagctattagatactggtgtaatttatggttattctcttgcaactatattcataatttagcaaagagactatatattattcatggatcacattttgtccaaattgacaaagccatcaagaattattgattaccctacccatattgaatgtctatcgttcgatttttctcaagaatgaaactttggtggggtttctgattaatactagtaagtcattaagaggttcgaaataatatcacagaagacgagacagcagaaagacgagacagtgcaaaaagagacaaaggtggtgcagtagactcactattattattgccttaactcaattttcaaaccaaaagctctcagaaagcaaacccacatttgtcccatggacaagtggagattctattgaccacacccactccacttgatttttcctattctctaaagccaaattgctccaaaaaaaaatctttaaatttttgggttaaagtgtacgatgtgattgaatttctgttatccaatgagatcatgccgtgtcagcataacggaatatgtttgttgtattttttcctttgagccaaaacaagtgatcagagacgtaatgatattataggggcatctagctacgtattggattatgaatactttaggtgtcttgattttttctgtctaataaatctaagctagttggttggcccaattagatcacgattggaatcgaaagtttcgtttcgattactttgtatcaagtatcaaccgattaaatgatatttattgctcaagttagcaaatactcaaatgttttactaaacgctcgagtttggttgaaagcacaaaaaaaaacaaaaaactcaccatgttgtacaatacacaaattgttcaagctacgaaacaaaactacaactttatccgggtccattcatagagtggatccaaactttaggttataattcgatatttggacaatttaggaaagccttatactattttgaagatcttggtctgcctcaacttaggattccttatttctctgtatatattttttttcatatcaagattagacattgtgaacaagtataaactgtccgtggacaacaatatttggacgtttcaatttcaacgcttctcaatgctgcaaatattgaagtatcaaacgtccgttgttcaataacgatgatattattattatcattcaagtcttcaaatgttttgccgtgtgttacatagaatatgatgaatttagctaatacaatgtatctgttttttttggacaaatacaatgtatcttatcctcgacattttcgtgcttatgcacacacacggttaatacatactacttttgtgtggcattcggtttcttaaataatcaaatactagatgtatttttctaagaaaaatcaaactatttcttaaatatgtataaatttttggctatatataatataagatacaaatatgaaatatcgcttgccgccacaaaagaaaaaatatcaccaaatttttggctatccttcttcttttcacgatatcgttaaaagtgggctttacaaaattgtcataggcctataagtaagcccagtatgagtatttcgcttcttcttttttccttttcctttcagatctgctagcattatccagtatttgttcttgtctgaaattctgattaatttgctaacaaagacttataaataatgattttgacttaggatcttcacggttaattttctaatcaacaaaaataaccaggtaaattaagaaaaattacatatgaaattagtcactcactagtaaactaaaaattatggaagaattaaaaaaacataataaaatatagaatggagaagataacgtatataaagatgagattcatccaaacagcataaagagaagcttccatatatcacagccatggtggttgtcactcacatctccacttccttccaccaaatctctccttccttcttccatctccgtcttcgtaatccctccaccacttcttcgtctcgtcccaaactcgacggtggtttcgctttgtcaattcgagcttacatagagaaaccaaactctttctccaccttcgctaacaaagtcatcggttctcttcccgttatcggactcctcgctcgaattatcagcgatgaaggcggcgttggtagagatctcgtcgatttcgctgagtttaggaaacgagttgggaataaatgtactcctgatgattctagggctttctatgagttccaacagcgacgaggcaaggtaaaagttctgattttgagcttagattcatgaaattgaattgttgggttttttgttaatgtgtgatcagtgttgaattatagccttgttgttgctctgttttgttgttaggcaggtgagcctttgtatgtgcttctgtgttgttgggttgctgcagtaggtgcaggtcttctcaaatctgaagagattcttgaaggtgttactagagttagcatttccaatgatctcgagtttgaagaacagaacttcattgctttgatgactgaagctagacaggtttgttctggtatttggttcaagtactaaatgtcactcatgtgtcagaaaggttgatacttttgttgggttatacagagaagagcaaagttgaacattgatgcgccaacaataccgatggaactaagagttgaaaaggctcttgaaggtatttatgcttgttgctttcggagaggacttattgaagaggaggatgagaagcttcttaaagtgatgttaatagcggttttcccatcggttgagaagtctgagatagagagaatcatcaaagagaaggcgacaagggttgaggaaggaggagaggaagagaatgttatggcgaaacggttgcctaaagaagctattcaaatgcagatgaaggatcttgaattccttcaacaacaaaacatagagtcttaacaatagaggttgagatgccaaaacatgtttactttttcagtacggattattttaaaaaatgcaatcaacttttttcagtcatgagcaagtaattgttactgcataggtttcgagatatggttgcttcctatcatatcttttgagaacttggattgattcattcagttttttagatggtgtttgccgtatggtagatgtgtgaatttgctccagtacattggaacaacatttgaaactataggtaatagagttataaacttagttttcaataagatgtttttgtaagacattaaaataatatagtccatctaaaaaaaaaggatgagtttgctaatatgaatatgtaaaaacttcaaataaagaaagcttctaagcattcaaacattagaaaaggtattattatattcaatcaattttgatggttacatttgtttgataagatatagtgataacaataattttctttttgcttttctacgctccatcctcccattcgaaacagtatggattgtttttcttctcacgagaaatacgacaaataggggttacatcgtcttgtcctacttcccatatacattctttacaaatcggaagttctccaactggactatcatctcttgatgctttaaatatataaaaataatgagatccaccattatgccacgtaaaatgacaacgaaatttcgtagttttaaaaaagttaacataaaatctgaaaccccatgcaccattccaaggaatatgtttaagcccaaaatcatcttcactagatctgcaatgtacattcaaaatttctctattttttaacttgttgcggattacaacatgtttttcgcttagaggtaacaagccatcgccgcccgaagttggtgcttccgctggagcatcagaaagaactaatgcagacacaaaaagaataagagtataatagatcatacacaacattataaaatgaggtttacttgtgaaagccatggttaagtaaattatgtaggagtgttgttagataaaacttataagttctctatttatagatgtaacaaattgtaaatatatttaacagtgagagtgactaaacatcatgtaacgtataatgcatgtatttagtctatgttagtattcaaagttgtagattcatgcctaaatttatattgtttccttggaagtttacaaatttactaattttaaaatatgaattatatatcatttttgataagaattatgattcggaatgtgtcttatatattataatttacaatacatggaaataaatcaatctatttgactgtcgaaacgagaatttttttttttttgattgtgactttgactttctaaaactactaaaatccaaaaccttattttgtaggtttagaaagtttttcttttgcaaccaatggacatggtgaattttcctaatgatctctgtatcgattcgattttgttttatgagaatatcaaactagctctaatgagggttaccgtggtattatatcaatcaatgattattctgatactaattagagaacaagaaagattttgaatcaaaacttgtacaagtaagagataaacgtgcaagatttattacgattttagaggaacttatattctgggaaatggatcataatataccattaaattttaaaggccatttcacgaaatatctcaaaaatcatatagagaatcaagactcatgactcaggagtgttacttagtaatgtaagttcacaacgtaaacgagagataatcgtaggatttatatggttctacaatataatgaatagtataacccatctaattttctttttagtttgcttatgtgtatacataacaacttcacataaagaaagcttataagcattcaaacattcgaacattataaatggtattatatttattcaatcattctcatggttacatttatttgataaattatagtgataacaaaaacttttttttttcttcttaaggaccatctttccatttaaaacagtaaggcaaatgtctcccatcacgaacaatacgacaaatatggccgttatcaccatattttcctacttcccatatacattctttacaaactggaaaacgtccatctggattatcatctttgtatactttaaaaatattaaagtaatgagatccgccattatgccaagtaaagtgacaacgaaatttggtatttttccaaaagttgacgtgaaagctgaaatcccatgtaccattccaaggaatatggaccatcccaaaatcatgttcactggatctgcaatgtacattcaaaatttctctattttttaccacattgcggattacaacatgttttttggctagaggtaagaaaccgtcagcacccgaacttggtgattctgcgggagcattaagaaaatctaaagcagacacaaaaagaattaaagtagaaaagatcataaataacattagaaaatgagatttattattaaaagtcatgactaggtaaattatgtaggtgtggttagatagaacttagagacaccctatttatagatataagaacatgtcaatatatttgagagtgaaggtgactaacattcatgtaacgttgaatacatgtacttactccatattagtattcaacgatataaattttttttttttccttttgagttatagatttattagttttaataagaaataaatacgtgtttggtaaaaaatattttcggttatgtcttatatattataactagatcataacccgtgctatacagcacgggcattaatattttttataaattaaattgtatactttgtttgaattacacaagaaatagtatagtataaaaatgatgtcataatatttttcaatgtttgtactatttgcatataatgctgcattatattgaatttgtttaaaaatgttacttttataataaatacaacatatgtagttttaagtaaatgtgtaaaatttgtatacaagttgttttggtaagaaacatgttttctttgtattagaggatataatttttggcctaacttagaattagtctttgtatagcattttggttatatcggtggacctaattggagcctatattagattatctttaatagagctaacgaaagaacggacccgataaccaatctaatacccgaaccaaaaaatcgggttaaggcgggttaaaattttaggaaatttccttattaggtagagttttagtaaatccgtagatatccgattggtccgtaaattacccattacccaaaaagagtattcaaaaacccaaacattaatttaatatccaaaatattaattatatttaatcgtaatattatctaattatctaagattataattataaatctaaatatatcaattaattttggacctaaatatccaaaacaactaaactattcaaaaattatttgttatgtttgtgaaaatttagtaaaatatattcaaatataattaaatttattaaaacttaacaaatttaaaagttttttttgtttggagacccgctatctacatacaaatttctcgtttctattttttttggtatttttagagtctgaaacgttttgtgcaaactgacccaaacccaactggatcctatccgaaccagaaccgaatatttagaattattctattaggtagtaaatcatatacccattaatcccaaatccgaacgggttctacccgaactcgaatgggttactcatatgcccaaccttattctctgatttaattatctaaaaactcccaaaaaaaacatatgttttgctgactactttttattccaaaaaatttacatcctcttctgccaaaatcatttcataagacatcccaaaacccttggaataatgattccatgaatgaagaatcctaatttgaatataccaagaggttttgaaaggttttaagttttttataggtgtgtatgtgagaaggtacagacaccgtgatggtaatctgcttatttataattttaacttgcagtataccgcaggtaggcttatattttagttaaactaaaaacttttattgtaaagatgattataaatatatgatattattttatttgattttaaatgtatagtaaactgcgagttgtatatgttttgttgatattatttatattgtttagtgtttaaaattatacacttgtattttgattgttaattttagagtttaacttgtagtataccatcttgtattaatatcgatttaaacccgtcaattctaggattttccagcttgtattaaaaattaaatcacatcatacacataaaaaaaatataatatgttattaattattgtaatatataagattataaattttaaaaataatatgtatgaaattgaatataaatattcaaattatgactcagtactcagtagaaaattttcttaaatctatttttgacccgttataatatttttcatgtattgaacagtttatattcttttttaaaatttaaattatgtcatatgagaaaaaaatctaattattttttataacgataatattattttttgcaaaaatagaatcatataaagatgagaggtgaactataataattaataaaaaaattaatatgataatttagatatcaaatctaatttgttgattttaattgtttactttttagaaattaataatgtatttcgttttttaattaaatttaattaattaaattagtatttgactttttaatttttaaagagatgaattaatttactctttaaattttatttctaatggcatacctatgtaattacttacaaaaaataaggttacatttaaaatgtactttccaaataatatagtaggatttacaatatttggaaaaataattaatttttttgactgtcgcaaaaaaaataataatatctttttgatgttttcactttgtaaaactattaaagatcgcaaagtcttatttttaataatttacttaagacccatgaatttgtttagtttacacaaaacacaaattaactgatttgggtgaaaagatgacaaatatattcaacggacttcgtaaaatgggctttgcagttgggcttcacacattcgttcttcgaccttttatcagtccgatcaacttatatataaaagaacatcaaatcagcttttgctaatgagaattatcatatggtaattaatgtatcaatcaatgcacaaaagactttgaattcatcggaattaaacacacacaccttagtaagagttaagaatatgtttccaccgaactaacagaaacatgatactaacagaaactcaagttggttgttcgtgtaataaaatcaaaactagatcataatccgtgctagcacgggcattaatattttgtataaattaaattatatactttgtttgaattatataggaaatattatagtacaaaagtgatactataatatttttcaatatttttactatttggatataatgctgcattggattgactttgtttaaaaatgttatttttatactaaatacaacatatgtacttttaagtaaatgagtaaaatttgtatacaatttgttttggtaagaaacaagttttctttgtattagaggatctaatttttggcctaacttagaattagtctttcagttatatttgtggacctaattgggccctatattaaattatttttgatagggctgacgaaaaacggacccgataaccaacccaatacccaaaccaaaaaacggggttagggcgggtttaaattttaggaaattttcttattgggtagagttttaataaacccgtggatatccgattggttcagaaattacccgttacccaaaaagggtattcaaaaacccaaacattaatttaatatccaaaatattaattatatttaatcgtaatatttagattataattataaatctaaatatgtcaattaattttggacctaaatattcaaaacaactaaactattcaaaaattatttgttatgtttgtcaaaatttagtaaaatatattcaaatataattaaatttattaaaacttaacaaatttaaaagttttttttgtttggagacccgctatctacatacaaaatacccgtttctaatttttgggtatttttacggcctgaaactttttatccaaactgacccaaacccacctggacccgacccgaaccagaaccgaatatttagaattattctattgggtagtaaatcatataccattaatcctaaacctgaacgggttctacccgaactcgaatgggttactcatatgtccagccctattctctgatttaattatctaaaaactcccaaaaaaaacatatgtttcgctaattactttttattcgaaattttttgcatcctcttctgccaaaatcattatataaaacatcccaaaacccttggaataatgattccataaatgaaaatctatttttgacccgttataatatttttcatgtattgaacagtttatattcgtttgaaaaaaattcaaattatagcatatgcgaaaaaactctaattattttttataacgatgatattatttttcgcaaaaacagaatcatttaaagatgagaggtgaactataataattaataaaaaattaatatgataatttagatatcaaatctaatttgttgattgtaattggttacttttaaaaattaccaatgtatttcgttttttaattaattaaattagtatttgactttttaattcttaaagagatgaattaatttactttttaaagtattacttctaatggcatacctatgtacttacttacaaaaaataaggttacatttaaaatgtacttcccaaataatatagtaggattgaatctttcgactaaaaaaaggttctatcttcttcttcttctccttatgtgacaagaacgaacaatcctccattgacccaaatttcgaaaatgtcaacgaatctttttcgtcttattctcgtattcatcactttatctatcgcttcatctctgtcaactccgtcgccggctgattctcctccttatctatggccgttaccggcggagttttcgttcggaaacgaaacgctctcggtggatcccgccgtgactctaatcgtagctggaaatggtggtggatctccgattgttagagctgcgtttgtacaaacaggagataaacgtgcatgatttaatatgattttagaggaacttatgttctaggaaatagacccaaagataccatcaaattttaaagaccatttcacgagatatctcaaaagtcaaaagactgtctatacgtacgttagggacttatgtctcttcgttttggaaaacaagacattattatcttctctaagcacatcatgcaaacttagtataatcttcttatgatgtagaatcaggactcatgactcatgagtgttacttagtaatgtaagttcacaacgtaagcgagagataatcgtaggatttatatggttctacaatataatgaatagtataacccatctaattttctttttagtttgcttatgtgtatacataacaacttcacataaagaaagcttataagcattcaaacattcgaacattataaatggtattatatttattcaatcattctcatggttacatttatttgataaattatagtgataacaaaaactttttttcttcttcttaaggaccatcttcccatttaaaacagtaaggcaaatgtctcccatcacgatcaatacgacaaatatggccgttatcaccatattttcctacttcccatatacattttttacaaactggaaaacgtccatctggattatcatctctgtatactttaaaaatattaaagtaatgagatccgtcattatgtcaagtaaagtgacaacgaaatttggtatttttccaaaagttgacgtgaaagctgaaatcccatgtaccattccaaggaatatggaccatcccaaagtcatcttcactcgatctgcaatgtacattcaaaatttctctattttttaccacattgcggattacaacatgttttttggctagaggtaagtagtcgtcagggtccgaacttggtacttctacgggagcattagaaaaattcaatgcagacacaaaaagaataagaatagaaaagatcataaataacattggaaaatgagatttattattaaaagtcataactaggtaaattatgtaggtgtggttagatagaacttagagacaccctatttatagagataagaacatgtcaatatatttgagagtgaagttgactaacattcatgtaacgttaaatacatgtacttactctatgttagtattcaactcaacgacataattttttttttttccttttgagttatagatttattagttttaataagaaataaatatgtgtttggtaaaaaatatttttagttatgttttatatattataatctacaatatttggaaaaatagttaatcattttttgactgtcacataaaaagaaaaaatctttttgatgctttgactttgtaaaactattaaaagatctcaaagtcttatttttattaaatttacataagacccatgaaattgtttagtttacacaaaacacaaattaactggtctgggtgaaaagatgataaatatattaaacagacttcgtaaaatgggctttgcagttgggctttatacgttcgttcttcgaccctttatgaatccgatcaacttgtatataaaagaacatcaaatcagcttttgctagtgagaaatatcatatggtaattaatgtatcaatcaatgcacattctgatactaatcagaacacaaaagattttgaattcatcggaactaaacacacacaccttagtaagagttaagaaatatgtttccaccgaactaacagaaacatgataccaactcaagttggttgttcgtgtaataaataaaaattgaatctttcgactaaaacaaagtttatcttcttcttcttcttatgtgacaagaacgaacaatcctccattgacccaaatttcgaaaatgtcaacgaatcttcttcgtcttattctcctattcatcactttatctatcacttcatctctgtcaactccgtcgccggctgattctcctccttatctatggccgttaccggcggagttttcgttcggaaacgaaacgctctcggtggatcccaccgtgactctaatcgtagctggaaatggcggtggatctctgattattagagctgcgtttgataggtatatgggtataatctttaaacacgcttctggtagaggttctctattgtcgaggattagatttctgaaaatggttgagtatgatatcacttctttgaagatcgttgttcattctgattctgaggaggtaaaaaccaaaactttgattccttcaattggaaagtttcaatcttttaggagctgatagcggcaaatagttaaattggtttgttttctgttgaatttcagcttcaattgggtgtggatgagagttatacattgatggtgtcgaagaagaacgagcaatcgattgttggagcagccacgatcgaggttttacttttgctactatagcttcttcatatgaggaatgtgtttgtgggaatcttataggttattgtttcttgtggtttcaggctaatacagtttatggtgcacttagaggattggaggtgtgtaacttaatagtatagtttgaagactatgttgagtgttaatttgatcatgattcgtgagccttgaattgtttcatcgagttgtagttcacgagtgttatggaatctttgctaatttgtgttgtttcttaaatttgtttgcagacatttagccagttgtgtgcctttgattatataaccaaatctgtgcaaatatataaagcaccatggtatattcaagataaacctagatttggataccgcggtctgctgataggtaataagtccgtatctctttctctcatttgctttcttgtccatcacatggaaagagaatgtaatcatgtgctggctattacttactacttgttccatttgcagatacatcaagacattatttaccaattgatgttattaagcaaataatcgaatccatgtcctttgccaaacttgtaagcttacatgcttgttttttgaggatacagaaagttaaactttctttcaagatttatctgatatctaatttcttcccttctgtttcacatgggcggttattgtgaggtagaatgtcctgcattggcacattgtagacgagcaatcatttcctcttgaaactcctacatatcctaatttgtggaaaggagcttattcgagatgggaacgttatacagttgaggatgcctctgagattgtcaggtaatcgcttgaagccttgaagttttttatgttagagaagtatcttatttattccaaccctccatgatcatttgatcatcaactattcttttacttactaatatgtgttttttttcctttttgtgtttcacggcctgtttttgatttccactgtgaaggtttgccaaaatgagaggtacttatttattaaatatggagcctaacatgatttttatgtcaagcaattctgaatggtttaagctgagaatgctttaacagatttctattttaacgacctgcttctcatggttgagagattgattacaggtattaatgtcatggctgaagtagatgtccctggccatgcggaatcgtggtaagattaggaagaatttgaaattgttcctctcttaatgtcacactattgatagtcaagattgtaatatcccagtagcataggaccatacctttctaagatttgaaaaacacacaaatgtggatatactttgtgttactatactcctaatgcttagaggaagtcatggtgtaagggtttaagttagcattttcttcatggtcatgttttttggggtattttatagttttcactttgattactgatacaactatcctctttgagcgtaaggtttgtttccaatgcaggggaactggataccctgatctttggccgtctctgtcttgccgagagccccttgatgttactaaaaactttacattcgatgtgatttctggcattttagcaggtctagttcaagtagtgtacacatttgaagcatagctccttttctagtgttcgaatccaattagtattcaatcttgtaaaggaaaagttaagcttatagagatccggtaaaaggttattaggaaatgtattgcatcttaaattgtgtattattatctgtatgtcctatttagattctcatattttctcttgtatcttggtttgtaacagatatgagaaagatattcccatttgagcttttccacttgggtggtgatgaagttaatacaggttagttgtttaacacctgaaatccctgcttccatttctcatttgtgtttgcatctcttaagttcttcactagtcggtctcttgtctggcagattgctggaaaaacacaactcatgttaaagaatggtacactcatgactctcccactgttatcttgttgatcattatatgagctaatactatttgagttagttaattgatatgaaaactcttgcttctttatcaccttttgcttgatatgttcatcattctcaactgcaggcttcagggtcgcaacttcacgactaaggacgcatataaatactttgtactccgagcgcaacagatagctatatcgaaaaattggacacctgtcaactggtacaatctttgacaaagattgcattatctgtcaagttctctagttcctttaacaaactgttgcaaagggtttcagttctatattctcttgttgtttggctttgaagaccaaaagattgacacgaatactatgtaataatcccagggaagaaaccttcagttcctttggaaaagatcttgatccgcggactgtgattcaaaactggtaagatcatacagtaccatagaaaaacagaaatcttcgtctcttgtcatagtttttttttcattatataggtcaaatctgctcactaaatctcgttgcaggctagtgtctgatatatgtcaaaaagcagtagcaaaaggattcaggtgcattttcagtaaccaaggatattggtacctcgaccatttagatgttccgtgggaagaggtttataacaccgagcctctaaatggaatcgaggatccttctctccaaaagcttgtcatcggaggagaagtttgcatgtggggtgaaacagctgatacatccgttgtccttcagaccatttggcctcgtgctgcagcagctgcaggtaactctacatgatcttttattttgtctcagtttggatttggtttagttttgcttaaacgctcacctctactgttgatatttcctaaaccgttatcgttggtgaaacagaacggatgtggagcaccagagaggccgtgtcaaaggggaacataacgttaaccgcattgccacgtctacactacttcagatgtctactgaataaccgtggcgttccagcggctccagtggataacttttacgcacgaagaccccccttgggacctggctcttgctatgctcagtgatccaaaacgtttcttctcattgtactatatgtaatgtctcgtctgaaatctggttgtcacgttgctttttctgttctaaattgtgtgcttctcaatttactcaaatcatgacaacatctgaaattacgatctaaaacacacgacgctcttaccacattgttaattagtaaaaaacatttgactttgtagacataaggaaaaaagattcctcactattgtaatatttgtttctcgaccggtcctatatactattacataatgttgaaatatgaactagcaaaacgacatgattattaatctcatatcagaatatgtaatattttatagtggtaaaagatagctagatcacgttgaattgttttggtgtttttacgtatgctttcgtgtgtatcgtgttctaactttagaaaacgataaaagttttaaacagtgtagtttcgtatgaaaacaaacgttctattttactatatacatcaacgtaaatattaagctcaaatacgaacttagtcaagtcccatattcagccgtgacgtttttgttaaatattgatagtagcaagctatactttttcttagtattaaatgattttcgtagagacatctctatagcattgtggaaagaaaaaatatataatatataattgcattgacgacgacgtgtaggttacaattattgaccaaagaagaacatcatctatagcgactgcgtccttaaattctcaagaaaatccaacgttagattattatcacattaaaattatctggtctagcttgactagttccactcttatcttttctaacaaacaatttcatgagtaatttactaattctctttccaatagtttaaagtcgttgattccatgcataggattgtgcgtggttcaaggtggtgttattttcagtattagaaaagaggcttctagagagagtttctaaattatattttgaacacggccggattggttgtcttatgattaagtgaatgctttagatctggtgacgattggtatatgagatatatagtagaatgatagaacatcagaaatactataagtcaccatatttttaaaaaataaatgctatagaatttttgttttggtaattgttataactctacaaagttatgtgttatagagttttactagtttcatcgttatcatgtgtatagtataacacaacaaaagaaattttaaatatctgaaaacataaaaatttaataaaatgatgtgagtataagaaaaaaagaaagaaagaaacacgtaaaaaataaaaatcatcatacatataacaattttcaaaagatcaatgttactttaattagtcttttttcttatgtttcatgcaaatgcaatagtattacttttctttaatctaagattatgtgttgcttttaagcaagaactattcaaagagtcaaagacatgcatgtaaactttagagaacgggatctttcatcaatcttatttttttcccttttttttttacaacgaacgataggtagtaagcatgaatctggttcaaagtttggatcagtgtgggcataatcctggttcgctaaaaagaatcaatataatatatgttgagcgtaagagaagaaagctcatagttctgtgtagaaaaaacgtggagattggagagaaattactaagagagcgaagagaagagtaaacctagaagatacaaaagacgctatcaaaagattgttttatgtgtttatgaaacattcacttaggccagtataaatattaaatgtcattttgagaaagaaaaaaaaatggtgtcattttgaggatataaatattttctcaacaagatgttttagactttcaacataacgatcatttaaaactacataatttatctcttcgttaaaaacttaacattaacaaaaagttaaattcgacaagaagagtttattcaataagtatactgtatgtgtttattttattcacatgaaaagtgtcaaacaacacttgggatacatatttcatgcctaaaaatcgtataacaacatttaaggtaatcagtaaatttgatgcctaaactaaaatatgtgaccattttgaccaatgagcattttttggaaataaaactactgcatacgacctggtcaaacacatgaactgccactgcttttaaaactacctttttaaacttttgacgtccatttttatttactaattattatgttaatcaaaccactaacattatgattcgaaatttcgagtgatgattgttagaagtgatgtgaatgatgcggtataaaacaaattgtgatatatattcactcatatatatcaaaatcaaaatagcttatcgttccaaaacatgattgataaaatgtaattactattcaaaacttaaagccagtagttaaaataaaacaaaataaatagtatatgtttcatattaatgccaaaccaatattttgttttgatgaggaaaagtctttttttttttttctttttttttctcatagttaaaagacataaaaaaaattaatattacaaacaagacaaaaaaaaagaataaataaaacaacaatcattactgtcaaatcaattatcagagggaaaagttattaagaaatgtcaaccaatgagtatcattatcatcatgcttttttagacccttctttttaattcatcaagatttagtcttgtttataaatttgaagtaaaattctaaatgaatcaattctacaattttttccctacattattgtaacgataaaatttaagatcaacaattacttcgttaattttttttctgataaaaatatttgatatctttctgattatgatatattagcattgtttttgtattgtatgtatggtaattaattttagttcaaaagaataataaatggtttgattagcatgaatttaataaaaaaataagactgaataaacataggtaataaactttgtttcttttggtaaatgtaaaattagaaaaaatcataatcccaaggtaattactataattacattcaatgtcagaattaaacgtagtgaataaaaaccgtaaaacatgagaaaaacaagaatttattatctttgacaagcaataaatgaaatgctgacaaaaaattggtttcaaagtttcaacgcgtttcttataataagaattcaatttcgtgcagctaatcaggagataattatcataattaaattaatcgttactactttataatactcccaaaataatcgaaaacgaatttattttattgtaatttgtttaataataaagaattactgtttcctcccacttcccatctctcttttccttttgtgttcttcttcttctccgctttgtttccccaatctctctcttctctctctctgaagaaaaataaataaaagatctaactttgacggctctcttaatcttactcactccgtaagttccaaatctctctcctttactctcatatctatatcgtccgaacaaaacccaggagaattgcttcaccccctttttgggtttttaatcattttctcagattctcagtttctgtttccgtcttctagattctgggttcagtttctgttttgctcttattgaattttcttattcattttgtgtttcggagttattcatggtagctgaatttgttaattctgatgttgttttgcgttttcttcttttctagtttggctatgtcgtctttgatctgatgctgggttattctctttccctctgttttggtttcttttagggttttaagtcggaatagactgatgggagcttgatggttattgttagatcagatgtggatttaaagccttcgctgaactaacaagtctatggaagaagcaaagacccttgttttacactgtatgttgtgaggaatttgtctgattttgggtgataaaggtgaagtctttgagtttgtaattttgagataagattggatggtgggaagagaggatgcgatggggaatgatgaagctcctcctggttctaagaaaatgttttggcggtctgcctcttggtctgcttcacggactgcatcacaagttcctgagggtgatgagcaaagcctgaacattccgtgtgctattagttctgggccgagtcgaagatgtccagctgctcctttgacacctcgttcacatcataacagcaaggctagagcttgtttgccaccattgcagcctcttgccatttctaggaggagcttagacgagtggcctaaggcgggttcggatgatgtcggtgagtggcctcatccaccaacacctagcgggaacaaaaccggggagagattgaagctcgatttatcatcaacgcagcagcgggtaacagataagagctctggtctagctaagagggagaagattgctttctttgataaagaatgttcaaaggttgctgatcatatatatgtgggtggagatgctgtggcgaaagacaagagcatactgaaaaacaatggaatcacgcatatcttgaactgcgttggtttatctgtccggaatatttcaagtctgatttttgttacagatccttgtggttacaggatagtccgtcagaggatataactagtattctgtacgatgtgtttgactactttgaagatgtgagggagcaaagtggaaggatctttgttcattgttgtcaaggggtttcacgatctacctcgttggtaatagcatatctgatgtggagagaagggcaaagttttgatgatgcatttcagtatgtgaagtctgctagaggtattgctgatcctaacatgggctttgcttgccaattgttacaatgccaaaagagggttcatgcgttcccgcttagccctacctccttacttagaatgtacaaaatgtctccacactctccttatgaccctttgcatcttgttccaaaactgttgaatgatccatgcccgggttctctggattcaagaggtgcatttatcattcagttaccttctgcaatttacatttgggttggtaggcagtgtgaaaccatcatggagaaagatgcaaaagctgctgtttgtcagattgctcgatatgagaaagtcgaagcacctattatggtggtcagagaaggtgatgagcctgtttattactgggatgcatttgcaagcattttgcctatgattgggggctcggtaattaaagttcaaccaggtgacaggaaggtcgacgcatataatctggattttgagatttttcagaaagccatagagggaggttttgtgccaactttagcatcatccaacaacgaacatgagactcatcttcctgcaagggaaaacagttggagctcactgaaatgtaagtttgcatcaaggtttgacaaaggttttcggtatgtctccaaaacgccactatctagggtctattcagattcgatgatgatcgtgcattcatcaggctcaccttcctcaacaacttcttcatcatccactgcgtcgcctccttttctctctcccgattctgtatgttcaacaaattcaggcaatagcttaaagagtttctctcaatcctctggacgttcgtccttgagaccttctattccaccatcgctgacattgcctaaattttccagcctatccctcctcccttcccaaacttctcctaaagaatctcgtggtgtcaatacttttcttcaaccgtcaccaaatagaaaggcttcaccttctcttgctgagcgtagaggcagcctgaaaggatctctgaagttgccaggtttggctgattccaacagaggcacacctgcttttactttacatccggatgatagtaatgacatagtcttcaatctggagggtattagaaacggcgatctatatccaccaagtgattgcaaagggacaagtgtagattcagatttgccagagaaggaaattatatccttaatcagttgcagtaaatctgacagacacaaatcgggaggtgatactgatagctctggccagcctttagcatgtcgttggccaagtatggagatgattacaaaactgagcagagcttacttagattcagaatctgttatagcaatcccgttgccaagtgatgctgtaggagaaacgggtagtaggaatttgtacatttggatcggaaagtcattctctttggataacaactgttctctagtagatagcaacaaagcggcagacactgtggagaatgttgattgggtacaaattggtgaatccattttgtgtcagatggacttgccaaaagatacccctataaaggtaataatagcctaaactttggaggctctgatactttttactaattgtaaagtctgcgtgctcatctttgtcatgtcttatccaaccaaactatatttcgaagatgaaaattacaatctcagcactttcattactgactactgaggacggttaggtagaatccttatgatttcagcagttgtatgtattggtttattctctagtggtttgcatggttccaacttgttatgatccttttgttgtttgtaactgataagttgcttttctttcttgttaacagatagttagggaatctgaggatcagacagagttgctagcactgctgagcgcgctataacacccacccgcaagctctacacatttactctgtttttttttcacagattccttcaaccgcaacacttttccattttcagacagagtattcattcagctcaggtgagaattctctgaaagcagtctgtaacacttcatcttcacagttgcatccgaatacaatcgttagttctggattatgtttaattgctatctgatcatgaatttgagttagaggatggttggaacaaaaaaacttagaagctcgaatgaccggtttttaccaaattctcatagaccatatttgattcttttgatttacttctggtgcaggactctctgtgcttatggaagttgatgttgggggaaacaactctcttgtacagtggggaaaaaacttcttcttcttctttctatcacatgaaaatcctcaagggccattattagtatgatcagattataaaattgtaaggttaggggctttatgaggattttgatggacttgttacaatgtttacatatacactcagcagcacaatagatttttgttaaacttacatgttattcaagtaaaagtactatgtagatgttgaagtctaattgaagaattagttaatgatagtcttaaacacttgattcacttgtcatccaattttggttttgcgcatagtttctcttcttttatttcctctctaaaacaccaaaaccaaacaaaatgtcattttccaatccttaaggtttcattcattttagtgattttttgggtacaaaattgagcaatgtctagtgacgtttttactcaaactcataaaccaacattctaatcagaatcacgatttggactttggtttgggaccttctttctacaccaactgggcttgtaatcagttggtagagaaagcccaattatatattatttaaggcccaaaataaatcgatctagggtttacggttttgtttcattttcacttcccttagaataaataaaaaccaccaagcaacttggatctactctagggtttctgtttcgccgctcaggttcgtcaatctctcgatatcctttctctaccttctcctcagctttctgagtattgaatgttgttgttaactgtctctgaatacgattgattttgtgtcatttttctcgtgcttcgtatttgttgattgattgatttacatgtcatgatttgaaatctttgtattgctaattgctattgctctgtttactgattttcttttctggggttatcaggtttcgtgaaaagaatctatcttgagcaatgtctccagctaaaggtacgcctttttttctttcattgttatctgatttgattctacatcgtcttctatttctcttttgcgtgtaattactttgtttatcattattcaatactgtgactgaacttactactgtatacagctttctgaaatgtatgattcttatctggctctgtaaagttcgtattttttatattctcttgctcgtacctactctgttatggattcatctgattatgtgcttgtttgtctgttatttgccaatgatcaaactttccttgaatgagatttgttaccagtagtgtaaatggtttaatgttccattatttttgcagttgatgtcaccaagaaagccgaccctaaggctaaggctttgaaagctgcgaaagcagtgaaatctggccaaatcgttaaaaagcctgcgaagaagatcaggacaaaggttactttccacaggccaaagacattgaccgttcctagaaagcctaagtacccaaagatcagtgctactccaaggaacaaattggatcattaccagatcctcaagtaccctctcactactgaatctgccatgaaaaagattgaagacaacaacaccttagtcttcattgttgacatccgtgctgacaagaaaaagatcaaagatgctgtcaagaagatgtatgacattcagaccaagaaagtcaacaccctcattaggtaaacactaaaacttcactgagatatgggtttatgtaaacatggagtgatgagtgtatgtttgtatgcaggcccgatggaacaaagaaggcgtatgtgaggttgactcctgattatgatgctttggatgtggctaacaaaatcgggatcatctaatctgatcattgtcgctctgtgattttactttttctggtttttctcttccatagtctcagttttgctagagaagttaagatattactatcaccatctctttgttatgcttttatctttggattcaaaaagattatatgtttggtatttgttgatgcgtcatagtttctattcagatcgtgttccaattcttaatgctacctctctaatcccggtttaacctggttatatcgtaccttcgtaaataactaataagtaatacccaacccaaaattcaagtggtccattggacccatctctttgtttagatgctttcaaagtacagaacaagttcactgtggtctgtggagcccaatctaatcaacaaaacaatcgatccgcgagaaactcgtggttgtaaaaaacttttactaaatgaattattgttgcttgttgccggaaaacgacagaaaacgtcggtatcattgaactaacgtcggtattattgaaccattgattgatagttggaaaaaaaagaaaaaaaaaagaaatcatatattccttttgttcctttttgtttgattttctaaaaaaagatatatatattaaaaaaatatattaaagttgattttaaatgtattattttttttgtgttttacaattttctataattttaaaccaataatattcaattatttttattaaagtttataatttatcagtaataactaataaatattgtataaaaaaatctaaaaaatcaatcttcttgaaacaaatatttttcttagaaaatcaaataaaaaagaacagatggagtatctatatattaataaagataacaataaataaaatcatcaaacctaaattgtttcccacgaatcagtttcgagacattggcacgttaaattgtcgatctggtaatgaagtaggctttacatgtagtagactaaagtgttaattaggacctagaccctacagatttgggcataaaccgtcctttgttatgggacgtgttctacttggtatctctagaaccgcggtctttggcagatggatcagattatatctttttgacacttgtatttatatatgttatatgttattggcttctccttccccattggccatcgaacacaccacacagagaaaacaatatgagcaatcatcaaactgtgagataacattttctctcatttcccatctttctttttatcttcaaaactattcatataaccatttatataagaccactctccaaattaccatgcttttaacctttaaatatgatttctgttatcttctttaccatatgattccatatggaaaaattgtcaatcatgtgtttttgtctttgtaatctgaaattacttgatttttgtattttgttttttttttgggggagaaaagcaggtgttgaagctattggagccatggtgtgaacttaaagacaaagtggttcttgtgacaggagcttcctctggtattggaagagagatctgtcttgatcttgccaaagctggttgccaggttattgcagcagctcgtcgtgttgatcgactcaactctctctgctctgaaatcaacagcttcagttcaactggaatccaagccgcagctcttgagttagacgtttcatcagacgcagccaccattcaaaaagcggtcagggaagcttgggacatctttggaaagatcgatgcattgatcaacaatgctggaatcagaggcaatgtcaagtcgagtttggatttgtcagaggacgaatgggacaacgtcttcaagaccaacttaaagggtccttggttagtatccaaacatgtttgtatgttaatgcgtgacgctaaacgaggtggctcggtgataaacatctcatcgatcgccgggatccggggtatgttgcccggtggacttgcttatgcttgttccaaaggcggtgttgacaccatgtcaaggatgatggcacttgagttaggtgttcataagatcagagtgaactcgatcgcaccggggcttttcaagtcagagatcacacaaggtcttatgcaaaaggagtggctcaagaatgttaccgagaggactgtgccgttaaaggtgcaacagaccgttgatccagggcttacttctctggttcgctatctcattcatgactcttctcaatatatatccgggaatacatacattgttgattccggtgctacattgcccggtgtgcctatcttttcatctctctgaaaatcgaaccttataatatcttatcttgtgcaataataagtgaatacatttactcattctctactactttttaagatttacatacatcgtcaaaaatttgcaataacaaaccagcagagacacaaaaagaaaggacagaaaaataaacagcctcctgattgtgatgctttggttgtggctaacaaaatcgggatcatctaatttgatcatgcgtcactcggtgatttcacttttgggattgaaacagacttctggtttttctccttccatagtcttcagttttgctagagactatcatctctttgttatgctctatctttgaatttcttgaagtcaaacaagacagctctatcggatgtactatggaatgtacgaccagagtccataacccattctttgcatgtgctttgagtgctcacagttaacaccaaaggttgcggaggctcagttgcaatattagccaattctgcatgtttctttctttgagggcattcccttttccagtgatcttcctttccacagataaaacaacttgtgttgttacttggccttgactggaatttcccatttccacttgaacttcctgtacatggccttttatttcccttattgtttgatctgcccttaaaatcacccaataatgcttctgaatctggttttgacacgttcagcaatcccttttctttcaactcaatttctttagagtatgctgaacttatgactgcatttagtgtcagggtatccttcccactcccatacttgagtgtatcaactagtgaatcatattgtggtggtaagccagccatgaattgtagagcctggtcttcatcactagtgttgatgtctaaacttgctagatctgcaactagcttgagagaagtatccagattttcttcaatgcttttgttctccaccatcttgaagcttgtgaacttgtgcttcaaatagatcatgttggctaaggtctttgtctggtagtttccttcataaccttccttagaatcagatcgcttagactcatgcttatcagactcttagctattttatctttctctgctttctttggatctaccctaggttcgcatccttcctcttgacttcccgggtctgatggtgtagcatcttcaaccaagacagattctaagcctagaatctccaactgacatagcatcttatgcttccacaacccaaagtctcctttgccatcaaacttctcaatatctcaaatcttgcatttgttggttccatagctagatgtcttccttacaatcaaacctggattgctctgataccacttgtagagaaaactgagaataataatagcttgtaaaagaaacaaacacaagaatttgataaccgagttcacggctaaccgctacgtctcggggaaggactcttatttccaagcttcactatatgatcatagaggttacacacaccactaacttgtgatgtccttggttctttttcagattttacacacaagaagaacaagattcaagaacaacaaagaggaagaagaaagcttgcttcggaagctctttatctatcttctcttgaactctctttagcttgtcttgtcacacaactaccaccacctctctttgtacgttgtaatagaaatgttatataggtgatatgtgatggaccacttttgttattctctcttcatgccattttcgtcaggcccactaaggcccaaaggatgtgtttagtcaaacccaaataacaaacttggtccccaaacaaaagaaaaaataattatatacagtatttgtttagattcttcacaagtactaaagtaaagaatcaataaaccaatcaatccgcgagaaactcatggttatataatatttttgcttgaagtattcatagttgtcaaaagaataaaagtaaataaataatactaaggataacaataaataaaaattatcaaacctaaagaatcagcggagacattggcacgttaaattgtctatttggtgatgaagaagagtgttgactaggatagaagaacctacgggttgggcataaacccgccctttgttatgtattatatatctaagttctatttgtacatcttagttattttatgggcttcttcttctcctccatcgagcacacacatagaaaacaaacaatatgagcaatcatcaaacggtgagattccttttgctcacatttcccatctttattttttatcttcaaaactatcagacgatgaccatttgaaaccccttgcgatggatatgatcactctccatattaccgtgattttaatcgtaaaatctgattgttacatgtcaatcatgtgtttcgtctgtctgtcttttcttggtatcaatgttaagtagcttcttatgtcattttaatctgcaattacttgatttttggatttttaagcaggtgttgaagcagttggagccatggtgtgaacttaaagacaaagtggttcttgtgacaggagcttcctctggtattggaagagagatctgtcttgatcttgccaaagctggttgccaggttattgcagcagctcgtcgtgttgatcgactcaactctctctgctctgaaatcaacagcttcagttcaactggaatccaagccgcagctcttgagttagacgtttcatcagacgcagccaccattcaaaaagcggtcagggaagcttgggacatctttggaaagatcgatgcattgatcaacaatgctggaatcagaggcaatgtcaagttgagtttggatttgtccgaggacgaatgggacaacgtcttcaataccaacttaaagggaccttggttagtagccaaatatgtttgtgttttaatgcgtgacgctaaacgtggtggctcggtgataaacatctcatcggttgctggggtccgcagtatcgtgcccggtggacttgcatattcttgttccaaaggcggtgttgacaccatgtcaaggatgatggcaattgagttaggtgttcacaagatcagagtgaactcgatcgcaccggggcttttcaagtcagagatcacacaagctcttatgcaaaaggagtggctcaagaatgtgaccgagaggactgtgccgttaaaggtgcaacagaccattgatccagggcttacttctctggttcgctatctcattcatgactcttctcaatatatatccgggaatacatacattgttgattccggtgctacattgcccggtgtgcctatcttttcatctctctgaaagttgaaccctgtatcttgtgcttgtgcttgtgcaatgataaatgaatacatttacacattctcaactattttcttaagctttacatacatcatccatgtttttgcaagaacaaaccagcacagacacatataaaggaaaggcaaataaacagcctccaaaatgatttaccaacctcctaaaatattcagattcaatagacaaaatcgatatactttggagaacgaagcaatgaccatgacctacttctgatgcttcgtctccaaaaaaagaataagcagctcgaagactatggaaatctacatctacaggccctatctgctagagaactacccgtggttgtatagggttttttttgaacatcttgtaatcctccggagaatcattgatcagagatgccaaaatcattatcattgatggagcctcaaaactctatatcagtcgatgttggcgtagacctttaccaaagtgtggttgcatcaaacgtacatacaacccattttttgctgctaaagaatcatgtgtaccttcctctactatcctccctccattaagtaccacaatgttatccacatgtctcatcatagccgctctatgtgctatcagaattgttgttttgttccccattatcaatgtatcaagagcctcctgcacaacccgactcgattcagattcgatagacgagctggcttcatctattaagatgatgggagcattcttcagtactacgcgtgctattgctattctctgtttctgtccaggggtaagttctacgcctctcatcccaatatgtgtgtcgtaaccgtgaggtaagctgctgatgaaatggtgagcatttgcaattcttgctgcttccttcatctcagcttcacttgcattatgccttgcatatatgatattctctctgattgttgtggaaaagattatgggttcttgctgaaccaaacccatgtggcttctcaaccatctcaagttatataactttaagtctctcccatctagtaggacttggccagcaactgggtcgtagtatctctctactagtgagattatcgtgctctttccagaacctgaaacgccaacaacagctacagtctgtccgccactgattttgagactaaagttgctcagcactagtatctcgggtcgagttgggtagcagaagtctacgtttttcaattcaatacttccgtagacattaggaggtttgagagcagagttatcatctggttcaatcgtagggactcgatcgactatttcaaacactgatatcagagacttacgtcgcttgaggatatacggtgctaatccaaatggctccacaagggcgaatgtagcaaatgagaaaaccatgtactccgttatagctgtcgataatttcatatatccacggttaacagataacgcagtgcaccataggaggagcgcgttgcaggcgaaaagaagaaactgtgaaaaaccaaacgcaaaaccaatagccatcccatggagatagctctgtctgagtatccgctggagttgcatcctgtacagttccatcactttgttaccagcacagaaagcaacaacagtgtagatgtttctaacagcatcctcgagaactaaagatgcttttctgtgcatctcctgtatgccttttgagaatccggcaagccacagtttctgcaaattcgttttgagaatgattagaatgtcgtgtcagctgaataaacaaacatttttgagctacatgaattgagaatgagatggcagaaaacaaagaagcataagctaaaatcgctacttgaactggaaaggtattgcaaagtcagaaacacatgtgacaggggaaaatgaaaacaaattgactaaaatataaataatttcaaacaattttatagaagaagcgatgcaaacctgagcaatggcagaaagagtgagaattggcagagttgccaatgcaacaagggccaaacgccaaccaagcagcaacccaatcagaagagcaacaataacagcaaaactatcttgaataaatattgaaagcctgttgctgaaggcagctcggacaaaagtagcatcatttgctaaacgcatggataatgtatctggactgttctcttcatcatcgaaccatccaacttcgttacgcagcattgctgaaacatcagagaaattaatgaactcaggcaagtaaaagtagttaaaatgggataaagtaaattataatgaatttaaaaaatttccaatacctgagaacatcatcctcctaactctctccgtcattttctctcccattatgccaaaatagaaatgctgcaagaaattggcaacaactgtcacaatccccatgcaggcaatgatcaaacaccatttgtcaacctcctcgcgcaggtggcctcctttgcttttataatattccgtaactaccaacgcaatgacataagccagaagaggattgaaagaaccaaagatggcagcaccaagactccctaatacagcataaagccactctgggaaactaagctgtgccaacctccaaaacgaaggtgactccttgtgttgagcatccttagacgccttaccatttgctttagtgtcatcaggagaactaagaggacgactaaacgtctgcgaatgggaacgctcgtttttaggatctgatgtcaaaaggggtgaaacaggggactctggctctgagccgtttgatttttgttggggacactgaacgtcaactttaggaaggtgtggcaacctcatctcgaaactatcttgccttttgatagttggctctttatcagcacaatccagagacatgccatcttcccctgttttctcagatgcagggctatgagctttaggtgattcttcagtatcaaaacacagttcctggggacggaacacaccactacctctttgaagagatggagacttaatcattttgggtgatgatggttcttggacgccacagccagctgaagagtctctctcgacctcaaacaccgcagactccttgtagttcctaactggcatcctggaccaacataagagtttttaaacaagtaattaccaaaaaaccacattacgggagatcataacaccagaaaataaatacccaaaacatataatttgccacatgactactacacgacttaattgttaagttctaagctatcataccttcttggaagctttgttgcttcttcacacttcagaagctcagcatacagcccaccaagatttatcaattcatcgtgtgtacccatttcaacgagctgaccctcctccatcacagcaatatagtcagcattttttatcaaacttaatcgtcgggctattattatggttgaccgtcccaacatcagaagatcaagagcttcctgcacaattctttcagcttcgaagtctagtcctccagttacttcatcaagcagaagaattgttggattcaaaagcacagctctagcaatcgaaagtttaattttctgctcctctgtcattgctaaaccggctctcccgacctagaagaaaaacaaggcatttcccacttcaatgttgaataatcaactgacaaaacaggatttcagaagtcttttcaaatgatgtctacctgtgtttcatatcctttttcaagtgagctgataaatgtgtgcgcatgcgcatttttagctgcctcctctatctgatcaagagtagcatcacgaccatatgcaatattctctcttatgctcaagctaagcagagcaggctcctgggtaaccaaccctatttggcttctcagccactccagttttagatttttaatattttctccatcaagaagaacttctcctgcataagagaaaaccacagatgtagtcagctcatatttgtcaccattgacaggtgagtggtgcatcttaaatcacaagtcaaagtacctaatgtcggatcataaaaccgttccattaaaggaatgatgctgctttttccagaaccatttctaccaacaagtgcaactgcttttttagcaggaaccgtgaggtaaaatccgctcaagattggaatttcaggtcgtgacaaataactgaaatatacattccggaactcaatatttccttgaacagaagccagcacagctccttcttggttagccacagaagatgaacgagttatcatctcaaaaagtctatacgcagcaatccttccttgatcaaaagagtagaagttcgtagcagcttgatttaaccccctgccaaacaatttatgcataatcaagacattatttctatgtaaaatatgtatatatctgcctgtatatgtaatgataacatcaaaaaaatatgtgcataattatgtaacagagactgagaaaatagatatagaaacatcagtttcaatagaaaagcttacaggccacttaaaataacagcaaaaagagctgctatgatttctccaccatttgcccttccattgtgaacaaagaatcgtccaatccaaagttgcagcgcacacgagcatatagcaagcccataagtaaatccaagtccaaggccttgcacaagactaattaatatgccgtatctcagggttgcttgaagggaggttgcatatgaatattttgctagagtttcatttgtaaaggcatataaagtcctaatgtaagagatcgcctgcacatttaagataaatctttctaagaattagaatattgacaccagactctaactgaggcaataaactagtgtcggaagggagcactagaaaatgggatctatagggtacacattacaaaaccacttgtaatcatgcatagactatcgagtgtggttactaggcattcccagtgatgtacatcctagcaaaacaaaaacaaggctatcccttggtctacattttgagatgaaactggcagaagtttaactgattcttgatcacaataaaacctcattgtatctagtgaagtaacctagagcctaagtacaatcttaaccctcttcaattctacctaccattttctgaacttaacaagagaagagtgattaataagagcaaaaaacaagaaaagatattgaactttgtaaggcataattctacgttatatatgcagaaaaagaagttccatgccaacaaggcacatatgactataagaaaattgattaatttcaaatgcttaaagagtttagtttttagcttccagatttcatagttcaagtggtcagcgatcacaattggcaccaacaaacttccaagttttgaatagtggccaagagaaaatcttgatgctaattccataatctcccaataaacctatcaattgtaatacctgttcagcaatgccggctgcttcagcatatgcatcctgtatgttctcagcaagtctgtgtagaaaaatatttgatatgcctccagcagcaacgatgaaaggaccagtggctagtgtaatcaatgcaatttcccagcagttgacaaatccaataacaagtccactgataaacgtagccatgttatgaatataatttccaacctgcaaagtccaggatcaggaagaagattagagaaatagcaacaaagtaatactcacagttacaaagaaagatatgaatgataaaactagaaatggagttggacgaacatactttctcgcttaaagctgactgaatgagtaagacatcgctcagcacttggctcacaatatctccattattaccatatgtatcaaagaaactcatatcttgattcaataatacttggacatacttggacctgatcacagcagtctgcctttctccagtcagtatccagcaagacacctctattatcagaaacatttagtaactgttaagcatcatcatttcagttgtggaaaaaagatgcatacaataagcgaaaaacaaacttaccaatccaaccagaaatgaaaacacctccagcaatgtacacgatcgtcaacgaaagctgcacaaaaatgagagcataagtaacttaaaagaggaacacatgattggagtacaaaaccagaaatgccaattccgagcaaaatcatgagttgtcagaagtttcactaacctggacgagtcggtcaaactggtgttcagatctctgctgactagaatcattagagaaagcaagaacatcaacaatcttggcgaagtaatgcaagtagacaataagcgcagtaccatgagcagcagcagcaacagagccaacaatcataagcacccaatcaaagcggtcagcgcaagcgaagagctgagagaaaggaacagcagcaggaggtggttcaagctcatcttgatcatccatctcttcatcagcctccgctagcgccgccgccgtgcccgtgccaccaccagactcagcaccagggtcgagataaggagaaggagactcaggtggctcggagacttcagagactggagttaatggttgcatatgaggcggagaccatccgaataaacctctagagatcatcatcttcggaggagcaccacacaaaacaccttctgtgttgaaaaccctagattttcagatttttagggattttgattttgtttttttcttcttctaaaattagctggatctgttgctaagtttgtagagaggaagaagaagaagaagaatcgtagaagaagaaataattttcttccgccttttttttcttttaattattttccaataattttggtgagattttttataataatttgtgttgccgttgcagtgtactgtgccgtcacctaccgtaacacaagagctggttctgctaacggacacagcgacttcgagtttgcatattttttatatattactggtgagctaattcttgacagagcatttcgattactgactttctcgtagctgtaacatgacactttataagccctttctggttagtagctgaagctacaaaactatgactagagatcaaattgaccaaacaagatgaagttaggttaaaagcagagagagaggtaaggaggcaagtcaagagttattgaatctctcttacaggaaaagaatattgttaagggaaagagagaagaagaatggacaaaaatacaagaaatgggcaaaacaagagacaaccaaagcaaacttgattacagtattttcaaacagtgatcttgaaggaatctaccacagtgtgaagcctatctttcatcttctcccacctcctttcattcgctcccgtcgtcagtgtgtagaagtttcctgcacagcaaaacgccatttctcgatgagcattggatactgcagtcagtgtgtattagatatgaatgtgagaattcatggggatgtatataccgttgaaaaccgtgatggtacccagagcatggcgagtgtagtttctagcttgaacagtgaactcaaactgataataagtcttcccatcgacatcatgctgcagcactcgaaacaaaaaccaaacaatcaaaaccaccctctctctctctcttattattacattcaagagcctccactcaattagtcgaaaaaagctatcaaaaggagcaaacctctgatgcatcaataagggttgttttctgatttggaggtgccaaaactttctttatcagtgtttcagctatctgtaaccaaaccaagttcaatcattaaagagagtgaaaaacaacaaccaaacaaaagagaagaacattacctgcttgggagggccaaattctttaatagtctgtttgctagttgggaccaaattcacactaacactttctaaaggctcaatcacatctttgtataccttatcttgaccttcaatcacaacttcctaaacacacattcaaaacaatgagacaagacattgtaattgttaaaaagtgggcaaagaagatcacaaaattgatacctgccaaccaaatggatagagaaacgcataagcatctttattgtcagagacagcaaggaatccttttttgctttctgcagcaactgagccatatcaaacatttcaaaattacacacaaaaattgcaaaattagtgacaaacaaaaagggtacttacatgataatggagctctactaagcaatgagatccaaggagcaacaacaccaaatgttacaatcagacgtctctgacatttatctgaaaaaaacgaaataaaaacacaaactttataaaagggtttgaagaaagattcgttttttcctcagagaagcagaatatagagagtaatttgaatcggaaacacgtaagaaaagacaaaccttgaagatgagaagaagaagacgaggaatggtgctctgcttttacaagaaatgaaagtcctttcttagaggaaggaatcacaccaaccttagaaatggagattggagaagaaggtgaaagcttcagagaagccattggagaaaaagtgtaatatgtggtatagagatagatcttttgttgtcttctcttatggattcacttctttctcagtttatccacttttgaaacttcctgaccttttaaaaatgtcagagagacaaaaaaaacactaatttgcaaaaatggcccttcaaaataataaatctttgcaagataacaaaaatgtaaccaaaacgcacagtttcaatgggtgttttacataaatatacaaattaggatgaacagttaaacattttggggctctttgttacagtagtagacgttttatgaaaagcccataataaatctgaagcccggcccatatgtaggtggtatcaaaatcatccaattagggttttatgttttttgtttttggcggtctcagtgaagaagatggtgctgtcgaacaagaagctgaagcagaggattcgacaagatttggctgaatcactatctgtctctgtatccgaaacaaatccacaatctcagtctctgaaattgctccttgattcatctagccacaaacccagattgtcgaagagagagaaacgaagaaattgcgaaactttcgctagagaagacgacgaaatcagagagaatgaagttgggaatggtgggtcaagcgagaagactgatacgaagattaaaaagaagagaaagagagacgatgctgtggaagtcgacgagttagaaggagatgaaggaactaaggaagagcaaaaaccccagaagaagaaaaataagaagaagaagaagaagagaaaggtaaacaaaacgccaaagaaggctgaggaaggcaatgtagaagagaaggtgaaggtagaagagattgaagttaatacagacaagtaagtttgttttaaccgacttcattttaaagctctgttagtttcaattttatgtaaattaatcgacttggtgttttgttttccagtaaagaagaagatggggttgttcctaacaagttatatgttgggggtattccttatcagagtacagaagatgagattcgtagctactttagaagctgtggagtcatcattaaagttgattgcaagatgcgtcctgaagatggggctttcagtggtattgccttcatcacttttgacgtaagtttttccatgtaacgttgctgtgttatgatgcagccttttgtttttgtaagaacatagatcgttgttgttttgggattagactttagagttagttttttgccttggtggctggagattagagactggttaaatggactgtgtcatacactgtgttgatattttttttcgtttcatttatacagactgaagatggcgcaaaacgtgctttggcttttgatagagctgctatgtaagtaatctatagctgtgactcaaatattttaagactttccttggtcacatttgatattggttgagtaatttttctttactttactactaggggtgatcgatatttgacaatccagcaatacgtgaaaaccaccaccccttccattccaagaaggaaaacatcttctggtttcgctccagaaatggtggatggctataacagggtatacattgggaatttagcctgggacacaacagagcgtgacatacggaagctcttctctgactgcgtaataaactctgtgcggttgggtaaaaacaaagaaacaggagagtttaaagggtatgcgcatgtggatttcaaggatagtgtgtctgtggcgattgcgctgaagctggatcagcaggttatttgcggaagacctgtcaagatatgttgtgcacttaaagacagaccagctactgatcatacacctggtgaaacgaacaatgctggttcgtacaacatggaagatacttatgctgctgctgatccagtaccggctttagctgggcgtagcgaagttgatgacggaaactactttgcaactacggttagcagcagtaaggtcaaaaggagggtctgttatgagtgtggagaaaagggtcatctttctacagcctgtcccataaagcttcaaaaggctgatgatcaggcaaactcaaagctgggtcaagagactgttgatggtagaccggctatgcaaagctatggtcttccaaagaatagtggtgattcttactacatgaatgagacatacgcttctacaaatgaaacttataatggaggatactcagcatctgctgttggcactggtaaggtcaaaaggaggaactgttatgagtgtggagaaaagggtcatctttctacagcctgtcccataaagcttcaaaacacttctcacacaaactcaacgctggatcaccaaactgttgaggcaggaccgactcaggtaacaagctatagtcttcaaaagaaaacaagagacactgaaaacaatggtggttcgttcatggatgagagctatgctactgttccgatatccattgatgtgacaaatggagctaatgatgcaagcttaacatctgcggttagcactggtaagatcaaaaagagaaactgttacgagtgcggagaaaaaggtcatctttcttcagcttgccctaacaagctgcaaaaacaaggctgatgatcccacaagctctacaaagacagcttatacattttgttcttaaactttacatttgaatcattggaggaatatggaaggacgtggaccacttggtagaagagtggagttttggtcctcttttagaaaaccataaattttattctgtattgttttatgatctttcatagaatgctctaaagtctaaaaaccaaaagtatcttaatatattggattattatttcttgacgctccaattctctcttctcttcatatgttgttctccgaccatgatcttaaaaatgtcggcacaaacagagtgataaaaggtaacaaacgaagattcttgacattagaaaagactgagaatccaatagattaaagagtagatcaaatatatgcctattgcggactataacaattagaagataagcaatccaattatgcctgttaccaatccgaacctagataattaaagttggtccaaaggatctttaatttcgaaaaccttcttttgcaattaatcatcaaaacaagtggcaaaaaaaaagaagcaatggccacgttttttttttttttgaaagtcgaaatcaaatcacattaccccaaatctctcttctttgaactttaatcctcttctctattgcatgctttaagctccaaacccaaaacgcaggaaaatctctttgacagtttttggttttagatgggaccaatcaaaacgataaagaagaagaagagagcagagaagaaggttgatcggaacgtattgcttgctgctactgctgctgctacttccgcatccgccgccgctgctcttaataacaacgacgacgacgacgactcatcatctcagtctttggattggtgggatggattctctcgccgtatttatggtatctctttttttttcctacctttcttgttggtggtgatttttgcattggcagagtttttgttttttgaatctaattgttgattctgtttcatggaacttgcaattctgaatgttgatttttatttgggttttctaggtgaaaaagtttcagattgaatttagtaatgtagacaagagatgtcctttaatcttactctgtacattggagtattgtttcgatctattgattcgtagttttgggggtttgtgagttcttattcgattctagttgtgtcgtggctaacttaagtgagctatatggatccatggaagtggtttttgtgtagatgaagttgttcttaaggctctaggggctcagtttcgagccatttagactcatctagataactttgagcatgttttttttttcctgttttcgattttggtttaaatgatatgattctttagaaccaatttgggattagcagactttgactagtcttagtttctttttccaatttggcaagttaattttgttttgtaaaagttctcattgctttctgatgatgacattattaactctctttgtgaagagtcagccagatgttttccatgtctctttcagtgatgttctgattatgataagacattttttgcccctcttcccgttgtctctccctgtgtaaatgcgcttgtaggtcgatgataatcaattgataggtcattagctcttctgcttttgcactcttcttttagctttccgagtgttggatttaagctagtccaatgttgtatgagctgatatataatgtgatttaaacagttatggatctgcatggttcttttacactgacttcattacaatgaatgtgtctttgtactaaagagcagtaagcttgatcttggatacattgttgattttgtagttactatgagaatgtcatgttttttcttttcatctcctttttcaggagggtcaacggatccaaagacatttgagtcagttttcaaaatatcaaggaagacatttgactacatttgctctcttgtgaaagccgatttcacagcaaagcctgcaaatttcagcgactcaaatgggaaccctttatctctcaatgaccgtgtagctgtggcgcttaggaggcttggctctggtgaatctctctctgtcattggagagacctttgggatgaaccagtcaacagtctcccaaatcacttggcgctttgttgaatcaatggaagagagagcaatacaccatctctcatggccttcgaaactcgatgaaataaaatcaaagtttgagaaaatctcaggtcttcctaactgctgtggcgctatcgacattacacatattgttatgaaccttcctgctgtggaaccgtcaaacaaagtttggttggacggagaaaagaacttcagcatgactttgcaggccgtagtagacccggacatgagattcctcgatgtaatagctggttggcctgggagtttaaatgatgatgttgtcctcaagaactcaggattctacaaactagttgagaaagggaagagactgaacggggaaaagttaccgctctcagaaagaaccgagctaagagaatacatagtaggtgattcaggttttcctcttcttccatggcttctcactccataccaaggcaaacccacgtcgcttcctcaaaccgagttcaacaaaagacactccgaggcaacaaaagccgcgcagatggcactatcgaagcttaaagacaggtggaggataataaacggggtaatgtggatgcctgatagaaaccggttaccaaggataatctttgtctgttgcttgctgcacaacattattatcgatatggaggatcaaactttggatgaccaacctttgtctcagcaacatgacatgaactacagacaacgaagctgcaagctt

SEQ ID NO: 1087 - DNA, 103240 bp, Arabidopsis thaliana
aagcttcaaaacacttctcacacaaactcaacgctggatcaccaaactgttgaggcaggaccgactcaggtaacaagctatagtcttcaaaagaaaacaagagacactgaaaacaatggtggttcgttcatggatgagagctatgctactgttccgatatccattgatgtgacaaatggagctaatgatgcaagcttaacatctgcggttagcactggtaagatcaaaaagagaaactgttacgagtgcggagaaaaaggtcatctttcttcagcttgccctaacaagctgcaaaaacaaggctgatgatcccacaagctctacaaagacagcttatacattttgttcttaaactttacatttgaatcattggaggaatatggaaggacgtggaccacttggtagaagagtggagttttggtcctcttttagaaaaccataaattttattctgtattgttttatgatctttcatagaatgctctaaagtctaaaaaccaaaagtatcttaatatattggattattatttcttgacgctccaattctctcttctcttcatatgttgttctccgaccatgatcttaaaaatgtcggcacaaacagagtgataaaaggtaacaaacgaagattcttgacattagaaaagactgagaatccaatagattaaagagtagatcaaatatatgcctattgcggactataacaattagaagataagcaatccaattatgcctgttaccaatccgaacctagataattaaagttggtccaaaggatctttaatttcgaaaaccttcttttgcaattaatcatcaaaacaagtggcaaaaaaaaagaagcaatggccacgttttttttttttttgaaagtcgaaatcaaatcacattaccccaaatctctcttctttgaactttaatcctcttctctattgcatgctttaagctccaaacccaaaacgcaggaaaatctctttgacagtttttggttttagatgggaccaatcaaaacgataaagaagaagaagagagcagagaagaaggttgatcggaacgtattgcttgctgctactgctgctgctacttccgcatccgccgccgctgctcttaataacaacgacgacgacgacgactcatcatctcagtctttggattggtgggatggattctctcgccgtatttatggtatctctttttttttcctacctttcttgttggtggtgatttttgcattggcagagtttttgttttttgaatctaattgttgattctgtttcatggaacttgcaattctgaatgttgatttttatttgggttttctaggtgaaaaagtttcagattgaatttagtaatgtagacaagagatgtcctttaatcttactctgtacattggagtattgtttcgatctattgattcgtagttttgggggtttgtgagttcttattcgattctagttgtgtcgtggctaacttaagtgagctatatggatccatggaagtggtttttgtgtagatgaagttgttcttaaggctctaggggctcagtttcgagccatttagactcatctagataactttgagcatgttttttttttcctgttttcgattttggtttaaatgatatgattctttagaaccaatttgggattagcagactttgactagtcttagtttctttttccaatttggcaagttaattttgttttgtaaaagttctcattgctttctgatgatgacattattaactctctttgtgaagagtcagccagatgttttccatgtctctttcagtgatgttctgattatgataagacattttttgcccctcttcccgttgtctctccctgtgtaaatgcgcttgtaggtcgatgataatcaattgataggtcattagctcttctgcttttgcactcttcttttagctttccgagtgttggatttaagctagtccaatgttgtatgagctgatatataatgtgatttaaacagttatggatctgcatggttcttttacactgacttcattacaatgaatgtgtctttgtactaaagagcagtaagcttgatcttggatacattgttgattttgtagttactatgagaatgtcatgttttttcttttcatctcctttttcaggagggtcaacggatccaaagacatttgagtcagttttcaaaatatcaaggaagacatttgactacatttgctctcttgtgaaagccgatttcacagcaaagcctgcaaatttcagcgactcaaatgggaaccctttatctctcaatgaccgtgtagctgtggcgcttaggaggcttggctctggtgaatctctctctgtcattggagagacctttgggatgaaccagtcaacagtctcccaaatcacttggcgctttgttgaatcaatggaagagagagcaatacaccatctctcatggccttcgaaactcgatgaaataaaatcaaagtttgagaaaatctcaggtcttcctaactgctgtggcgctatcgacattacacatattgttatgaaccttcctgctgtggaaccgtcaaacaaagtttggttggacggagaaaagaacttcagcatgactttgcaggccgtagtagacccggacatgagattcctcgatgtaatagctggttggcctgggagtttaaatgatgatgttgtcctcaagaactcaggattctacaaactagttgagaaagggaagagactgaacggggaaaagttaccgctctcagaaagaaccgagctaagagaatacatagtaggtgattcaggttttcctcttcttccatggcttctcactccataccaaggcaaacccacgtcgcttcctcaaaccgagttcaacaaaagacactccgaggcaacaaaagccgcgcagatggcactatcgaagcttaaagacaggtggaggataataaacggggtaatgtggatgcctgatagaaaccggttaccaaggataatctttgtctgttgcttgctgcacaacattattatcgatatggaggatcaaactttggatgaccaacctttgtctcagcaacatgacatgaactacagacaacgaagctgcaagcttgccgatgaggcttcatcggtcttgagagatgaactctctgaccaactgtgtggaaaaaattcatcagcttgattactctctcccggttcttgtggtctttctatgaaagcttcatttgcttctttttccttctggtaattttgtttagcataacattttatcgtttgatttgatctattgacatattcttttatgggacaaacaaaaatgtgtatcttatgaatgttatttttaatttatacaacttgtatgtttcatcgacgtctaaactcattgcaattgtcattatagaatgccgcatagactgatttatgttactagtaatcatatttattattgactcatgtatgcgatacataaagaggaattggtttgcgtgagaaacaactacacaagtacatttctaaatctctctaacttcaaaaatcaaaacatattgaaacaaaaggaataaacatgttataaccaatacatagaccgaacaaaaaaggaaacgatacagagaacccaaagaaagtctcattttcagctttattaagagcttttactgataagcaacaatggcttctaaaggaatggaggaagtatcacccatcttcttggatactttggctttccatcttttccatcaaatatctgcaataccaatatcaaacaatccacaataagaacattatttgagaattttcagttccgctaaaatcatatcgtgagaccgctatgtttacctttctcagacggctgtgctttccaagagcccaattagtcatgattagagcagcaacagcgaggaaaacatatcctgcaatggtctgagtagcgatgttgaatcctagccattggtaaatctcggtagtgtaattggcacatgtaacaatgttgaagaggaaaccgcgtggaatctggtagcctccagccccactggggtccctcagattcttcagcaatatgtgacagtaaaagtttgcgacttggcaaaccaaaccaaacccgaaaccaatcttcatctgaaggtcactaactggagtgtacaagggatggttgacgtaataagcaatgtaagcaccaaagctccagtaataagcacagttcctgaacacattcccgattggggaggttgcgtggctgaaccgatgtacgaaaaacgtttctaagatccgtttgaagtagtgaaagcaccagtagtacatagcgtacgtctggaccggatggatcacacagtcctctccataaccaagaaacttgtaaacagggaagtagtaaaagacagggtagataaggagagggccaagatactcgaagaagaagagtgtgcggtaggaaacttgtgcccccaggtctttgaagactacagttaaggagttgttgtttccatcacagtactccttcagtgatttcttgctattgaggacaacaggtttgtccttcgatccaggagtcacgggaagagtcagtctttgcctcgacgggtaaaacttcttagctgttgaaacaacaaaacccaaatcaaacagtttaatacctactgagagaaaatcaaactaagatttgaatgaacgagataaatataatacatacagaatatacattgtactgtatagtaagatgatttcagataattgccattgatggacaatctaaagtgaacctttattaaagctaaaaagggactgatccataaatgacaaaaggttgtgatgattaattcaaatccaaaactgtgtttagaagcttaagtgatccttatcagcagaaaacattatcaaatctaaatactccttaagcttccacacagatcttgattatataaccccataagcatcaaatggtataaggagaactcaaacacataaacactagcttaagcttacacactcaggtgagatctataccaacattcgacaagtcaaatttcaagtaaaaatgaaaactttggaaactttacctctcttatgaaacgcttcttgcagatcagcaacagtcgcctgcgaagcacaaaacacacgaaatcgaaatcaacaacccaaaaatcataaagcatgcaactttccctacattgagggaccaaactaaagaacaaaaaccttcaatcacattttggaaacaaacccacgaatcagaagaagaagcagatcggagaagagagtatcataagaaacgagaaagtaccgaatcggggaggtcaaggggagctttgaggacttctctgccgctgcgggagacgacggtgaccttcatggtgcttaagcggagcaaacgaggaagacccagatgaggaaattgagagagatagagagacaagggaaattaaatagagaggaagaagaagacgagattgagcattgaagaggatgtagttgggagtaggagaactactaactatcttcccaacttatgcgattagattgggaccattttacatttttagttgctccccatcattttttttttggtttttactccaaacaaaaacatttgttgcaattgcaaattatggctttgttttaaggatccaccattagtaattactcagtttaggtttagatttttgttttttcggtttatgaatctactatactatagattatctgctaaggttttagtttcggttaagtttcgaattttagtcaaatatataatttgtattcaaaaacaaaaacttttactataattttttttatcaaatcgagtgatccggtcaacttagataggaaccaccaaagtgttactcgttttttttttggtatttggtttagtcatgtttagttaaaacgtaaaagcattgcagtattcgctatagaaaagagtgaaataatgttacctagaagagattgattcatgagcacaaaaacattagttgcaaacttctaccccctcacttgatgacatatgtccatcgtattgatctaatgctaaaataaaatgttgtatcaatgcagtaaaaaagttaggattttacataccacaaaatgggatggagtaatgagaacgaatccttgtcattgtcgtataaaagatgcaaataataaatgatcccggcccttaaccacatggaagtagtgtgttagtttagttatattggtcaatgaaatttgcttttccaacaaaaaaaaatcacccaaagtcaatcgcatacgagagctctattaattcaagagagcagcaaataaagcaaaaactcaaaacctaagttttctgaatatgaaaggggttagataatcattctctcaactagttaaaaaaagtaatgataaaattaaaaacacaatggatcaattaagagacagtagtttatgatatatatggttgggatcgattagttgacatcacaaagatcaaaataatgaccggtaattgcccaaataccaaggcgacaattcatgcgatattcaaacaccttaatgtcattcaaatactataactaactatcctcaattaacaaagctagctagatttttctcaagtgagcaacagtctaattcttctgaaaaaacttgttttttccgagtgtaaattatccaatctacttactacaatttgagcattaatctagttttctctgcaactttaaaaccaggtgtacaagtgtcaacaccagatctagcgtaaaacacttaagctagtacttaaatagattatgcctattttttcgaccattatatattaaactttccagcctttcgtgaaaaaatgcgcatgttcttgttggaatctaggaatcttcttctactaaagattggcatgcacgtggtaacgatttccattgtatactatctcgatattttcccaccttaaatatcttgaaaattaagatcaaattatatgagaacatatattgtatcattgtttgtaatagccttatatagtgtgtagatgtgaactatggatacaaaaaacaataggaaagaaaaagctgcagagaaggtgttgctttacaactatgaatatgggctcatgagatgtacactacagataagcgaagattcctgttgcatgaaaatgtgttactaataaaaaaaacacatgcacatttctataaagacgaatttcttttaaataataaatttctataacaaataaagataagtgctcctttaaaaacatgcaaaagaatatatagatttaccgtatcagattttcatacaatttttatattttttgagcttgaaagattaacatgacaaactgtatcgtgtgtcctcgtctattcacccctagaagaagtgaaacatggaactttatgtatttgcatacggcgagctagcttcttccctacttgtccaatagatgaagacattatcactcaggttcagctacttcgaagcgcaacatatcgacaaaaaatcgttttagctctatcatctgtcttttgaagaaaaatatcaacatatcaaatacatatacacactccccacaaatatataaccacaatatatattggttactacgaaattccaatgatattgctctttgaaacaactaaactgtgaattacaagctaaggcaatatatctattatattctttctttgtgtctcaacttcatccctttctaagtaattcaaattaattggaagttttgtcatctaaattgaagttcttcttaccggatcattttgtctcaggttgatatatactttcttagtctgatacgaaaaacttataaatataatgattagagagagacatgtttgatgttatatttttctggtaaaaaacatcttgattatgaactatatagttagggatatgtttgatgttgtgtgtcgacatagtgaggtccattaaaaagaaggtctgattaaattttacgtttggaccacaaatctttcttttagaaatcgcggactgggacaccttcctacaacatgtccgtctttactaatcttacgtacccctcacattcgtaaccataaaatcatcaaatataatatagagactggtgatcataattcgaaatatttttcactaattcaatgttatcggtaagttatattaggggtataacatcaagaatcacgaaagaattaaaaacaaccttgtcgaatcatgatttgattttttggcttatactttctaatttttatatcttgtgctgcaaattagcaccaaaatatatatattcttcttcttcaacatcgaattctttattttgttaaaggcatttttttcttaacagaggaattttacatcattcttagactgaactttcgggataaaaaatctcgccatgcaaaggtaatttattttttcatgacaaaagccacaatggcgataattataactataatactatgcaaaacgaaactttacttgggtcataccgaggaaaacaaaggtacactcgattgtgacaactccaccaaagaccaccccactaccaattcacctttatttgtttctttattcactcaaaatctttttaatttttttaattaattcaattattcgcttctctcgttgttttttaaccttttaattaaaaattgaaaggaggtgcctagggtttctctctctgcatggccactctcgctcttcacatctttttttgggcaccattgttaacgtatgcaaaaaaaaaaaaaaaaaaaaaaaaaacttacatgctaagaaaactctctttccttgtcgtttctctcataaaagaaatttatttaaacttattttagtccaaaatttatcgttgctgatgaaaaatacaatataggaagtgggatcggatcggacaaggagtgaattatctaccaacttagatttcactcgtcttttgattgacaagtaacatacacaataaacacatatgcataattatttccatcttcaaccaaatgttgtagtgaagtaatttgatctatgttatacggacatctatctactaaatttttgaaaaaaaaaaaaaaaactatctattacatgctccaaattattacttgcttatgtaatttatgcgtatattagagatgttggtgtttttctgaaatttgatatatgttcttttatctctgaaatatgatatgtgaatcatcatagcattttcagtggttacaaccttatcgaatcgacaaaagattgaaacaaattggaaaaaaataaaatagttttactattttctaagcagcgtgaaatgaatatcagtataatatatgaaacaaattcgtacgtgataaatatgtatacagtgatacaaccaagaacgatgacgtatatgattgacttgcaaaaataagcaaacaaaatacctgttcaaatcgacacttaattccaaaaaggttagtaataagtaagaaggcttttatttatgaaaacaaaaagaaataaagagcctaagagaatgatgaaaattgaaagagaaaaaagagcattgttatagaaaagaaaaaaaagagagagtaaagagaattaagaaacacaataaattaaacaaaggaaacttcatttcttctctttatcccattcagctcctcccttctctctctctctctctctctctctctctagatcaattctttcttctatgatgtgattatccaccatatctgcgacctcttacctaaaaaggatacaagtaagagattcaaagatggttttctcatctcttccagtgaatcagttcgattcccaaaattggcagcaggtaaaaatcagtttatgatatttgctagatgtttctgattcgttcctttttcctccaagctcgatcaagatttatgaaaatttgatgagattttgttcgacaaaattcctagctattgtggacgcgcatatatattacttatgaatattcttagttgattaaaccctttttttttcttgtcttctcgaatatacgaaaatatataaagatgatttcaattttggtctttttttctacttcaagactttttaaaaaattattcttagttgataaaaaccttttttcttgtcttctccaagggcttatgtataatgtttttcttacaggattaattttctctttggttagatttttacaccgccatggaattatcacttcaaaaataaaaaagtttaaagttactatgactttaatctgagttatttatccattttctttttgcagctttgttgaaaaactataattaatctgcaattcttgtcaaagtagtcacaatttttatctattttcttttgtctccgaccaatgtttcaaactcgaatcctttcgttaaaagttgtttctgctttattataaacctgaaactaattagtacaaattatgttaatatgcagcaagggaaccaacatcagctagaatgtgtcacaactgaccagaaccctaataattacttacggcagctctcatcaccaccgacttctcaggttgcaggttcgagtcaagctagagtgaattcaatggtggaacgtgctcggatcgcaaaagtcccattgcctgaagcagctctaaattgccctagatgtgactcaaccaatactaagttctgttacttcaataactatagccttactcaacctcgccatttctgcaaaacatgtcgtcgctattggacacgtggcggttccttgaggaatgttcctgttggaggaggctttaggaggaacaagagaagcaaatccagatcgaaatctacggtcgtggtctcgactgataatactactagtacttcatcacttacttctcgcccaagttactcaaaccctagcaagtttcatagctacggtcaaatcccggagtttaattccaacttgcccatcttgcctcctctccaaagccttggagattacaattcaagcaacactggattagattttggtggaactcaaataagcaacatgataagtggtatgagttctagtggtgggatcttggatgcatggagaatacctccatcacaacaagctcagcaattccctttcttgatcaacactaccggattggtgcaatcttcaaacgcgttatatccattactagaaggtaagggaggtgttaatcaaggtgattctcaacagaagagtagtgattattccaatcagctaatgtttaagcccttgatggatttttcttcaggcggggttagcgccacgcaaacaagaaatgtgaaggcggaagagaatgatcaggatcggggtagggatggggatggagtgaataacttatcaagaaactttttgggtaatatcaacataaactcaggcaggaacgaggaatacacatcatggggaggtaacagttcttggaccggtttcacctccaacaactcaacaggccatctctcattctaagtactcagcactagctattcttgatgattcttttgttggttggggtgtacattggtgcttgtcatgcgagttattgctgaggaagatcaaaccatgcagctatatccaaaggctaattttgaggctcaaaggaaaggtatggttataaaactatctttttgatcttttaaaagatcttcaaagtgtgagtatgtttattggttggcttctggtgatatttatgttttattagaatttggtcttatatattggctatatatagaggtgtgggtgatatgtatgaattcaagagttgatgttggaaacttttttgtgtgttcattgaataatcatcgaattctcaatttcttggagacccattatgagacattgagacatctatagaacatatatgtaatgtatattaaacgtacttaagtcgaattttatgaccaaagtaaataaattatgccgaatgtacatgctaatatcgagtttaaactattttttccaatataacaactattttctctttcgtccaacttatatactcttattctgattcttattttcttctttttaattcctttttcctttcccaagacacaaaaaaaaaaaaatacagaaacgaaaaaaagagattttaaaaattcataacccacgagaattatgcacctaaattcagactaatcccccaaatttcagaaatttatgtatttttgcgatttaatattgtgttcacaatcataatggccaactaactaattgaaaagacaatggaatgactgaaaccatgcataatctctcaagtctcaacctatgaagaatcatgtaaccaatagactatcatcatgattagttaatgcatgatctataatgtattctttgaacatagatatgtcatttatctggatataaagatggcgttttaacctactttgcaatttttgttatatctttcttctaatacatatgatcaatacacttttgtttttaaaagaaattaaaaacttatttcaaacatcgatcacaacatgacatagggtgaatctacacctaaattgactacagtagttagatatatatacttcaaattttaaatatagtgatgtacgtatgtaattggtacttcatattattattatgatgtatgtaattggtacctatattttggaacagaacaaaaaaagaagacactaaacgagctaaagaacaatggaaatttcagttataaggaattgtgggataagggacaaattaaactaacgtaagactagcgcgcaggtctatatatgtgtcaaaagcacggacttatataggtacatacatgagatacaccccccatacacacttatacaacacattcatgaagagagtcatatttcattttcttttaacgtattttttgggccaatccattttgttttcgctattattcggattctatatttctagctccctattaatatgaaattcattaatcaataaaaacgttatttgtaaagatagaaacgttttcgaggaatttctcccgcgacatcaagtttacatattgcggtatcaatacacattttctgaaaatagagaaatgaatttttatcaaaagctgaaagaaacagaagttttttattgctaattacaaactgatttataagcgttaaaagtgaaccgaatttgagtgtgagtggtagcctaatgagtggtgatctccaagggattgtggaatctggacctttaggatctgcttttgcaaaaaccaatgccctcaaaagaaagcgtttatttcccaaaatcatatcactctcttccccattagcattagagttaagagaagcatatgtttaagtctcgtcctcaatacatatcaacgcaactttaggcccaaaggtcatctttcaattagtgcaacttctttttttccttgctctattctgtttttgaatgtacgtttttcatattacggtctatccgaaatagtcgctcacgttcttccacatgccctcaaaccatgacctcactatcttctttttcacatgataattttatgagatattacctttctctaatgaataaactttattctaattcacttttgattcttttccttaaaccaagtgcgatcggtttctgaattattttattggaaatttggcaaagatagagctttgttttgggcttgtttccatatgatctctagtgttcttgggctccttccaagattaggcaagtccagtctcctgctcatgtagtagttggatatatctcttctctgggatacatacctaatcggttttgatcttttgttggagattgttcgggtccggtcttcggcttcttcttttgtatgtaaccaaaccgaaattgaaattgtacatctctctctctctaactggtatattggatattttcctctaattcattatttccattgacaagatttttcccttaatatgaacaaacatattccattttagctttaaatcacaaaaaaaagagataaatttctcaaaagaaattataagtagacaccgccctttttataaacaaccctaaaagtagtaaaaataatatcgagacgagacgggtttgtttcttctctctatctctatatctaccaaaatcctttgccccccgaatctagttctctcgatcgaccctgtgacgatggctaataaccaagcaagccttcttctgcagaaacagcttaaaggtttctcttttattctctcttgttttcgatctgattttggtattcgattggttttgatttcgagtattgtggtgaatttcgtttctgggtttagctaattcttcttgggttcttttcagatctgtgtaagaaacctgttgatggtttctctgctggcctcgttgatgagaagaacgttttccaatggagcgtctctattatgggtcctcctgatactttgtagtgcgtttctttttccctattcatgaatttgtcttttgcttatttcaattgtgcattgatttggtttcaatttgttatggcattggctaaagcttgattctttatgattggttctgttgtgctactttgctccactcattggataaaacattaatgacttgttttcctcgtctgctgtttattcatagtgatgaatttgttatggtaccaatatttacattgcattgaaacttttatctctctgattgcagtgaaggtggcttttttaatgcaattatgtcgtttccggagaattatccagtttcaccaccaactgtgacgtttacctcggagatgtggcatcctaatggtgactgatttttctggaaaatatatctctttctcgagcttttaggatttagtcttctgatgatttatactcttttgactgcagtttattctgatggaaaagtttgcatttctattcttcatcctcctggtgatgatcctcatggatacgagcttgcctctgaacgttggacccctgtccatacggtatgttttttcttttaccgtttagcttcagtactctggtaatttgtttgcagggttgagttatctatggcttcgaatatcttggggtctgctttatagcctaacattcttcgaatacagctagctttctcttgtgtagatagcttgtagaaacagacatgttttgttcgatattgagcttatacagtgattgcttttcaaatgttcgtggaatttataagtcaggacttaggaatactctggaggatagtgcaacttagattgaacctctgtcgttagggtgcttgagtggaatatgattcactttctgatttatctgccctgtaccacctcttaatcgatagtgttcttattagatcatgaggaaagaaactagaggtacattgaagctaatgttgggtctgtgtatgatatgcaggtagaaagcattgtgttgagtatcatatcgatgctctcaggtcccaacgatgagtcaccagcgaatgtggaagctgcaaaggaatggagagacaacagagcagagtttaggaagaaagtgagtcgctgtgtgagaagatcgcaagagatgctatgaacatctctccagcgtttttttcgtgttgtagaaatatcgattctaatcttcttatgagaaagcctaagcagaaccaaccatcttcaagcagcagccagatgaatctgactttgcaaaagcttctctttctttttcctttttgggttttgttctctaaggtttggtttggaatattggtgtggaatcaaatccgctccatattttaggattatattattgcactcgttaatggattcgtttgatctggctttttaactttattctggttttgggttacaaaatacttgcctcgttaattatctcaaatttaactgatggtggtttaactgcaaaaggccagaagttcgaaaagagtattgttattcagttggtatgcaacaaaaaattgtggttaatggtttcaactgatgttgccgcggtcataagaaacaaaacaaaaaatattccttgaagattgcggggtctagcacacgagctcacacataaaataagataagagcaacgagaagattatatttttaaatgtcctaaccatatataatttaacaattaagggatcaatcataaatttattcgtatttcagttacatgactggttaattatagcccaaattttttacaattaactattattatattcatatgctaggtttctttcttactcattattggtccactcacatcttccccaaacaattgtatttaagtttttttcttcgaaagttatcacttttagttagatccgcaaaatcgtggatctccaaagctaaaacgaaaaaaaagaaaaatagtctataagtaaaacatgataccgaacaaaacaagagtatataacttatagactataagtaaacaattaaaacaataaagaaccaaaatatgtgaaccaaattaaaattagtgttaaattttgttttggttattctcgtgaaaaggaggaatagctcgaacgtcattttcacactttctttaacgactccactccagcattaattacccaaacagttctgttgcaaaaacatttaaagagagaccagcaaaagttttgagttattgtctcttttgtgtgtacctaatccattttttttttttttaaagaagtaatattacggagtatattgctttcttaatgatatgtcagaaatgtcccgtgtaagtaatatgaaaaccggttttcaaatcaaagtgcactttctctagctcacctgtgtttggtcgaactcgaatccctctgaccactactaacgtaaaaaagctcattgcattaatgtttcgaccgtttcatcgtttattatactgtcttaaattaaaatcattaagcatttaattgatttgtcatttcgaaatttatgttgacaaaaatgactttacgatcaaaccggtttgattaagtaacgtagactaatgctattatggtgatatatatgcaaaagataagaatagtttatcaacgaaaggatctataaattatgcttgttcgacttcttagcatagaaaattggtaatttatttacacctcatgccgttaaaaaatcacaatcacaagtattcataacctaaaattcaacaaagaaatcaattacgtattcttcatttttccacattaaaccagaatcttaaaccaaaccaatccaaaaaagcgacatttaaaccaatccggttatcaaactatctctctctcactcacacacctttctcttttcgcatcactttccctctcattcttctttcttatctctctctctctctttctctgactctctccttgatgcctcgtgactgcaaccaaagcaatttaaaaccgccgcacttctcatgagtcttcttcctcatcatcatcatcatcaccgttaactgtaatttatcttctccgatcttcattctccgccatgcgctcgccgcatgctttccgtaacggcgaatctccgactttacgggaccatactcacttccactcaaccgtcacagctcagaaactccgtcgattcaactccttaatcctcctcctccgtctcgcttctttctccttctctctcgcttccgccgtctttatgctcaccaattcccgcggctccgcttctcctcactggtacgatttcgacgctttcaggttcgattcctctctcaatctttttcctcaatttcgaaattcatgaaccgaatctaactttttttgttttggtttgctttgcagattcgtgtttgtggcaaacgcgatcgtggcgttatactcggtgtttgaaatgggaacttgcgtttgggaattttcaagagaaaccaccttatggcctgaagcttttcaggtctggttcgattttggccatgaccaggtatactatttttaaattgaataaaggaaaacatgtctcaacgattagctactaattttctacgaattgagttaattattttattgttaagctgatctttagtttaatccctaattaaataactaaccaaacccattgcaatgttcaaatattggtaatgggggcaggtgttctcgtacctattgctatcggcgggatcggctgcagcagcattggctagaacgatgagaggtggtgacacgtgtacggctaacaaagccttttgcttgcagtcagatgtagccattggcttaggctttgctgcttttctattcttagctttctcttcttgcttctctggttttcgtgtagcttgtttccttattactggctctcgttttcacctttactcatgatgattgttttatggaattgattgatgtgttaaaaagaatttaccataagaagataaattttataatccctcaaaactatgaagagcttctcaagtttacataacaaccataaatttacagtatttcataaaattgaagagatcagaggaatgctgtaatcagtttttcaggattttgtggagttggttttaagcttcagctactgtaggagtttgctctactactttgaccttggctttgccagttttcttaccaacctttggcttcttctcatcttcttctttctctggattcagctcgatccttgcaaatacgggactcgcttgctccattacttgtcctccctttagccctccccatttggtgtcactctaaagacagaataagagttagatcaaagccaaaactcaggcgagttttgttaaacggtaactaaaatctggtgaatgaaatcgtatgttacccaggttatgctattgaattgatcctctgtatagccaagctgtgaatagatcctcagacttaggcaaggtgcaacgggggataacgcaaccgctatgactctcattacttccagtataatcaccagatcctgcaattataagcagaaaaccagtcactagctttgatatcctccaaccatcaaattggtaatagatcctttgttttgtaagaagaatggcaattagggaaacgaaataagaccttggctgcctcttctgctgagacaccaccttgtttgaacagaaaccatggtgctcgttgatccatgtaggtatttcccgcatttccaatctctaaaacagcttcacacgctgatgatagtgacagattttcatagtttgtcctagccttctcaaccttttaacagagaatggtgcagtttgagatgaaagattgacctaataaagccattttgagacgaaagtggtgtagagatgtcattagaaccttaccagcttctccactgtgtctttcaaaggaactccttcggctgcaactgtcgagtctaccactaaagtggattcacagttctttttaagaagaccaagagtacggttaagaagatttcctgaagagaaatgcattgataaacatttttcagaaacaagttctgtaccaaataaccaaaaggctgaacaactacttaagatttagttttcgtagagtaagaaacctatagtgttggcgagatgtgcattgacgatttttataaatcggtcttctgaatagtccccatcgtttccaaattcaacctcccgtaggaagaaatacctcacggcatctggcccaaatttctgaaccaactcaaacggttctagagtattccccaacgattttcccatcttcattccatcctataatttgataactatgggatatcagaaaagaaaaatccaattttcctctcacatgttaacatgactaaaggaagttggcaagaacaagatctcaacactgaacagggaatatgcagcatcaagagttttttggtcatgtacctttgtcagaaacccatggccaaacaccatcttgggaagttcaagaccagcagacattagcatggcaggccagtagacagcgtgaaatcgtagaatatcctgcagaaaagcggcattatcaaatagacaaatatgaagtcatgaatttggaaacacatgtgtgaagaaagttgtacttcttgccgcaatccagaagctggaaacaaacagttctcaactaaccatttaactacacttctatttcatttcatttcactgaatccaaaacaacgaacaaccaacaattacgtttaaatttaatgatcatggaattgctattgtttccagtaaatcccagttattgaaggtgaatcagattaatattacaagagtcgataatgactctaagctatacctttccgatcaaatgcaatgaagcaggccagccaaatgaaacagcagtttctagattttgttgtttgttgtcctctgttagagctgatatgtaactgcaatgagaaacggcaaatattaacttcaatgtttaatctcgcaactaagagaaacaacctttctttatatgaacagacataagttatgacatatcatcaatgtgtggagacataacaaagacttaagcagtaaccacatataattcttgatagaaagaaaaaagatatatacccaagtagagcatcaaaccaaacatatatggtttgcttatcgtcgtcgggaacaggaattccccaatccactaatgctcgagaaatggaaaaatctcttaagccactctttatccaactttgtacctacaaaaaaagagactattagaaaaggattaagaaagaatgagctataataaaaaactctctgttttcttttgaataatctgtatcaccaaaggttcacatgcactacttgaatgctacaaggaagagaacttcaaagaatgtgtctcacctcattaagacgatacgaaggctgcacaaaacgaggattctgggccaaaatgtcttcaagtggtttctgatatttcgacaaagcaaagaagtagttatcttctttccttgcaacacatggcatttgatggacagggcaacaattgttttcaagcaactctttctcatcctacagaattcaaaaacaaagcagacccataaagcttgtggcacaggcaagaaagtatatatacctttccaaatttcaaaatcaaaccttatattcctcgcagttaacacagtaaagaccttcataatcagctctgtaaatatcaccgtttgcgaaaacacgagcgtagaactcttttacaatagcttcatgcttaggatcagtagttctaatgaatttgtcataagctatatcgagatctttccaaagagttctataagattgagaaatgaggtcacaatgttcaggaggattacgtccattagcagctgctgaagtagctatcttctcaccatgttcatctgttcctgtgataaagataaccttcttaccaagcagtctctacacagataacaacataaaatcaacactttgattcctttaaaaattgaaactttaagtcagagactgattgagaaacaaacctggaaacgagcaattgaatcggcggcgatagtggtgtaagcactacccatgtggggaggggcattaacgtaataaagaggagtggtgaggacaaatgtctcgccttcatcgacggtactttcctgggaactggaagtgcaatagagagctctcttccctgaggaaaactgagaataataaggaagctttttggaaaatctgaagctgtttcttctaaaagagaatggtttggtattgaggggagtgttaaaaggctttaaaaaagagagggcgttatgaagcgaagtgtttatcctcgccgccattgatgaaagaggacatccaccggagaagaagcagaggaaggaaatgaagaaagggactgctaaaatttggagcgcaatttaggtcatggttcggttttatcggtcagcgaagcgagttatccggtataccaaggaaaatataactaataaagtcaaatttttaaatttttttatctatttcttgcagagcattgagaatatgttaatccaattgacgcccactcttccggttaagagagccgtggttgatttttactctccaacattgcaaaataattacatgttggtcatctaagatcacctatcaactaagtaccaacagcccatacgtcaagtgcttcgttcgtgataccatgagaaatggactctagtgacatgatcaagttttatcataagtggcgatttacagggctccaccagctagttttattaatccgtttggattttctaaagtcgctgagttttgcctctaatccttcatagctatgaaagagtaaaatattaccgctgtgaaggtccactgaacaaagttacctcgatgtacatattgaagcccttgaaggatcatcagtgtgaaacggcgaataaagtgtatgggaagagttcctgcagtagcatactccataaagtgtatggaaatgcttttttatctcatggaaaagggttcctgcagtagcatactccataaggaaaccataggttgtcggagtaagcttatgtatgcactttcccgtgcattgaacaattacagttgaaccttggaacactgagattagataaaattcttgtctcgcctcagactcggatttacaactcttatagacataatacaccacattgccatccggtgtataaattgcagtagctccaccttagcagaatccgcctcagacgttaatatcttcttcattgtcctagggagtaactctagatctatttgatcacacaaaatctcttctgctcctacttttggtcttgctaaagccatctgtttcatctctttcacaaagtctgcataactatgagtagggctggacacaagacaagtacttgcaaaattgaagatatttgtgacccgacttgccttatacaagtaattggatttttggcttgttttgtcaaaacgagtacttggtcaagaaaattgatttcaccgctgattaagtcttacggaatcaagaaaattttgttgaatcattaaatttattttgcttccaagccattgtttcatttcttttattaatttgtgtgaaattttattaatttgtcttctgctctagccctctctttcacgtatataacatacatagattaaactcatccattttaacatgtatccaagtccaattttctcggtggtcaaagtggcgttcttcgtacaaattatcgataaattttatagagaaattttacaaattatgtaatttcttacaaaaatttgatctaaaaagtagttttttctttataatcaataatgtttatgaaaccaattatacgtagaaacaaatattttgttttaaaaaaaaaaagaaaatcgacatagtaaaagtattagaattgaactttataaagaattaatacaaattgaaaaaaaatagtagaattatatttcactaaatatttcaaatttcatatttatatattaatttataaagattttactgtatttttttgataacatttacagcaaatccaataagtccattgaaaaatattcagaaaatcactaaaacattctatttctcgtcttaaagttgtcaaagattaatttttgtttgtataaaaaaaagctcacttctgttactaacttgttggaccttttattaatttgtcttgtgatttagtttagacccctctttcacgtatataattttgttacatatgaaaaacgagacaaaaaatcatccaatgaaattataacacgtgtagatatttatttcaatctgcttacgaaaaacgccactttgaccaccgagaaaactggacttggacaaaaagacagtctttgttctggaacggcgtttcacacaggtggaggccaccatcaaatatttaattacaaaactataacattatatattccaatttataattttgttactttcttatttgtttcttttttgtttagagaagaaatagtaaacgattgattattcacatcgttgacttgttaatctattttaggactatataaaatcaagagaaaaatattcagcaaatcactaacacattctatttctcgtcttcaagttgtcaaattatggtatttgtttgacatttccaaagaaaaatctacatttcataatttcatatatattaatttccttacacataaacctctaaatattttcatatttacataaatagaacaatattccataataattaatagcgttatcattctagaaaaagggcaaaactttaaaaaccaaccctttcttcctcctcctccgagttcttctttctcttcttcgcctcctcctcctccaaggtaaagtattcagctttttcaaattcagtttcttcacaatcggaaataatgaagctttcttaatccaacattttctctttatccaacaacagatctattttttcctcatcagattcatagatttcgtactgttttttaaatccagattgtgtttaggtcaccgagttgaatcttaggtcgtattgatttgtagattttcctctttcgtactcttgttcttcgttttatccctcagaatatgatttgagaaaaaaaaagatctctttgatacttcatttcagttaggacgacattaacgtgtgtgtgtctgtttgtttgttgtgtgcagtgtagaacgacgattgttgaatgcgttattgtaattgttaagaattgaagttaaagtgttgtttttgaatctggtgaaatggtgtggtttcgtgctggttccagtgttacaaagctagctgttagaaggattttgaatcagggtgcttcgtatgcgacgaggacacggtctattccgtctcaaactcgttcctttcactcgactatatgcagaccaaaggctcagagtgctccagttcctagagctgttcctctttctaagctaactgatagtttcttagatgggacgagcagtgtctaccttgaggagttacaaagggcttgggaagctgatcctaacagtgtagatgagtcttgggataatttctttaggaactttgttggtcaggctgccacgtctcctggcatctctgggcagacaattcaggagagtatgaggctgttgttacttgttagggcttatcaggtgaatggtcacatgaaagcgaagttggatccgttaggtttggaacagcgagagatccctgaggatcttgacttggctctttatggattcactgaggctgaccttgacagagagttcttcttgggggtgtggcagatgtcaggattcatgtctgagaaccgaccagtgcagacccttcgttccatattgacaaggctcgaacaggcatactgtgggaatatcggatttgagtatatgcacattgcagatcgagataaatgtaactggttgagagaaaagattgagacaccaactccttggcggtacaacagggagcgccgtgaggtgattctcgatcggcttgcatggagtactcagttcgagaatttcttagctaccaagtggacaacagccaaaagatttggacttgagggaggagaatcattaattcctggaatgaaggagatgtttgacagagcagcagatcttggagtagagagtattgttattggaatgtctcacagaggaagattgaatgttctgggtaatgttgttcggaagccactccgtcagatatttagtgagttcagtggtggtattaggcctgtagatgaagttggctacactggaactggtgatgtcaaatatcacttgggaacctcttatgatcgacctacaagaggtgggaagaaaatccatctctctttggttgctaatccaagtcacttggaagctgcagattctgttgttgttggcaaaaccagagcaaaacagtactactccaatgatttagacaggaccaaaaatttaggtattttgattcacggagatggtagttttgctggacaaggggtagtctatgaaactctccatcttagtgctcttccaaactacaccaccggaggaaccatacatattgtggtgaacaaccaagtggctttcacgacagatccaagggcggggagatcttcccagtattgtactgatgttgcaaaggctttgagtgctcccatctttcatgttaatggggatgatgttgaggctgttgttcatgcctgcgagcttgctgctgagtggcgtcagacttttcattctgatgttgtcgttgatttggtttgctaccgtaggttcgggcataatgagatagatgaaccatctttcactcagccaaaaatgtacaaggtttgtgactttattttcttaatatgttaacccaaaaagcatctactatggatttatgacttgttgaagttttctaatgtttttgttttgaactcccttgtcgcttttcaatttgacaggttatcaaaaatcatccttcaacccttcagatctaccacaaaaagctcttggaatgcggtgaagtatcacaacaggatattgaccggatacaggaaaaggttaacaccatcctcaatgaagaatttgtcgctagtaaggactatctccctaagaaacgagattggctttcaaccaattgggctggatttaagtctcctgagcagatctcacgtgttagaaacactgggtgagttggtttgtctttctttctttattttttttctctgtcctattgtctgttaaactttacacttttcttcagcgtcaaaccagagatactgaagactgttggcaaggcaatttcatctcttccagaaaacttcaagccacacagggcagtgaagaaagtttatgaacaacgtgcccaaatgattgaatcaggagagggagttgactgggcccttgcagaagctcttgcttttgctaccttagttgtggaaggcaatcatgtccgattgagtggtcaggatgtcgaacgaggaacatttagtcatcgtcattctgtccttcatgaccaggaaactggagaagagtattgtcctctagatcatctcatcatgaatcaggatcctgagatgtttactgttagcaacaggtacttttacctccatccttcccctctaggaattattgtgctcctagcttgttttcacagctcacagtaaactgacatagagatcgactctctattgctcaactatattctttttcatttctccaaaacgcgatcttacattttgagagaaatcccgcgagtttgttacttgcataccagaattctcattgtaaagattccctactaagctttgcttgttgtgtacagttctctttcagaatttggtgtccttgggttcgaattgggttactccatggaaagcccgaactcgttggtactatgggaagctcagtttggagacttcgccaatggagctcaggtgatatttgatcagttcatcagcagtggagaagccaaatggctgcgtcaaaccgggcttgttatgctacttccccatggttatgatggtcagggacctgaacattcaagtgcgaggttggaacgttaccttcaggtaaattcttcctagatcttatgggttatggtgttgaattagtgaaaatatttaatcgcattttgattctcttcctgactataattatcttctgttatagatgagtgatgataatccctatgtcataccagacatggaaccaacaatgcgaaagcaaattcaagaatgtaattggcagattgtcaatgccacaactcccgccaactatttccatgttctgcggcgacaggtaagacctatttctgattatctcttttaccggtcaccaggtgttgtttccagcttacaatttctttatgtcactcatgttgcagatacacagagacttccgtaagcctctgattgtaatggcaccaaagaacttgctccgtcacaaggactgcaaatcaaatctctcagagtttgatgatgtccaaggccacccaggttttgacaagcaaggaactagatttaagcgattaatcaaggatcagaatgatcactctgatcttgaagaaggcatcagaagattggtactttgctccggaaaggtataaataagctttgttcattttataagatgaatcttgccagtcccagatatgtaaagagaaattcttgctttgcttcgttgtaggtctattatgagcttgatgatgaacggaagaaggttggcgcaacagatgttgctatctgtagagttgaacagctttgtcctttcccatatgatctcattcagcgtgagctcaagagatatccaagtacgtacctaaactatctttggattggtttggtttagcttttatgtctacctctataacttgtttttgtattggtctgaaaaagatgcggagatcgtttggtgccaagaagaggcgatgaacatgggagcattcagctacatatctccacggctatggacagcaatgagaagcgtaaacagaggagatatggaagacattaagtatgttggtcgtggtccttctgctgcaactgccacgggtttctatactttccatgtcaaagagcaagccgggcttgtccagaaagccatcggaaaggaacccatcaattaaaaactcttcctttttaaatgacttctcagactgataagagaaaaaggagaaaactttgaaataagaactttgggtgatgcaaaagtgctaaacaacactgtcaaaatccgctgtttctttgatatttttttggtcccattgattttgagcctggctcgtgttgccagtcaaaacattaaaaaaaaatcttatattgatatacagttttgttattgctcttctttttttcttctttgaatcatcttttgcgttgtcattgtcttttcccttatcttcttgttctctataatatgaaccattgatttcaattgagttatacaactaaccaaaccgttttgaaaccaatatcgatatatgtctgtgccatacaatttactattaagaacgattaagatttggttttctatcaagcttgctacaaaagcattccaagttaaggcaaaagtagatatttatgtaccaattttcttattatatccgaagaaacaaaaaaaaaaagttattaataattcgtagtataggatactaggatttcaaacgccttgacgaaggtagatttgttcataaaatcttcaacctcctccactccaccatagcttcaccaacccactttagaaaatgaagttgttatcacttatcatacataaagacagccaagttagaacaagtaaaactcagatattattctctttgccgaagtgcccatttacatacatcatagatctacaatatgttagaggatgatatgtgacatgtaataccaatatcatatagtttctcaacactattaacatatatactatccaaaaatgtaaacaaaaatcaaataatcgaggatgccttttgataatgtaacactttagaaaaaagcaaaattgtggagccactctaattgctgctgcgaaaaatatgcttttagaggatgcactcatcatacctgtcatgtgtgagacatttggtaccatcattaccagcttcaccatcaaatctttatccctctttctttttcattattagtttttactaataacaagttattcatgttaagagatgatcatagaataagactgaaaattgttgcaaacttgtcgctatgctgttccaaatcatttaccaggattgattagcgagtaaaccatgttttaagcaacgttataattaagttttccttgacggtggaagacaataatttgataaaaacataaaaaggggcttgactagtcagtcttgcatgtaattaatgattttttcacatcattcttggatgggatcaagacttcacctaaatgcatttaagtatttatgaaatctaccaaacaaaaccttctttgatttgcccatttcgaccactactttgttgttttgtactaggtaacaactattatgctacttgtgtgatttaatttttaagacctttattatgacaaagttaagaaattatataattcctacaaatacgaaatactagtgataaaaaaaatcatagccttttgaaattatcaaaatagttctaccaaacacagtgaaataagatcaaacctttccaactgaactaacaatagaagaaagtaggaaacagtttgataacattctccatatagtagcatcaattaattatataagattaaagtttcttcccctactattgccgacactatatttatatgttttggtgaatttatagttcacccaacattttatctttcaaatttataaattttatagagcattttgacactacctttaaatttcaatatggaaaatcatatataagttataaccattgaaacaaaaacttcagaccaagtttatatcatcaacaataccatcatagttaaaaatttggaattgagaatggttgtagcaaaactgttttaactttgaatttttttaagataaaactatactgttattttatataattttgcagtttataatggcatttattgcagttgatgtctaaacaaactttccaatcaaacatacttcagaaacctgtctcatgacgttgtaataataataatatagcaaaatcaagaaacaacataattcactaaaaataaagtaagtaaaagaaagaaagaaagagatagtggctcaagtctcaaactcaatcaaaagcaccaaaccaaagttaccaaacttctcatcaccaaaagagagaagaagaagaaagaaacagagaatcgccatggcagagaaagagaagaaaacaaaaaagaagaagaagaaagagaagcatcaatcttccgacatctctttcaagccttcttcagacgtaaaaggactcaaattcggcggccaaataatcgtcaaatcattcacaatccgacgagcaagaacattcgagcttcttaaactcctctctctcccttcttcatcatcaccgccgcttctttccacggcggcttaccttccgacaaacttcacaatccttgcacaccacgcatggcacacactaacactaggtctcggaacaagaaagtccaaagttgtggtcttcgtgttcgaaacagaggcgatgaaatcatccgttgtggcggcggaaggaggaatctggccatcggagattccattgggagatgtgaacaagaagatgatcagaaagttaaagaactgggagatggcaaggtttaagttcagaaaaggttgtatcacgttttacgtttacgccgtgagaaacgccggaaatgaagggtttgcggcggcggaggacttaaaggtaatattacaagcggtggtggcattgaaagatttcatggatcacaccgcaatgcttgtaatgccccaccagaaaagtattaattacagctcttgtcctccttttgccatggctcactgaactttgaacaatattatacaagtgggccctcttctcttttttcttttctttttactccttttttttgttgatatagaaaaaaaagttcggattattatttatttttggttccataatggggttgtttgttattaatttcctgtatttttttctttgatttgggtggaagattgttggtatgaataagattaaaactgttgagttgggttggttttgttcgtgcatttcatccatagtgatcagaagctgaatctcacttagaattcttaggtaaatcttaaaaaatgtggaagaattggaagattggagaaatatatgtatgaaaaatatttacatttcattagttagtcaattttttcatataaattaaatttcttgttttttctaatttcacatgttttttttatcaataagatttttcttcagatcctataaatcatcattttagtatatgttatgattttcagagcttagttttaagtgtcattatacatatatgacgcatcaaccgaataaagttagaagaagcgagtgttaagggtagtatgttatcctatattttctatgtagttgtgatgtctctgcacattacaatctagtattggtgtattgatctcaggtcacaaccgcacacttacattacatgtctacttctacatggtctcacccaaatatgatttgaatgagactagaatttactacagtatttcatatattaacaattctgtaacattgtcatgtcaagatatgttaacaatgtaaagtcatagttttacaacatgtcatagttgtccaatgatactactactacacattgtcatatttcttagtcttttaaacctttgtcgggtcaaagtatgattggtcgaggaatcggcatttagaaatcttcaactgatgctaatctcatggcctagaaagacataattatcttgtagataaggttatgtttctaaacgcttatattgctttataggttgatggaccatctatatccaacataaagatcacaagtcacacaaatcaatgtttttaagcgtaacgctgaagcaaattttatggaagttccactttatttaaataaaaggaatcagcgaaaaaataattaacaaaaaaatcttaaaattaggataatccgaaattaaacacaaagctgatgatctctcaaatccaaagttcctcagaaccattatgttaggattttccagacaaatactactacatagacaatctccttagtacttacatgcaccattgcttgggttgttccctacgatcataccagttccactgaagttacaagcaccatcagtgcggccgtggctctggaaataagcattcataacaaaagatgcgtgcgtcctcaaactgctcgggttaaagcacgaaccaccagcttggatcggtttacagtcaacaccctgaccacacacccaattaatactgtcttgcagctgagtattcgtcgccccggacctcgctacacaccatttaccgccggcagtactaggtgcgggcaatgctgggcggcctccaccgccttgtccgtttcggagaagaccaacatcgtaaaccggggagaaatctgctcggaaaagtccccagttacgctctgcggtcggaccgggtttgccttcttcgttgaagagaccgaaaatgtatgtctcgaaccgtctgttaggcatgagaggtgtcccttggccttgtgcacgtttgataatgttgaggttgaaccaagcagcattcgcaggcgagcaccaaggtgcgtcacaagcagatggccagccagtctcgccaacgacaatgttaacatcaccgtatccaagagctttcatggctgagtatgtcgagtccatgagtgcatcaaacatgttggtgtagacgtggcgggtgaacgggtcacggactgccttgtacggtgttcggaaaattgcgaagttgacgtttttggggtcaaaaccaaagtaagggtacgggttaaccatgaaaggtgacttggttcggcgatggtaagctaggattggagccaatatgcctttgtcccaacccggcctgaatctaccgctgcttggtgcaccggtcaggtcataggctatgatgttaagtgagtgtgcggttgtaacctgagatcaattgcaacaaatagtagtattagaatcaattgttacctaccaatctccaacaattttcatatgataatcatgttggtctaaatttcctatgaaattggtacattatctcatttacctaggatcacatatatcatgatgtaataaaggaaacataaggcatggcagacagatgaacgaatctaaggacaataggataaccttggacggtgatgagataagcacgtgggatagtctaaatggtcagatcttaatccaatcgctaacattttcaagtttcaaatctttgaattttgctttgggaatttatttttttcctctttttaagaaactaacaatatacaagttggatgaaaaaaagaaagaagcaaacgcaacattctacgtttgcgtgaaattttggatttcaagttagataacagacgaaaaaatagagattgaatctaatttttcaaaataatcaatttttgttttgcatatttttttcaacgttgtttttcaactttatacatatgcgcaatcaatgcattatctctgatataaaaaagggaaagaaaaaaaaacagtgcatttttcacgccaatcatcaattcactattaataattacaatttcttttagttaaagaaaattaaaactaggtaaaaaagttaagtaaacaaaaaaaaaaaaaactttcccactagcaaatatcaaattcaaagttgagatttcaaaattttttatctgaaatttatacaataatgaacatcaaacttaactttaattttatttaccaaaaccaaacaaatattctacttattccttaaaatagaaaaatctgaaaaatagagagaaagctgaccttaacatctctgacaccagcacgaaccaaagcgttgttaagattcctcatcgccggtaagagattattgatcatgttattatctccggtgagcagaatctcatttccgactgagatatacttaatcttcgtctgaggatgaaacggcaaaatgttaaccgaaacccaccgacgagcttgtcttccgttagccaacgccggaatatcaccgttaggaacggtgacaacgacggagataccagttccagcgaaggcacgtaggatatcgggattcacatcgaagatcttgacgctatcaatcgaagtttgtgtcttgataaagttagccacctgagtcggtggtgggaggtttccgagagttccgtagttaacaccgatggcggagatcacggcggggatggtgaggaatacggcggcgcagaggaggaggagaagagagattgacggtggcgctttggccatctttttatatttcggaaatgagaaaaccaaacgattccaagtgaaacccgtgaatcgtttgagttgtgtttttattattacgacgaatagatttttttattcttatcgagaaagtatttataataaaaattaatagatatgaccgttttgtatagcgtatacgtgtgtatatttttagtgaggaacagctggattttgtggaaagcaaaataaaagaagaagtttgtgttgtctttgtttttcatgtgcgtcggcttaaatttaggccgttgtaaattattgaaaaagtggattttgttgtgaccgtggaaactttagttaattaatttggctaattatagagtctgcttttgtttggataatcaatttgtcatctttttctttaatggtttttggctggtaaatactcatactatccaagtttaatctaaaaatatacctctttcttgttaatcgtaattttacaatcctaattttatccagatacggatgaactatatttgaaaaaaaggaactaaagtgaagttaagaaaacaaaagagagatcgagtgttgttttttcttggatacgtttattaaaagatgttcttaatgaggtcaaaggagactatctgagtttttactgctaaacttaaaactaaaaaaaaaatcgattagtaatattgatgtatcaacgaaatgtatatggttaaatattaagtgaaaagaaaaagaagagagatcgacgcggtttgggataatgccattggcccattggacacgtgtttgtaggaggaatagtttggagtttgaacactacggaccaaagtcaaagagattcgaagtatgaagatgttgttgaggaagctgattcgaagtaacttttaccgacacgctttagccatttgttatgctttctttgggaaaagaagatccgcgtccatgtctcattgttaacagtttattgtcattttcaatgacatggttacactcattgcacacacacacaaaccacgtaattttgtatttttttaattaaatcccatccttattttttgcaataacaaattaccattgttactttttaatgatatcacataaaataatcgatgccactcgatagccctttagactaacaatatgtttgttgaagtatgccacaatgtttgaagtgagccggctcaatgctctcatggtggtttagtagtttaacttgagaacttacaacagttttctccttctccacactatttgtatccaagaaggggcattacaatatagaattgcataatacgatttaaacttttaccaaaaaaaaaaaagaaaaaaaaagaaagaattgcgtaatacagaatttatctttaagggaatacaaatataatttggtttcagaatcatctcaataggctttcctttaaccaaacttgggttttattgatgtgcttgctttaatgggcctaaagcccatacaacagcatcactatccacgccgttgtctattcttattattcaccccacccggtacaccgaccaaaccttggccaacacgtccataatatttcatcctccctcctaatttactttaatatcctcaactttcctaatcgttcagggaatattctcatataccctagacatatgcgtcttttccaatctaaaatgttgagagtatatttttatttatatatatatgagtgacccctgcgagagacaacggccactgaacactatcgatctaatcttttcagctctctccatcgtcgtcgtatctgtgactctcgtgatcatcgcctgaaaaaaatttgagataatggccagaaagttcttcgtcggaggcaactggaaatgtgtaagtgatctttaccttctattgcgcaccttattattagtcttgtcacttgatccttccccgatcaagtcaaagagatcggaaaatcccgatcttaagatctaaggtttttttcattatttgtagcggtggaatttgaattgtaatgcatatggttcagatttgtcgattctatgccggatcttagttgtttttttttgtcaaaattttgagtaggaatttttcttcaattgatatctcgtgttctagctttggtggatccgtgtgttaattttgttggttaaactattttaacatgttaatatttgaatttgtaatcttatatagaacggaactgctgaggaggtgaagaagattgtgaacactcttaatgaagctcaggttccttcacaggatgttgtaggtatgtgtagcatctcaattgctttgacgacattatggctttttttttaatttccatgtctatgaaatcttaagtagtgacaaatattttgggcatacaattacaaacctgtttcaatgtacatcgatgttctatagtgtttatgcttcttaggaaccatggatagatctagtgtttgttgttagttaaaatgttctttatcatatacttgttatggttctatctttgttgatagttataagtatgtttgttcttgtattaataatttgatgaaattttactaaatgcagaggttgtggttagccctccatatgtttttcttcccctggttaagagcacattgaggtctgacttttttgttgcggcacaaaactgttgggttaagaaaggaggtgctttcactggtgaagtgaggtgagattctaaccattggtgtatactttaagctgttttaccattattgcttcatgcagtaaatatttatggttttgaaaatgaatatgattgtgtttataaacgaatcgatttttccatctgttcttcttctttatcttctttcctataagaattgtgtaacctaagtgattaagaaaacaactagtagttggtagtaagaccatgattggattcgtgcctggttagacaagtaggtgtaatatgatttacctgtctatggaatgctttcataggaagaaaagatatattctgtggtgcctgtatttcctgctcttatgcattgtgtaatttgtgtgttttagtgcggagatgcttgtgaacttggatattccatgggttatccttggtcactctgaaaggagggcaatccttaatgaatcaagcgaggttggtgactttacatgataaaataattttctggagactcaaatagcttttaaattcatgattttggtttttgacctctatcctacatttgtagttcgtcggagacaaggttgcctatgcacttgctcaaggtttgaaagtgattgcttgtgttggtgagactcttgaggagcgggaagctggatcgaccatggatgttgtggctgcccagaccaaggctattgccggtatgtatattgtcaaacatttaatctctttttgctatctcagttcgttctcgtttacagtgagacctgttttgatgatagtgatgcccgtttctacgcactatactcccttagtgtgtgattcaaaccccacagaaatatttgttggctaaaaaactctttttgttggtaatggcagatcgggtgacaaactggtcaaatgttgtcatagcctatgaaccagtgtgggccattggaaccggaaaggtcgctagcccagcccaagctcaagaagtaagtggttctcgatgcgcagttgcactgtaacgtgttgcatatggtcatgatttaataggaaaaccaatgctgttttccttacgagagcttgtttcgtttatgaacaggtacacgatgagctgaggaaatggctggccaagaacgtgagtgctgatgtcgctgctacaacccgcatcatttatggaggtagatagatgataacacgatctttaattaaacacccctatatagttttctatgttacttagcttgattatgcaaattattatcaggatccgtcaatggtggtaactgcaaggagctaggtggacaggccgatgttgatggtttcttggtcggtggtgcttctctaaaggtacatataatatggtttctcttgtaatgatatctttcgtttgtctctttcaaaaccatgactaatgttttcattcttggtctttttgcagcctgagtttatcgacatcattaaggccgcagaggtgaagaaaagtgcctaatgagctcattaagcaatttaaaagtcctttgcttttccagtcgcaactctgaaaaaatgaataagttggtattatgatatgatacattttgcttcagttgtatttggcaaaagtttctctcttactatattgttttgagaacgcaacaatcattttcttcgccatttatttagctgtggacttgcaatttgcaaatcccttccttttacagtcttctcaactcttcagagaatctgtgtttggagttcataacccctcgggccttttgatcaaacccctatttctaatgtcgtccgatcataaacctgtgtgttatataatatgttgtttgttccattttagactttggtattttgtcatgcttgatctctgaatcatgctgtcaaccactttgaaaatggctttacttgttaaataaatgacgagagaatacaggagaagtgggaaatgactttattttttcccttttatcgctttttgcctattggtctgtcatttttgacattttagcttttagaacattattattttcaactttattgtcatcatcttgaaaaatgtccaacattacgaaattattatgtagagagtaaaaaaggaaaagaaatttcatggagaaactcattgtattaggaatgtcaatgtttgtagaaaacaaaatgcttatgtaatttgagtaaaacggctcagtggaactaaagtgataatgtaaaagagacggttaagtccaaaataagagctcccgtatgtcagaattgttcaaaccatttattaaaaaattggactcagtatgatgaaaatgtgtatggattttgatccgaccacgaaaatccaactagtgccaataaaaactccacaatatgtgactcagctacaaatgtgataacgtattatctcccaagtcaacccacatttctggtgacttatattttatttatttctgagtaatatttaagaaagtagggattgaatttttatgagtattatattatatagttgaccttggacttatttgcgtaacgagcaaacaattgtgaccttagaaatggaggtttgactaagtcatcgatcatttcagcaatagagtaattttgggtccgtatgactcaaaacaagttttggtaaaaaatttctctgttttaaaaacttgtatttataaaacttatgtcccatcccatgatactaaatttaattacattatacgtatgtagtcaagcataattttttcctgaaaaatcttatttttcttacctacttgtaaactttaatttaattcctggttaagtagatatttttcttagttcttacaaatcttatattttcttacctacttttataaacatttttgagaccactattactaaacccgaatctgtttcatcattccacacccaaagcatataaatcgaaaatatctatgatcacatgaatatctatcattttcgacaaaatttgtccttttttttctttctttttgtatccaaccccaccacggcgaatttatttcaggcctattaaagattccaaaatctcatgaccatctgactcagatgtcatatctattaaaaacgttattttgaatcttaaacatatatcattagtgatctttttgcacgtttactcagatgcttaagatcatcaaaatcaatctatgaatttcaaaagttttaaaaatcatacaatagaaaagtcccactgatcattaaattgttattactaattttatttagaactcgtttattatcttttggtcaaaaatataacttttgtctgaattcgttttttttttgtttggacaagaaaaagacctttcttcttccttcggttgcctctaccatctcatcaacacacatcttctctttctcttctctcatcctctctcttcttcagtgtttactttttctctttctcttttttttttctctttattatttcgctttaatgagttttatctgatagaatctgctccacccaaaaacagcataagaagaaattcattgtcagagaaaagtgcaaaaaaaaaaaacgatcttcttcatcattctactaaatgggttcttgtctcagttctcgtgtccttagtacgttctctacaattctccatctcccatttttttttttttttttttgtgattcacacatgtgtatctcttcaaatccgtgatctttttggttaatcgataatggcttttaagaaaaggaatgaaatttgcaagaatcttcttcctgtgatctaactgaataaagttttccccttttttggcgttctctcaattttgactgtggtcaacgcttttgtgtgttgtgcagataagagcagtagtggtctcgatgatcttcatctctcgagctgtaaatcttcatcatcagctacagctcataagacagaaggagaaatccttagctcaacgaccgtcaaaagctttagctttaatgaacttaaactcgctactagaaacttcagatcggactctgttgttggagaaggtggctttggttgtgtctttagaggttggcttgatgagactactcttactcctaccaaatctagctctggtcttgttattgctgttaaacgacttaaccctgatggttttcaaggtcaccgagaatggctggtacaacacttgtttcttatctttgatttataacactcttttgtttttgtgtgtgtaggttctgatattgatctttttttttgtggtttcagacagagattaactatttggggcagttaagtcacccgaatttggttaaattgattggttattgcttggaagatgaacaacggcttcttgtgtatgagtttatgcacaagggtagtcttgagaatcatctgtttgcaagtgagtctttgatctcgtccatgttttgtgaaactttgagaggttgtttgttcttatgtttgaatgatttttttgaagatggaaataaggattttaagccgctatcttggattctacggattaaggttgcacttgatgcagctaaaggtcttgcatttcttcatagtgatcccgtcaaagtcatttacagagacatcaaggcgtcaaacatcttactggactcggtattcttctctttcgatgtctacttgttgtctttatcaacgacttaaaagatactgagttttgtctttcaaacaacaggacttcaacgcaaagctttcagactttggtttagcgagagacggtccaatgggagaacaaagttatgttagtacaagggtcatgggtacttttgggtacgcagctcctgagtatgtctcaacaggtacattctgtcactaagatatgatgcaagtaataatggttggataagaaaatgtaagactgttgcatggtgcctaacactggtttttaatgtaaatttgaagatagcaactataaaatttatgtggttaaaggagcatatgggttgatagctagtttcgttctctcatctttctatcttttttcaggccacttaaatgctagaagcgacgtatacagtttcggggttgttctgctagaactactatgtggaaggcaagcactagaccataaccgcccggccaaggagcaaaaccttgtggattgggctcgaccatacctcacaagcaggcgaaaggttctactaattgtggacactcggcttaactcacagtacaaacccgaaggagcagtgagactggcaagcattgctgtgcaatgcctatcattcgaacccaaatcacgtccgaccatggaccaagtggttcgagccttggtacagctgcaagacagcgtggttaaaccggccaatgttgacccgcttaaggttaaggataccaagaaacttgtgggattgaaaacagaagacaagtaccagagaaacggtttaaacaaaaaaaccgttggattgtagtaggtagagggaaatataaggttacttggttaggtactcttcatgtcttcttcttgtgtattgtaatattgtgcgaagtgattttgacattttgtaacactgcttatagttttgctcctgaaatattcgatttggagatacttgttttctctctatctatagtttggtgatatatgccaaaatgtggtagtgatcaattccactctcttctaacattttagtttactatatatgtaactaatttctgtcaagttgatttgtttttatgaaaatgactttaattagtatagttgatgattgaatcataaataacttgtagccaaaaacagacagaatagtacaacaaactcataatgtaacattaatatcaattccgaagttcacaaaataccataaatatcaaattccatgaacattgtcatcaaccagaaataaataaattttacgttaattaagccaaaatggatctcgagttaaatcaatatcaataactattcaacatagccaaataagtcactattttagaacaagaactaactcaatttgaggttttcaaaattcctatatcaatttagaacgagaatctccaaaacacaagtcacctcagtaaacttatatatttaagggttactttgtttttgtcataaatgttaaaagttactaaaactgttttttccccaattttttttactgtttctctaattgtcaacaatcaacaatctttccctttttccatttaaaaaaacatacgcgaaaaaggaaaaaacgcgataaggccaaaagcccatttaataaatgggccaagctctccgatcaatagaaaaagatctgtcttcttcttctctattctctgatctctcataagaagggcttagggttcacttcagatctgtctttgaacattgctactctcaagtgatcaaattaactccgtcgcaggtaaattccacaatcctccgaccgtaaaccctaatttatcactgttcttccaagaaacaagtttttgttttgatgaaattgaggatcttgcgttgaaatcgttttgtttctatggtaggtgatgaggagatacagtccgccttattacagtcctccgaggagaggatacggtggtcgaggtagaagtcctcctcctcctcctcctcgacgtggatatggtggtggtggtggtggtggtggacgtagaggatctagccatggaagtctcttggttcgtaacattcctcttgattgcaggtaaattctcttcctttggtttaaagttttgattttgttttagtttatctttgaagatttcgttgggttgttgttgattttgttgtttttgattttgtagaccagaagagcttcgtgagccctttgagaggtttggacctgtgagagatgtctatatccccagagactattactcagggtaagcctcctctttccttctcgatatcttgatctttttcactgtacctgaaatttgtgctgcgaattatgtcttttgaggtgtgaatcttttatagatggactagttaggtaatggcttagcatatgattcttgttttcctgtagaatttgctttctttacgattgaaaaatgctgtctaaacactttgctgcttcacattcaatgctgaaccatttgttttgattaaaaaggatgttcataagtcttcaacttgtgcacaaagtgaggaaaattgcaagtgacatatgagttttgaattttgattttggcgcaacctgtgcatgttactttttttatacactccactttttgatcgagctaagttctcgaggtgagaagaggtccttttggttgagttctcgattttttcagagctttttgttttggagttctttttttcatagtaaattaaacattccactgatttcccagggggtatgttggcttgaagttaaaacaagaccaagccccacatttgatgaaggcctcatgaaaaaaatcttaacttaaggatattaagggtcatttcaaatcaagaatgttttgtttggaagcaagttatatgtgaagcatgttttatttggaaggaagtattaagtgaagaatattttgtttggaagcaagtaataagtgaagaatgttttgtttggaagcaagtagtaagtgaagaatgttctgaatggaagcagtaataagtgaagcatgttctttatgaagctatacagtaaattactcaaaaccttagaagttttttggggaagacgacctgaagagaacttaagtttgggatcaagtgcatcttatttttacaagatgcttgcctcttttcgagttgatatgcttgaactgttatgaaagggtcagctactaatcatattagcgtaagtagaactctgcttttcttagaagttctcacacgatgacgtttacttagaagttctcagaagctgtagaatgtaggctgattttgctggtaattctagatttatctggtgttttgtgcatttgctttcaaccatcaaccacttggaatgataagcttctgataaatgatgcaggcaaccgcgggggtttgcgtttgtggagtttgttgatgcatatgatgctggggaggctcaaagaagcatgaacaggagaagctttgctggaagagagataacggtggttgttgcttcagagtctaggaaaaggcctgaagagatgcgtgtgaagactaggactcgtagtaggtaagtttccatatttctgattgcttaagcaaaagagttatcaatcaaatcgctcttcgtgattaatgctctgcaagttatccatcatttatgaaaagaagttgagaaggaaataatcgttgcgttgtctcaatttttcagggaaccttcaggctccagggatcgttctcatggttagtaattttctctctggttatgcacatgttatgttctataccagcaaagtttacacaaatattagcacagctagattgggacgcacttgtttatacacagcttgagaaagcacttgtttatacatgttctcatggtttgtatacacagcttgagtatgtttatgattttttgttctcaggacggtctcgttcacgttcaatctctcgatcacgttctccacgtcgtccgtcagattctagaagcagataccgatcaaggtaacatgcttcatcacacatacatttccatcatcatcaagtcaacaagaagtatatatggttttagataatggtgttacaggtcttactctcctgcaccaagacgaagaggaggtcctcctcgtggggaagaagatgaaaattacagtcgtaggtcctactcccctggctatgaaggtgctgctgctgctgctccagatcgggacagaaatggagacaatgagattagagagtaagtgaaacatggtgtctgatttgttttgcccctgaagattgtgtctgatttttcgtatctggacattgattggtcttaatagaaaaccgggctatgaagcagaggatagacgtcgtggtggaagagcagtttcaaggtcgccatcaggatccaggtccaggtctgtggaggtatctccaagatgaaacttatgtgaagaagtggccgaccaaaactttgtgcaacgctttatgggttttgcatttctctagtagtgcgtctctgtgtctttaaaaactccttactctggcttgtcaaagatattttgtcttgtgatgtgatgttacttgaaatcggtttcggtttattgggtcttattataaaattgtatgaagaagattggttatgcttttgatgtgagacaggtttaaaacccacaatgagcgagtaaaccaagtcttctctcgtatggtcgaggtcgagaattgcgacctttttttgttctcgagcagcctttgcagatatttaattaggaaagtcaggtctaagaatttctgagaagaagagaataaaaagactcattcatctagaagaagccataatgatgttttattgggtctgttttgatcaaaagtccaaagacttctacttttaattgggttcgtatacatttttcaagcagccaagagtctttccttaaactaagtaagggtaagatggtcattttagcttagttgaccagacttataaactttaggttttgcctcctgttacgtaataatggtttggtttggtttgatcaagtcttggaaccacgacgcaggttatgtttgaaaattgaaaaagagtaaataagaatagtaaaaaatcattatgtgaacgagaaagtctgcgtgttcttgcttctgtatttaaagactttgtctgacacatccacttcatcaatcgtttctctttctccttcttcttcttcttcttcttcttcttcttcttcttcttcttcttctttttctttagaaacaacacaaaccccaaaaacttaaaaaataactctacagagatggctgttggaatccttgaggttagtctgatcagtggcaaaggtctcaagcgctctgattttcttggtaatgatctctctattctctcagatttcgtatcctttgatcatttaaaaaacccttttacaacaatttatatttttcttggttttgtatgattgtaggtaagatagatccatatgttgagatccaatacaaagggcaaacccgcaaaagcagcgttgctaaaggtaatttaacttgctagtttccttctttccatatttccaaatctctatcagcttaattcgggttatttcgtttgactttttttttcgttttatgcgagagagactatttctccaatttcatcattttcttttctatatacttggactttaggaataaaaagcccacatgctggtgttagttgatggttgtacataaagtaaataatagttgcaacttgcatccattggtatttcaactatcctcatagccattacatggtagcttaggctatactatttattcgcgttttgataacattcattatcttttatcagttataacattcatcaggtttttacgttctgatgatgcataagttatataaatgcatgttttaaaagtgtaacttgaaaataaaacaatcaattttccaaaaactagctaactattgttcgtgattattcggcaaaatttgttcatcccaactctcaaatgctttccgctacttttatcatttcactatttgtcattacactattttatattttgagacattttgtggtagcttgcaagtttgttttcatgtatatggtttaaatcttgaaaaatgttgtgtatggatagagctttcttctgaaagtagtcatctcatttagtgtgatattgtctggccaaccttatttttaactaatcaccaactaatacaccaaactactagctataagaaataatattttcatttcctacaaaaatgggtagtgaaatgtgaaaactactgtgatgtaaacaatcctcgctagacttggttaatgttttactgaagaaaatggtgttttagtgagatattgattgcacggctttaatcaaacggcttttgtctactttaccaataacggatcaaactggacaatgttcttttctcattatcatatttcatgtacaaacatcgtttatcaaattttcatcttttttgtttacttaaatgaagaagatggaggtagaaatccgacatggaatgataaattgaaatggagagcagagtttcctggctccggcgccgactacaaactcatcgtcaaagtcatggatcatgatactttctcctctgacgatttcattggcgaagccacgtacgtatatcacataacatgatagccctaaactatacataactgaaatcgaaaagaaaaaaagaatatggactaatcttgattaatggaaatgaataaatagggtacatgtgaaagagctattggaaatgggagtggagaagggaacggcggagctaaggccaaccaagtacaacattgttgactccgatctctcctttgtcggcgagcttctcattggagtttcttactctcttttggttagtttctttttacttttactttctttttttttaactaaaatttatttactctctgattgaagtaaactctttactttttgttgggaattttcagcaagacaggggaatggatggagaacagtttggaggatggaagcatagccaagttgattagtttggtttcttaaaactgctgattttatcttcttcttctatctttagtgtcaacatcattaagatattcataagtacaaaaaattatttaaattaaaatgtatcatgatttgttggttgtggggaatcttcttgatttagtaagagcatgtgtatgaaattgaaatctcattgtatttataatttatattttacataaatgtatcaaaataatgttataaaaaaaaggattggtaacattttcacaaggtgacaaaaaaaagatcctcagttttgatgatcaagtggctgaagaagacggctcaaccatgaaattagctatcctgttcaacaggtttaaaccaaaaaccgtttcttcgcaattgatcttgactgttaaattcagaacttcggtgcatttgccttcgactgtgatggtaatcaaaagagggatctcactgctcaagattttgctgctgaatcttaatcgcagaccagttgcatcttcgagtgagtttgcaactggtaaatccacagatacaaggtgtagatttgagttgctaagcacctttagtgttatactctcgcagatgctaagaaatttgtctttcccattctccgttcttgaatctttaacatgatcgtcaaaagtacacctaccaaaagtgaagagaaccacccaggttaggaaatcagtaagtgaagtgaacatgatctttctgaaaaccttttgtgcagaaagtaaaagtcaaagtttcttatgcatcaacctcaagtttaagtagagaaagcagctaaccttcgactatactcaaacattccaggtaatcgagattctgtagctaagaattcctcgatgctcattgaaaatggtttcacaaggtatccaagatcaggtcgtaacttgacaggaactttcttttcattgtaatgtaaggttaacctcatgggaagcaggtggtgatgaaaccgaacctggataagcctctttgtgctctgatgtggttcaaggcagctaatttcctccattggaattagggttggtatattgttgtaagatgcactgcagggttttcaaaaaaaaaaaaaattgagaataatccgagaaaattgaagataatggttttctaccaaaactaattgcttggaggattaaggatgtagttaggcactatcatattgggtaagtgatagatggattaggcaaaaagagggttttctaaatcaaatacgtataaaggaatcaaactcactttgctttaccaaccaatgtctgttcagaagagtctgctaccttcattgattcttcatcttccaaattcacctccaggataggttcagcagaactgttctcaaacagaacttctacgcaaacatgtaatggagatacattagagacttcagataaaaaggcatagtctaccttcaagccactgccatttccagggtctacgagactatagcttttaggcttaactcggcttcctacatcaccaatggatatcttcgcataagagctctgattactatttaatgcagatggagtttggtttgatgtactaggctgatcatctaaccacaaatccagggcccttctggaccttagttcttcctggtcagcggaaacagaagtctctgaaatttgaattaaaggagcagctgggtcattggcgtcattagacactgttctttcatcaccttcactgctaaaatccgaaccattagaagattcagagtcataatcagaggagccattctcatcccctgtttcagaggattcctcagaaccatctaaatcagctgcggcctctctttgtttatctaaatctgacagctggtcctgttcttcatacacaaaactgcagggctttggaagaggttcatatccaggggctgcatgaagaactatctgtgacagagatccaggaagataaaaacgattgtgcagggttataggtgaaacagatttcagttttcttccaaagacatgttccacaacatgcgcagcaatattttcttgtgatgcaacactgtcttctgccggctcatgactagctaatttgcatgacagcagtttcttcaggaaacgagttcgatcacgaatatcatagcttaagtcatattcgcccaattcaaacacatagaccacaatccttttcaacatatgaaagtcaccagcctctgcacttattagaacctacaattacagtgataatttgatcaatatcttctgactgtagtgagacgtgccacagtaaacgtactcactagcatgaaaagtaaagattttcatagcatgcctaagagatttcaaaggacagacaaatcataggatgaaatgttatcattagtgaagaaatggaactgactatttcagagagaagaaatgataaatttgttcaagtaacagaaatggaaatgtcctttctcatttaaccatatagcctttctttcaaaggggttgatgaagaaatattatattattgaactcagaataagaagtattgaggcaacgccccaagctatataccttagcaatagtattaagaatctgtagttttgtctctgatgcctctgatttaaagctccatgcaaggtacttggttattgtggtcagcatcctaggaatgatatgacccaaagagcagtagacccccaccatccaaataatagttgcacgagcagcagctaccttgattgaatccagactacgaaacagctgaattaacaccttcaagcaaccaaaatgaacaagaaaaaaaaaatcaatacattattgaaaatagatgtacaaaaggagttatttgagatcattgcagcaggttccaagcatgtttttaagaaatggtacgaattagatgtgcagtcagtggatgatatgtgtgtactttctcatgacgaagggggtctcgctctatcatagtctgaattgacatcacggcttgcaccaatactccagcttctccatccgcggactcaaaatcgccagcaaaagattctgcaacattgtgagagctacttaaactgaactgccaaataggttaactaatgaatgcaattaaaataaagcataactgaccctgtcgaactagtgctaacaatccatcaagacatgtagttggaattgtcatcagtctttttgcgcacaaaccaattgctgcaactgtatcagccgcaaatctcctgtctggatctttaatataatcctggaaaaaacttaaagaatcagtcatgcacacatcattttggccagaaactacagtacagggacaaagatgacgatccttatgtaacaacactttaagaagtgcttatttatatcatactggaaagtcaaatgatcatacaaactttccagaatgaaccaaaaaacttctataatcgatttgacagataaagtagagtacctcaaactctctcaaaattgaagcgatagatgaagtggtagcaatgagagaaagcatttccagcttgtatgctttcacttgatatgcatctgaggaacaaataaagaaattttcgaagtgtggagcaaagagagaagggactgctttggcaaaaactaggatattgcagaggacctgccacaaatatgaataaagcgatgttcagagagcacatttcgtcaagactacacagcatgtgtggattggactaaacattggtgggggaataatagaatgttaccacatatttggaggcgctagatgacctaagcaaaaacaagagcggtttaacaattttcttaacatcttccagaggcgccattatccattgaacgccagctgctgctagtacaaccgcactgttattactccataacaatggagatgtacactgaagcaggatcttaacatcttcattatgtgcaatagatgtggtctctttggtatcgaaagcagatgacactgtatcggtgcaactggatcttgatagatactcatctggaccttgaatgtaacatttagatacaagactgaccagattaacatcaaatgaatcacttttaccaccatcttctttatccaatgtaagatctctgcctaggccatccttctcacagaagccattactattcgtaccatgtatggacaacatcaaagattcccgtacaagtccatgcctagcaaccacatagcgcaaaagagttcctatgagtaatatctgaccccactcttcaacgtcagggagaatctggcacaacttcttatagttcttcccaatcagtttgaagttatttggacagatagaggtgaatgccgctgccgcagctccaactactcctggagaatggtcattcaacagtatcccaactagctgcaacaaggttataatcgtttcattgaatatctccattcgcaaccaaaactcctcaacctaaggatattgacaggacaaacctcttcaatcgcagaagcatgttcttccagccgcaaatcatgcaacttcggaagagcgtttgcagcacatctccgaacataaacagctggatctctagcacatttactcacagctgcaagtgcaagaggtgcaataacatgtaagcgaatcccagccattgtacgaagagcccaagccctaaccaatggatttggatcccccaagtccttttgaaaatagttgatcgatagcaatgcttcatttggacgcctacacaatcaatagaagctaatcatgtagatgcccaaacaaaaagacatttgctgaattgaattcacatacttttctgcatattgtagcaaatacaagtaaacaagcttcttcacttccgatgactgtgacgccacattcttcaccacctgccattaaaattcgtccaaaaattgtttcaaaatcggagcaacaattctaggatcaaagggatcaaacaaaataaggcaaacacctgaggaaagaaattggagacatcaaagccttgagcgataagagcaaggagacgcttaagagcttcacatttctcagattcgaacttgctatcgagaagtggagcaatgttgacgtcttccggatcatcataaagatgagcgtcagtgccgatccgaagcaaccccagctgaagctttgctaagagtctccgacgtcgaaccaaacttattgaacattccaactttccgatcaaatccgattccgaaattcagagagctgtgtaagagagacagagacgatgagacgaacttttcagaagagaagcctgtgttaggatgatggaatagccttatccagaatctggattggataaaccggatcttactaagtagatcctaaaccggtttgataatccgaataaagcccatcaagaatgggctcttcaaaaccctaaacccatcttatatttatacgcttaagtcgccttcatcttcatgtgattttcttctgtatatgctttcccgaaaaatgaatctgaaattttgttttgaatgagtttttttctggaatttaaaatatttgtgggcgatgattaaaaagagagaggcttgagaggtgagtgtgaacaaaactctcatgggatggaggaaaaaattcaaatcgaaatcgaaggagaaatacatttaataaaatgtttttttttcccttttttgatttagggttctttctttcatacctttccctcggtgacggtccttccaagttacacttgatatgagcccttctactatactttcgtttaatttttgtgttggatgtggtgttcttacttcttacaatgattccatgaaaatgtcggttaatttgtaataacaaaactcacacatgtaatatcagaatcgacttctttaacaaacaaaaaaaaatatcagaatcaacttggccattctttgaagaattgataacaaacacaatcgattaattttgagagaaacattatcatatggcattgttattggtacgaagaagcaaaactgaatcaccatttagatatgaatttgagttaaatgaagagcacataattaagttaagtatcgatccatattgcgacgaaaaggtttgcaatttgactcaaccataatcaaatgtatgttacccagttacatcattttgagattgttatatgctacaatcaccctattggataattatgataagaaagagttatagggaacttaattagaatccttgcgttttcttccgagtattgaagctctctggaatctaggaccacctgttctccacttcttgaaggctgtcatcgacaagtgagctgcttcatacacttcaaaaagaacacagaaacaaaaacagattgttaattttggtacaagcttgagatggttaaacactaaattcactaccattagagttcaaaacataaaggctacttacagtttgtttcttcttttgttaaaaacgacaagtacttggaagctgttatgtgagctgctgtgtatacttttgtcagtgcctctttgtatctgatcttaaacgcagtcgatagcaagattcccagtgttctatctgtgaccctgtttagaccaaaatcagtatgattaccaccacagaaaatagctttactttaatccagacactgtaaaaattagacaacttgcttgatatattcatgctcaattcacgttgaaatctttctacaacagctatctttcccaaggattagaaattgacaccagaaaaaccgacttttgttcttgaagccaagagataagacaacatcaaaatgaaggggaagtgagtggacagagtcttaaaaggaggaactcacagtggctctatcttgcatccaaattcataaaagtatggacatcgcgatctaagatcgacgtatgcagcatcagcctgaacttcaagcctcgtcctgcacaaaacaaacaaagccatgaaaagactgctacagggtaaaagaagcaactgcttaaaggccatctgaccatagatgcagaagaaaaagaaagaaagagaatcaaattgacaatgccaacattacagttaagctacagaatgcttacttttggtcaaaacagggaggaaggtttatggtaacagcttgcctcaaatgcaactcatgagcaagccagaagggaagttcaactttagagccttgttcagcctgcaccagaaaatctcacaaaaatcatatcagaaaggaaaatatgatatatccattacaaacttttgcactaggaaggagaatactgacacaatttgtttctgcacttggatcaatagtcactccgtttgctgttttatggaataaaaccggtacaaactgcaacaaggtaacaatagagatcagatttcttatttgataaagagagcctaaagcaaagctattggagaagaaaggtgacctcttcctctataagtatgtcatcaatgtcaaagtacttcgccatcccctaacgctgatttcacaccaccttaaccttcagattaaattcgcggtctgcggggagttaaaagcaaaccataagacactcaaaagtcaaaaatcaacctcttaatagattgtcagactcaaatctgagatttcagatttaccaaagcaattcaaaatcaattcaaaataagaaagatgaaagatatagagcacaaatcaaacctttactcacaaacgaagaatagatcgaagaaaagattgaagaagaagaagagagtgtttgaagaagaagaactgaagaagagaattttatatcgaagaaaaaaaaaacaattaagaaaagaaaaaagttttaggcccagctctattgaagcccgaaaccttttcaccaaaaccctatataagcccgaaattctcttttttgattttattagggctagggcttttaatttctttagcggactagtgccggccctaaatgttaagcccgttttaacatctctaattaagagagtttagaacagtagtaacaagtccaaattcataaaacctctctcctctagttaacacaaatggctgttaaatctactcaattcagtaagtaaatttgtacaatataaagtccaaatctattcaaattcaatgccagttctgagagaaataagggtttccacattcacaacggccgatttgattccgactaagctaggtaaagtttctacaatagaacaaaaaacgatttaggtctacggattgaaattgacgcaaaaaccttagagaaatgggggaaaacttacataagaggaatgcaaaacacaatttgttgaagagagaaatcggagatgcttgcgttggaggaatcaattgcaacttgcgagagagaactcgggtcactcgcttaccggatcgaactgtataagatcagtggctcgacaatcaaaaaaaaaaaaactattactaagtggaaaaaaatggtgaaaagaaataataattctaaaatatatttgtattgtgaaaataatcaaatttaacttagtgattttttcgcacaaaaaaaaaacttagtgatttttaaaaaaagtttcacatttcttatatcaaagaaaattcaaacttgatataaattaattgattgcataactaaataaatcgattcaactcgatagagaagatcaattctaaactaattttagttgaattatataactcatgtcaacaatgtcttaggattcatggtactactcaagagttactgtagtgaatttcataagacactcagtgttacaactctgagaaaaatttgcatagaagtaagatcattgtgctactactattgaatatatgaattaaaattaatattgtagccacatttttcatgctaacagagaaaagaagagaagatcgaactttagtataagcaagtggtagattatataatgaaatttgacattacaagcaaaccatgcatataattttaagagctgcgggctgtttacaacttttatcaacagccacttcaacttgtctttcttacacttcccaataattaccacataactccccagcacagtaaaaagcttaatagaaaaatacatagtcaaagatgtgcaaatcgaaagtggagcttctttttgtctctaccatttcgaatgtttcggtatcatcaattcactttagaccctgaaattctttccgacaaaggtttgtccaaactgccagttcgaaggagcgatgttccatgaagtagaggttctacgatcgctggatgtaacacggaaggaaagtgactgaccaacgagaacagcattagactgccagttctgtccccagttcctagttaaactcatccaaccagtctttgaacctttcacactcgtcctcgcgatgtctcctgctccggccacgttcgtaatcagcaccaagttgaagtaacggtgaccgttgatcgtgaaccttatccctccactcttcctacatgccaccctatacaaatacccacatttcgtaatcttagcattttgattcattgcatttgcaacttcttttatatacgaatcatttctcaaatcgtaggctacatatagggatgtttaagtatacctgcggtaagagatggggacaatgccggcacgatactcagcgatcttgaggaaaacgggcatggcgaggtcgaaatgagagcgtggcgggttgcaccagccaccattgtcgctaggctgggctaagtttggagggcaaaagttggttgcggttacgaagacagaaggattacccgggtgacaccatttgggatcattgacacatttgatttcgaagcatgcgccgcagctttgaccactgttaaacaacgatgtgctcagcgccgccgtgtttgttccgtatccttggctatacagattcccgtatccacacgcgccacctaaaataacaacaacaaaaacaaaagtaaattaaaggaacaagaaacagagcactctgttttagagagttggtataatgataaatgaagtatggttcttgaaatatgtgtttaaggagagtagactgacccattgttcccgaagcatcgtttccaccgtagaaagtggcgtgagcggtttgccaagaaccacctgagaagactctagggattccggcgtcggtgaagctcaagagaaggaagagtgggaatatggttaagagaatcaatggattgattgccattttggtaagtatttttaattgaattggagaaagcttgagaaaattgttagactagaaggcttagagaggaacttgaggatggtggaaaatacacttgtgaagatcgctatttatattggtggagagaactccaaagttagagaaatagatggtactggccgaaattagtatttttctagacaaatatttagaaagtagatggtgaaaatataggttcataaccgtttgtgatctttttattattattgcaatgagatgagatctttaatccgattaactctgggatctattaataatacaatgtgagattaacttcaaattaaaatagcttattggaaaatgtccaaccacgtagaaattatatcagtcatacaatataaactaacaattaactggttcgttcttgaagcaacgatgatgaaataattaaacaacgtaatagagaatttgagttgacatcatatgcatgactttgtctttctagtgttcataaaataatttcgaagttctaccaaaaatatgaataatgtgcatatgtataaactctgccatggttgaacaaaagtttatattttcgacgcttttcaaattaatacattgatactttaggtatatacgccgtacacagcacgtctacgtagccaacttttgtcatgcatgatgcatttatacaaatcgagttatttgtaagtaatatcgtaaatttctatttaaatccagtgcaatatatttttatcattaaaaaatgcaaatcaaacatgaagcatatgaaaaaaatacaccagaaccatacattttatatttaaaaaattatctacaacaactatgcaataaaattatgaaaatgtaaataatcaatccattgggatagttttcataattaacaataatatgttggcaaatcgaagtgagtgaagcatgagatggaaattaaaaaagaggaaaacagttaggggcggtgacggtggaagagcattaacgacatttggtgatgacaaagcagatctatgcaccaaccagatcttgtatatctgccacatcatccacgccagcaaaaaatatacatacgtgttatgtttaattaatcaaagtttatagcttctcgtggttacagatttttctttctttttttagtagatatgataatgtgaaataactataaatcataagtcgtatctaatttagttaaaattaaagtgagatacatttgacataatagtgtatatatacgtgtaattagtgacgtgtattatattttttccaaatgcacatgaacgcatacgtaaccacttgcatgtgaatttattatctacctctactctctcccgacgatttctcgtcttttcatttatttcattctttatacaaaaacagttttcacttctagttatgtctatctattgttcttatgtattttattatgtgtatatagatgccaattctcaatttttcatctccaactaacaaaacaacttgacgatcgatatgctaaaacattgtaaggcatgtccgtgtgtattgaatggtatcacagtctacggaagttgcacattaatgtggaaaaatgtatgtcgaacaaatataaagtacataaatagatctgacccactgctccaagaggactagggtctagggcatgtacggcgtacgatcatgtatttgatcatctgacaatgaaaacatgatatatagcacaacccaaaagatccaatctgatatgatatatatatatatatatatatatatatatatgaatccaaatatatgtcaatgaaaacatgatatatagcacaacccaaaagatccaatctgatatgatatatatgaatccaactatatgtctttaaaatatcgattcatttcacatatattgagcaagtatagtactcctatagtctcctactgtatatgagttaattcacttattaagttgttactattgaactttgacatggtattagtgtatggttattaatccaagtaaagtttgttatctaatcctaaaatgatttataaaggaatctttgatttacataacacttgttctttgatttgatttgagaaacgtatctaggaacctttgttttgggaagaaaatgatgtgtgcgcttaattaatactaatacaaagcgctgaaatcatgaaataatgtcacaaacatgtacatgcgcagcaattccttaggcttggaatacaagtaagtatagatgctaattatgaactccaaatcaagcaatacatgaaatcatacaaaatgatttataaaggaacctcggattttagcttaaacatgatgactttttatgtttgtgcataaatgaatctttggtttatttaaattaaacatgatcctacatatatgctccatcgaaatttgaacactaatatcatggacaaccgatgagatatttgttaattagaattttcttaagaaatagctaagaaatcattctatagagaaagatgtaatcgaaaatgtaaaataagacagattttaagttcaagatatagtattgagtgttatatatatcatctctaattcacttttgacaaaactaaaattaaatctgacacatagtcacactgtttaacataaacagatttcacgagaggatttgtagcataaatttgataattataattttatcaagtaaaaataataaaatacctataattatgtcgcaccatattcactacaattgtttattctccaaaaacaaacaatctttttgctgtaaaaatgtttagatttttgttaattttcctttttttttgtttttggtttacagattttgtttgtatagacaaggtcgggctgacccggatattcggatccgtattgtcgtattgacaccgtgaacccaaccaaccaaaaccctaaacccttttttgacttgtctctacttgttacttcaccgccgcgttctcagtctctcaaattcctctgtgctttcgattcttaccagtgaatttttcttattttacttatcttatgctcgtatttggaggaactgagcaaaaccctagttgtttaattgggtcaaatttgtagattgagaatccaaatttatcgacctagttattgaatcccgagttgatacctagaaacccttttgcagtcgcagtaaaatgggtaagctggggaagaaagctaggaaatttgccaagaaaaatctccagtctgttgagaaacgaagcagaaagctcaagccttttatcaagaagaaatttgcaaagagtaagttattcttcgctttcacttctcttatgttccctttttagtgttggaatattggatacataatggttgtgctatagttgaaagatttgattttttattgtactttgtatctaattttctcgctgattgtttagagccaatgataactttctgtggttttaggaaatgagcgtcaccaagcaggagataaacaggagaagaaggtagagcaacaacctaagaagaggtaagagttttgactgtgtagctgtacagtcctgccactcaaacatctgtgtgcagttatccgtttgagtttcttgcatacgctgcttctctgttcttactttatttaagtaaagtttgctccatttgcctttgtgtttcattagttttttaaaagattgatagctcgaatattagttatgcactgtgtgaaatgatttctcgcctatacgttttcagatgtcaagaagaagaatttcaggatatagcaatagatgcagtattcggaaaggatgatgatgaagttctccgcgatggtgattcagatagtgatggatatctggatgaggtatttaacttagtgtttggtgaaaatatgaacacaaattttgttttagctattttctgttgtttcaggttttgttagcatgctcttattgtttatacagcaaagtaacattgaaactatcaatcatcccatgcagttggtaaatgaaactgactcagatattatgaagtgcaaagtactctcaagatcttttttagccacttgctgtgacatggttgataaggagcagtatgttccagcattggttagattgttaaattggtatcgagctgcatgtcaatatgggcacgaaccatcagggattgctaggcctaatatatactatgacatagaagacagtgagacatttgccaaggtcataatttttgtcctccaaaaagctgatcacacttttaggagtatcctgggattatcagattccagtactaaggagaagattttgaagttgaagaacaacccaaaatgggatagtttaaaaccactggtcaaatctttctttcgaagtaccttgcatcttgttaagcaggcaggagacttggagataatatcttttacccttacccaacttagagtctctatcgtgtttttggccgcatttccagatcttctgaaaaaattgatcaaggtacactctatatattcactgtctaccacacaggaatttttttatatattggactacactcattaggatctaattttgccttatctttttgacggcgttagaatatcattagtaatagtatatagagagatgcattgacaaatcttggtttacatcctaatagtagccttgagtaaacaatttaggtacttttctctaattgacattttttcccaatgttagatatgatgtctctttgtttcctcgaaagtcaagttttgttgtgtaaattggtgcagatatctgttcatctgtgggtaaccggtgaagagactatatcgcagcaggcttttctaatcttaaaagacatcagtatggtttttaactcggaatgctttgattcctgcttaatcaacatgtacaaagcctttctacatgactgtgatattccaaaggcaaattcagaacaacgtccgttcctcagagattctcttgttgagctatgctctcaagatgtgcagaagtcttataccaaggcctctgtttctattacacaacttgccaagttattgaagatggctctcgctacaaagaataaggtgcttcttagtatttgcatgctttttcttctacttaaaagttatcttatttgtcttcttagcctctttcaatttttgtaaacaggaagctgttgaaaagatacatagtggggagtacataaattgtgttgatctctgggtaaattttatttctgccaacgttcaggattgtgatctccagcctctgctttatactatagttcaggttataaatggagttgctcaactaattattggaccacgttacctgctcctaagggtcaaatgtatccactggctcaaccatctctctcgtacaagcggtatattcattcccattgcatcattggtattggatatgttggaatataaaaccacaaatgatggtgaaaagcaagaacagaagcttgaagctgtctcaaccgtaaaggttcgaaatttagcattataaatgctctggagtagaaagttcttacatagtagactttcaatatacatcattcattggtaagctaatagattctttgttttgcagctgcctaagaattggttgaagtcccaaaacttccaagaacagtgtatcttttctgtgattgaactgcttgctgtccactttgctcaatggagcttccatatatcatttccagatcttgcaacgattcccgtcatgaggctgaagaaatttcacgagagaagcactatggaaggattgaagcgggtggtgaaacgctttatcgagcaggtaattcttattcccaagatgaaagcaaccaaaccaaccccatctactttttgtggagtattaagaatcttggcttgaatgactctcttgtattgatttgagaatggattttgatttgtaggtagagtcgaacattgagtttgttcagaggaagagagatgacgtgactttttctccaaacgatcaacaatctgcagacacgtttatgcagcttgaaaagcaaaatgcgaatgctccttatacacaatactatcaaagcatcatagacaaagctcttggaacaaacaagaagaagaagaagtgaggtaagtgtggaaaccaatatactattatgttgttatgcaatactaattttgttttctcagacatttgatgaatttttgtctttgtttttgcagcagtgattgcaccaaagcagattcccatggaacatctcaaatgtttgttcaccatttttgctgtcgtttatttattcttagtgttggctttcatgaattattttcgaaaagatctacaaatacattttatgcaaaactttggtgtaatgaaaaaaggagaaattttcgagaaaaacaaatgtttctatattcgatgttgtagtgttttagtaaaaagtagtagacgtgttattctgtctctcggaaagaatgttgggaaaactaagctttacttcttttaattccaaaatttagcggtttcataaatttaatgaatacagttcgatttaggatgtaactgatactatacaaaacactatcaactatttgacattttgtgatatagcaagcgagagttgcgtatttctattttaagttagactgatgtgaaagatttctaaatttcaaatgtacatgatattggattaatacataagaaaacagctttttaacaaaaacaatccaagggtctattgtggcgagacgttgttgtcacatcgattctaatattattgaacaacttaattattaagattttgttatgcttttggatatatttttacactgtagataagaattattatgataaaataaaattaatcgactccttttaaataacgcagtctctgacgagattcttcggcaaatttaaagcacggtgggtttcctatctcacgacgagataagattgatttcctatattttaactttgtgtgcaagactaccattcttcttcctattggctcctattttttgtttgatttttcttcttttcaaatcaccaaactgtacgtatgagcaaaatactataacaacaagaatcaataatatgtggttaatgagatcaaggaatcaaattaggaagagaagttggctatatatctttctgttggatcaattattatccaatgatattactaagccatggtgtcggtttatgttttcacacgaagagttttgatgtatttcacaaaacaatatctgtggtccaacgcagttagaggatcttattatcaaaacaaaatccataacaacacattcaagaagaaaatatgaaaaagaactctagcaaaagtggagatgaaacgtaactatatatggatcacaatgatttaagcaaacattggtgaaagaaaaaaatatggagaaaccaagtacgtttttactcgtacttttgaaaagttaaaaattcatacgaaaaacatacatactttaaagttaaaaaacattcgtctgctattagaaaaagatggtagtatgataattgaaataaaaaataaaagaaaaactacagtagacgtaataatatgtcatcttgtgatgtaatttattgattttgggaagaaatttaaagcagttgggtgaaggagttggagaggaggggaaaagaggtatacgaggagacagaggaagaggctgagagtgcccaaaagggtttgccaaatgaagaaagctaataagaatagactatatatgttcagagcaataattaactctatagttataactctcactttctctttcttttttcgtttcttcttgtaaattgtcagcgaaatttaagggctacgaagtaccctcttacaatcattaatttcgacaaccagtcgtttttatctctctctctccaagcatttagtgtgtcataagactcatgattcactttgtatttgtagagacgagcttagatagttagatcaatctcataaaccctctatcatttatatttctcggcaagtaccaaaattctacttgaaaatggacaaagccatttcccaaaagaaattgttttgttagggttatgtgtgttatcctaagctttttctttttgttgtcatcgcataatataggctcccatcactttagatttataaatataaaaaatactaagctactagggatatgtgggaataacacgtgtttttacaactaatacccttttttagtaagtgcgtctagtacatcgatcatggtttttgattgagaaaaaaacattagaaatcaattacgaatatatattaaacgttcaacattgttatgaactaatacgtttagcaatacttttacaaaaaaactttcaaaatatttgagactctagctagtgtttgtatctataccatagggtatgatatagttagtctttttctatatgcatttgtatatcattaatgaataatgaaaagggtttgtagaatatacgaaaagcttaacctttttttttttttttcgtctgaatttttccattagataatacgattgaaagatataaggtaagatgcgtttttggaatataaagccggcaagagataatctcttccagaaacaaagccggcggaaaacgagtaaatccccggaaactaagctcaaacaagggaagcataagatagaaacagaaacaagactaaaaataactccaaagataaagacttgccaacacaaagctcccttgaaccaaatgatcaaagccaaacactaaacacatctagcgaaacctcctatagtgaagcaatactacctttcacaaccaagtgaacctaagctactattccggcaagagagaatcaaggcaaagcaaatcaattcccctactactcccgaaaacggcgatatcgactcagcgacaatttaacgcctcgttagaagcctttgaaccgaccaaacctcgatcaggtcttaactgtagaaacaaggagcgaaacaaatcttcaaccggatgaaaccaatctcaaaagagagcagcacaagatcgaaccgggaagaaaccataaagaccaccactagaaccagggagcacgagtaaacaagtcgaacaaccaaatagagatcaagctagtcaccagaaccgttcaaataaccaaaacacatgaacacaaagaggaagcatgagagacgagggagggaccgaggtaccgagaacggagccgttgttgctcagatccagtgaaggaagaaggccagagcctcctccggtgctcccaatgcaatgaaacacgtgaccagagacaaaacgaagatccacaccatgaggcagaggcgagaacgacgactccatcttcaccatctaccttaaggcatgtcaatttcggtctcatagaaccaaacctcgatagatttgagattcgatacaacccaatccacctcgccgaaatcaccacgcttcacagccgaagaaagcaatgacaagaaataagagaggggaccgacgctggcgctttaggagccaccacgcgccggtcagatctagccaagacggtaagttgaagaagagcggcgattaggttttagagagtgaaagtcgaggaattagtgtgtattcacaaaaatcttaacctagtagtcatttcttgccaaaaaaaaggaataaaaaacaagaaagagctaaagcaacaacaaaatcatttgggattgttgttattcattagtgagccaactttgcattaggccaccaatatgctatagttacggatttatggtatagttatagaaaacaatacggaaatattggtggtgtacacataatgacatgaagagacggatgtgacaataaaaaattaaaaagaaataaaaaggtcccgtacgaggaggagtagtaggctctttggctccacttctcattgtatccgtaccatatggcatatgcagccacgtcaatgtcccatcttctctatcttcgtgtttcttctttcttttttttactctttctattcttcaacttggtacgttgcaactcgcactgatatttttataaaaatctctacaataatataaaattttcatttgtgggcaacactagggttttgtgccaataccaatcctcgtttctcacccatatttctctgacagtacacgagtttatggtatactaagcaatgatctggagttatgcaattgttaaagctatattcccatatttgtttgtgtatagctgaactattagacgagtccatatctcagggatcattatgtatgtatatttaatgaaaattaattagcctacagggctcaaccaactaattatctgacgtattatggtttaattcttttttgtcatcattagagaaattgaacctgcaggagaatcccttaaataccaaaacaccaaatataatgccactacataaggcaagttgtttgagctatcgctccatttagcgctaagttggcaaacaaaggaaagtgtccacaccaatttgtaaaaactaattgctaaatgtttttcctatgaccataatttacatagatattcaacatttgatcaatatttatatatatacatgaaaaattgtagagtgtaaatcacattgtttcaagtccgattaattaatacttaccaaaaaaaaaagtccgactaattaataaagattaaatttattgcatctatgtccctagtctttttaaataagtactaactttttgcaatacaattctcctaaatcagcaagttccaaaaaattgcgtaggcaggatcacaaatgagacgccgatataataggtctttggaagctttcagcacaacagtaagcctaatgacaagggatctcatacgatccgacgaaatcgattagtttttaaatgaagtcaaatatgcacattattttttatgtgttagagtgattctacaaaactgtttgattaattatagcaggagacatcagatgaagatattaaatagctgaggaactcactgaattattcagaaatttcaatttgcttgaactaacaggctttatatatgcgaaaaaatgtttcaggccttttaatttttattataggtatgatatgatatgacacaaattaaagttggtgactattgcataatttgtcgtctaacggatagccaagagagtagtcttttctttcttcatcaaatatgggatatatacaaattaaagctctcgaatatataattctgttaagtgttgtttatttggatattggcttaagataagttgtaggtaaaaagcgccattcgatgagaccaaatagcaaagatgatcactttttagaaaaacgaaaaaggaccaataaaacatgaaaatgtgaaaacccccaaaaagtttttcaaacactcaataattaaatatgaagaaaaaaaagaaaagagagagacagagaagcagaaacggtaagaggagggaccaaaagaaaggaaacgtctgaagaaaaccctaaaccctaaatggtgacgagtgatagagagagagatgaaggagctgtcaaatgtgtcaattccatcgatccacaaaacttaatgcttgtgggctacgcaacgcatctctctgctctcttcgttttttaacactcttgcttgctccattaatttactctatcttcaattcctttctctttttatccctcagatttgcctttttaattaattatggccacagtgagtgttaatgagctttggtatatttggtatcttcgattacgatgtgcaactgtttccctaatctctctccctctctctctctctctctaatattcaagaaaatctcaaccgttgatctctttctctttcttctatttaaacactttaccctttcctactttcttcaccctaaatctcttcctctccttcagatctctttagtctttactattagggttagcatgttgatgacttcagattctgaagttagtggcagtcattgtttgctattgcaacatcttcaagattcagaaatcagattctcttatgggttttcttttgagcctttattttttggtttgagaatcttgatgatgctgcagcggcaattaaatggcttacttatctagggtctttttttccattttcatcatgtggttaatcagaaatccagatcctcatatgtagaatcctccgatatgataacttgaggtgaaacttatttcacaggtatgcatatgattatatatatataagcacacatatatatataatagatttgtgtgtgtataaacatatttgtggacaaaacgatgatgaatgatttgaaaaacgaatatgtatatactactctcaattgattaagtgaacccttgcttatagatctttttttttttaaaaaaactttttgctgcacgatggatagatcctgaaaatttccaaaaaggttttagggttttctttctaacgacaaagtatataagacctgtttctgtagactcaaggtgattcataaatgcataaatttgatttatataataatgactgaaagggtttggaggaattggacatatgtatgaaggagcatgtatatgtctgttgttttatgttcggttacatctggttatgtctcttctctttgtccactggttaatcaaatgactcatcttcatgtgaaaccaaaccccttgtttttcgtgtccatgtttctttatgtatgtgattagatctctatatatgtttctctaatgtagtagatgatgatgtgatgtatgtgacaggtttgtataattcttataagagttctcgactttggatctatacatatatttcgaatttgattcctaaatcggatttgagaagaatctcatttctttttcttgttttttatttcttattgttttgtttagggtcttaaatctgaatctaaatgtagtagtgccaactcgaactatgatctacctgaatctgtatatgaaatcgaaattttacatatgagaaaggtttatatatgagaaagagattagtttgtgtacgttgcttgttgtgcagttgttctctgctgcaaagattcgctcatgtatttgtattaacatttaagatctactaagaatttttaataacatggataccattttattgatggaaaagtccacatctacgtaaaaacaaaactgtgtgtgggtaatcttgattttcaaagatttatacagatgagaattctaattaaatcaaacttgcttcctaattataaacgtttgatctcactgatgtgtgaatttctgatatgtggacttggataaaaattacaacaccaaaaggttttagtttgttttgtcgagcatatgcatgatgagttactccaaacatgaagcaagtgatgaaggtttgagtcatggatccttttttcaatattccaaacaaatgagtttatctacaaataatcatcaatggaatggttggctaagatgtaaaataatactagaaggtcaaaaacttggataaaaattaattcagactacccaaattatagttaggtttgaaaacgcgtttttatccgatatgggtctaacgtcaaaattggggcttaattactaaactaagcaattttgcaagattatcattagtacgagtttttgggccggttatgctgttaaagtttgggtggtctgtgaattcgtttattgtaatttaaagtgtgcgttttaagttgcaaacgtcgaccttagtgatatcgtaagatgtaaagactttcgttgtgaatggtggtatcattatttagacgttgttaaacttttctaaaggtaatgttacgcacatttggaatcttagggatttaatctggtgattggtcgtttaattttatgcttatcccaattaatagcattggacaattaaggcctttgtaaatttgggcctttaattttgggcctcaactatcggtgtatgcacatactactatttttcttaaccctcggtcctccactcctcctaagacacttttgctaatcaaaatagtttttgttgagttcactactttaatctacgaaaatctagtgacccaggggctaggttaaattggagactcgtacgatactcgtgagataattagtaatggttagcatctatgaagtatacagtaagagattcggattagtgacttagtgttattggtgattgtcatcctgatcacaatgattggaacaagatttggtgtttgactaatatggattttctatagatacgtctctgctttttatattcaatgcaactgttaagcgataatgacttctgaaaattacaagaatataaatcatcaatacgattacgaaattaatccgagtgtaccaatattcttatataagtcttagtttttttttggacctctgttttttcttgtccttatgttgtggagtgaatatgactgttgttggtggaataatgaatttgtactgagaaagcaaataaacagttacagttgcagagaaaaaggtcagtgagagtttagatttgctttgatgcctttaaaatctctctttttccgcttaagcttttcctattttctgacttctgtagtactgtacccgtttttttttttttttgtttctttggatttttaacttttcacatttgttttttgcatgtttagtttttttttggttaaattttttactacgtgagttattgaggttttcagcaataggtgcctctaaataatcccatatttttaaaaaacaagactatatttttggggaaataaagttagcgtttaatattcaaatgaaagctcattacttagtgttattttaattgttctttctagtcaaaccgtttttttgtttgttttgtgtgtgttcaaaaggatatttaactgttaaccattataaatgcggaagtaccccctacactcttttccttaactctctctttaactttgctgaatcccatattcgagaaaactctcaaatccatcagtctcctagcaagatcagaagtctaagaatcttcaggcaaatgtctcgactgagaaactcggcacagttgcagctatcgaaaaaggaaagtcttggagacaacggaggcgcgttgaacaccacgcgttcctctagacagaaacaggggaaatacggtttcacgaggaagtgtgggagattggtgaaagaacaaagagctcgcttttacatcatgaggagatgcgtcgttatgcttatttgctggactgatcataataataacaactctgaccactcctaaatcaacgtcaaaaccctatctttctcttctttttcttgcttctgttttgaactttattttaagagtagattagacacaaaatgtacataaatgattctacttctggttgtaatttagatttgaatgtttgtgtttgtgtttgcttttggtcatcactcatcagtttcagtgtatgcacttgaacatgtagaggatagaaagcaattagtataaaatggtgaattagattcgtttttcttattattgtcttacgccgatatgttcagatcacgagttatgacttaaatgtgtcaagactagagtaaagattattaaaatataatcaaaagggttcaaatctaaaaaaaatcaaatgtgattaggattttcgaacatcattgaagtcaatggacaattatggtaacttcgaaatgttctaaaagaataatgttgttatactatagtggattgaacatgcgaagtataaaagattatctttttaaagtaatacaattcaaagaatcttcttctttttagccagaaacaaagattagcttacataaatatgaagacacttattttatacaatggattatgctctggattacgtagtccaacattacatgaaatagctgcctcttaaatactacaagaagaaatattttaaacaagaacacatattcagatttataaaaccactacgtaatatttggtcccgcaatttccattgtaatcactatgaccagattaattattgttcttaataggctaatagctacaataaataaatgattaaataaacagagctggtgctagaacgatggagtttctttaagaaagaatgtcactactgctagagtcctccccatcgagctactgctgaagaagtgatgatattttatagaaaatatgtttctagatagttctcatcaacttatttgtttacatagaggtattttattgttttttttttcacttacaagtgcaaggcaactatcgcgttcaatgatattttccagtagcacaacaattttgggattcgcatttgggaggctagattgaaaagaatgattggtactttaaactatatgttttcgtcatccgattaagtgatttttggtttagcagtttctttagaagagaattatctagttcgagtccacctagaggacccggtattcttaaaaggaatatattaattaaagaatgatcccatgtctacaaaaattaggacttagatctgaatttctcgaacttttttaaaaaaacatgtgaataccttttacatttgtcatttatacatgatacaatcgaaaaaataaattatgtaggtgtatatttgagtgtgttggaatcttttctctttgttcctttgtactacattattcgtgtttttctaatcgtcgagtttctcgatgtagctattgttttacttttgatacttagctttgtggtgacattacgattaattagtaggttttcaaaaaatttaggttttttaacgtttgaccttcaatgatctctttttttttttttaattaagaatctttcaattattctggcaatgattatacagatgaattttgggtgttctatatatatatatgaccactatctcaacatatctgctcacatcagtttttgaattatgtacaactaccatcctaaattatatttttgttattcatgtatatagcacaccacatacaagtttgggactaatcaagtttgacaagaagggtttaaatattcaagtcatgtcgttatttatagtctacaaattttatggattatacctacacctctctatgaagaaattggctgcctttaaacatatagagattcaaatgggtccgatttaattttcctattaaaattttcaatatatggtggatgtttgatcattgcgacggtgaataacacttttttcctaaattgtgtatacttaagaaaagagtaatggcggcattgaacaattataaaaaagatagtatataataagtatatttcaattccactatgtataaagagacaaattaaaatagtttagtcactgattggaaaactagactttatgagccatcccccacaaatcggaagggatctatgataaatgattataaaaaaaaattgattgttcattagcatgcttgattttgatttgtttatcagctctctcttcttagacaacaacacgccgacgatattccgttttgactttcactgttaaattgcactttggggactcttttgtactttaagttcactcctaattattggagattacaaatttacaacttataattttttaaaaagtgacaactgacgtgagatttgtttagtcttaagacaaaaataaataaataagagaacgagcagcatattggccaatagaaatataatgggcctaatgggctaacttctgttgttgctcttcagttaaatagataagacctcttgaaaacatgatgggcctaatgggctacaaatatgaattttagcaccggtccctagagaacaataacacgtgacgtcaaaagcatcggattagagaaagaagaagaagaagaagaagccgattctaggaaaaatccgatactctttggacagtctatggccaccgatctctacggcgatctctttccggttatcacttcgtcactacacatttgcttcttccgttttcgtatcggatcgaatactattcatctttcttcgaatcgggtgagttcgagaatctaaagcttacacctttagttacgattcgtctgctgtttgattttgaattcatatatttgtttatctgcagaactatccattcactcaatttataagattttactgattttgtgttggtgagctgagataatgataaactcactcagaaatgattctacactttagttgatgtaattgtgtatgtgtttatgagtactgaaacgtatctgtttatattccagttatccagtaattgttattttatatgaaaaggtttgttttttatgtgaattaggtttctttgaacctttgaagctatgggtgatgcaatcgatttgagtggagatggtggcgtcttgaaaaagattgtaaggagtgccaaacctgatgctatttcaccctctgatgatcttcctgttgtcgatggtatgttcttaagattgactagtgatcagggtcaatatattgttcatctactgcttatgctactcctaattatatgtgttgatgaaggaccataaccttgtttgattttaacttagttcattatgagggtatcttggctgaagacgaaaaggttttcgacactactcgcgaagacaatcttgttttctcctttgagttaggaacaggcagtgttatccgttcttgggacattgctcttaaaaccatgaaggtttctacaattttgagtctttcttctatccttataatctgaacgcttcagttattatatacaactgatttgattttttttacaggttggagaagttgcaaaaattacatgtaagccagaatatgcttacggaagagccgggtctcctcccgacatcccacctgagtatgttatgttccaaacttcttgcatctcgttcaagggagtgtgacagttttttttttgtttttgtaattgagatttttggtaattgcagtgcaactttgattttcgaggtggaattggttgcttgtagaccgaggaaaggtgctagtgttggaagtgtttctgaagagagagccaggctagagtaagtattataaataccatttggacctaacttttgacttgttatcatgtgtgtaaatatgaaaacttttttgcttcatggttgcagagatctgaagaagcagagagagattgctgcagctgcgaaagaggatgataagaaaaagagagaagaagcaaaagctgctgcagctgctaggattcaagctaagctagacgctaagaaaggtccaggcaaaggaaaaggcaaaggcaaagctaaataagtcgaatgcaaaagacctgtcactactatttcatgatgaatctaaatcaaacttttggaaagggagagtcatcagttacatcatattgagttattgaccattacatgatttgtttggggtttaattcgcacgcacattaataacataaacaagtgttcgaaaccaaacttttcaaaccatgtcggaagcatcatcatcaatctcatcttgttcttgccatcctgaatgagctctaaatttacagacaggacatgttccttgctgtctcaaccatggatcgatacatcctgcatgaaactgagcaaacggatatatgtctgagtcgtgacacagtaaagagctggaagattttcagtttaagataaaagtaaaaatggaaacctgatgcaaacaaggtaaggtgcgaacgatttcccctacggtaacttgttctaggcaaacactacatgtgagctcatcttctgttccttttttactttcattggcagaatctagcatcttctgctttgaataagaggaaaacgacatgaaaaattaagacattgttagccacttagcaagaactttttaccgagcatatgagtattgaccagttcaaatgtgatttttgtatatcggctattttttgtgtgtggggtggggggaaatgtaaatatgtcatatacctcagctgaggatgaggttgacgcttgctttgccaaagagcaaccactgtcaacaaaagcgaacgcaagacaaaaaccatgaatacagattcattcacaataattagaaagaaaacaaaaaggcgttgagctatgaaaactgagaaaagtttcactcagtaacaaattttaaatgttcattccacaataaaactagcgcctgacgattaaccaaagaagtgatgggatcaacggaactcatgattttagaagattctattgaaaaacaaatctttagtaactcaatggacaatcaataccttacatgttccgtttagcaaagcaaacaataaacctaagtacaatatcagtttctaacttattaagttgtatattctaccaccccaccttcccctgttaaggaagttaaggtctatacaagttgctatatcacatcatcctaacttactattttcttaattcctcaatgtttccacatttgaaagcattttaaactgttaaaagagaaacaaggtacaatattgactcacttttcaggatccaacaccttgtacttgtgaactggaagtgcatttatctcttcctcgctcatagaagttgtggaaacattatcagaatcaagtgctcttaaagtttcataatctgttgcagcagaacaacttttgtctcagacttcaaccatagaaagcaaactactaaactatagactaataaaaaggaacaagcggatgatactgacctaagtcatcaaattcccgatcaagaagagccagctggagcctaagtccctgaagacgccctctcgtagcaagagcaatggaaggaggcacatgcaacctcagctcagtatggctaaagaggccacttgctgctgcagcctgagcctgagcatgagcttgaagttgttggcaagtagcatacatcctaagcgtcgttgccatcaaaaacaccccaagcacaagccacagctacaaaattaatggaaatgtcaaactcacacccgaaagacgactaactcaaaaggaaaaaactttaactcacgtatttaatcataccaggaaattaggaggcatctgatgcgaattgagaatcataaacagcaaaagaactgaaatacacaaaccaaacacaagtattaacaacatcacaactgaagataacatagaaggtgaaagtttgaatttacctgtaaccagaaaagcgagggaattagaattaactggtcgagctccatgaacacgctgataccaaaagacacttgcaataagtatcattctaacaaaaaccattgtatatgttttcaagaaagcataccatagctcgtctttcgggtagaaaaccacccgagaatccgctttctaaatctcctctacttccccggaaaacaaagctcatgtcttccaaattcacaagagagcctgcaaaagaaaacaattgccactgaatctatatttggttctatcaaattaattcaaaactctataaactagaattcgagaaaccatgttgatcacagcaataaaggagaggcatttaaaccctatgctgatccaaacaaaacaataacacgaatcttttcacataagccaagagattgaaaatgagaaggtttcattcatggatcaaaaaaattgaacggagctagagatcggaggagaaattcacctgaaagtaggagaaatctctacggagaagagtcggatttactcacttaacataggcgtggtgacgacggagtcacgaaaatcgcttgtcggaccgagtcgactcggaccgagttatcgctaacctgaggatatagtttttgtcttcattaacacagaccattaacttcatatggtttaactgttgctgacgcactagcttaaaaacgtcgtcgttttgatgttgccacttattactttctctcctactctcatgactttatgttatgatgcaataatttcaccacaagaatctgacttaacgttggatatgtttcaaatcgaaattagataaatatggaaaattcacaaattaaccatccaaattagataaaagggacttctccttttatttttattttataaagatttatagtaattcctatccgtatattatttaatttaataatgtattaaagatatatatatatatataatttttttttttttttttataaagatattactatatcccataatgaaaaaccaatatataaagaagttcaatggaacgtaggtttccaaaatccaaaccgtctcacaagtcacaacttccgcctctttcctctctctctctctcttccggtgattcctttagcctatagatcagcggttgatctcaacagagagataagtttgtttttaagagattttgatatctagctagggtttactttggatatttcttcgtctcccctagggcataattactggtgcagatatggattccatgatcaaagatgttgatccttccgtattgttagccaatggctttattcaatcccacttcacgaacttaaatacttccgaagcattagccaattgctttctccaatcttacttcctgaatctaggagtctatcccgaggtagttcagatgatgtggtatgccgacgacagtgttatgactagacccggtcctgatggtacaatgatgtcttttacatcgcctgaggtattgtcattaatcagatcaaatctttctcatgagtttctgtttttagtttgatgttctggttgggagtaattatattttataacaataattcttttagttatatttttaacgttttcaaaacgtataaacttgaaaaaagctgtaaacgatttataaggacaaacaattttttgatggtgcaggcaattcaggagcaaatcgtttcatgcgactatgaaggtgcttcgtttgatgtgatgagttttgctgctcagagttgcaataccagttctgaagatggagcatttatcatggttactggtttcttgacttgtaaagacaaacaagtgaggaggagatttgttcaatctttgtatttagctcgtcgtcaagataggtcttatgccattgtcaatgatttcctccgctatatcgattcaataccagcattaccttctgttcctgaatccggtaaacagctgtataaattgtgtttgatattcaattttagaatagtaagtgtttagcttcatgagattacaaaacttactaacttagttttggtgtgactatatatataagcagattttgcagctggatttgtcaaggtttactacgagttgcctatgcgtgaggaacttggtttgatgtatgtcaatgaaagtattatgagcagaccgacttcgacttctggtagaacaatggtcgagatgcctggcctcgatgtaagttgcaaaagttcctaattccaatgtatttctagagaaattttagtggaataaatctaaggggttagttttttggtgcaggcaatcaacaagagggtctcaaatgagcataagagggcttctaattttatattgaatagtgtggattatcagatcagcagatcctttaaagatagaatgtttatcatggtttgcggtttcgtgactctagacgacaaaacagagagaaagttcttgcaatttttctatgtgacacgttgtcacaatgggtcttatgtcatctacaatgacatcctccgttatgttgatgttacccctcgagacacacttgaaagctcgagccagtccgctgcaaaacctagtactgatgtcgagcttccttacttcatggttaagaaggggaagctactctcttattttaacaacatagacacgcaaaattacccccactaatagtttatgctagtgttgttctttttttaaatgcatttaattttgttcctttatgtcctttttttatatacaaaaccttattcgtctatgttctttttatttgagctttataaatttctttttttctcatagaagaatccttgttctctgttccgagatatttgttctatgagactatgactgaaaaatgatttatctctatttcgtgttgtaatcttgaacttatgcaatgaattgttcaaaatcaggttacgctaaccacaagatttgagaccaacgatcaactcaaaatattaagcaacagcatatgataaaaatattttacattttaacattcagattacttgttttcatggtgaaatattatgcttgaaacgttactaaaacatggttaaaagaaccaattatcttggatcagttcttgttttaccggagaaggaaaatatcgacgaagtagtagtttcattcggtccgctataaaacctagctgaatccacaaaatcttcaaactcgcctgcactaccgctgcgctcatcaagacacatactatcatttgcatctagaaaatccggtgcaggaacaacttcaggcgacggaaactgcttttcgagatacataactacttgtctcattgtaggtcgaacctcgggtgaattatttgagcatagaagccctaatttgatcaccataaccacttcctcttcgtcaaactcaccgttcaatctcctgtccacaacatctctaatgtctccgctttgccaccttgaccaaacccaatcaaccattacaagctcctctggtaacgcacttgtttcgataggtcttcttccgcaagctacttccaataaaaccgctccaaacgcataaacatcggtgcttgttgtcagttttccggattttgtgagttctggtgctaagtacccaaatgtgccaaccactcttgtagcccccggatccgatccatgctcatataacttagcaagaccgaaatctcctacccgtccgttcatttcgctgtccaacaaaacgtttgcagctttaatatcgcggtgaataaccgtttgttcccatccttcgtgtaggtagagtaaaccggaagcaaccccttttatgattttgaatctttgcttccaagtcaagataacttcagggttttcgtcgaacaagtacatgtctaagcttccattaggcatgaaatcatagacaagaagcaaatcatcccgccttcgacaccaaccgagcaactgaacaagattcctatgccggaggtgaccaatgcttgagacctcagacataaattctcgtacaccttgtcttgactcatgagagattctcttgacggctacaaattcgtctgaacccgggagctttcctttgtatactttaccaaacccgccagacccgagaagctctttgtccccaaaaccattagtagctttcttgagctctctgtaagaaaatctatgcggaccaaaatcaagctcccattcttcaactctgtcttcatctttcacctttcttaccacgaacaacgatgcagcgacaagaaccgcgaagatcaaaagggaacacaagagagatactccaagaatcaaactctgtctcttcttcttcctcttcttgattgaactaggaatccgaggaagagatggcaaagacagagaaaatgcttctccactcatgttaaagttccaacctaagatgtaatgtgaactagctagcaaaccggtggaagcagagaatccaacatacatttcatctcccaaaacagaggataggtcaacatcgtaagagagaagagacaactttggtttctctgagaatggagaaagtttaacatctaaccttttcttgtttgaatcgtaatcaatccaagcttgaatcactctaccaccatcaaggaaaagctcctttttggttgagttagcgaggaaatagccagcaggagtcgaaatactcgattccatactgtttatatcgattcctacatggttatcattaatgtcctcaaactccaaatccctgacagtatcgaattccacagcgaagaagtggctagagaagttaactctgcttgaattcaacaggcctaagtactggctaggaagagaacctctgagatctggagttggagtgatggcgaaggcaagtccgtggccaccaagagtaacaaactctggaaccatggcgattgcaaaagacgtggagaaagacagagctcggtttacaccgattggcttgaaccgtattggtaaggagtagaaagcgtgaccaatcacgcgctgtgtctctgttgtgagcctgattgctccagtgggggcgatctctgcaactccgtttaacgttaaatttggtgaggcttttttgaagccaatgaaggagaagtcttgaattagagatgaaactaagtgtgttaagaagatgagtagtaacaagatgacagcaaaggtttgagacatcaagaattgttttcttgggagagaagtaaaaagagtaagggctacttaggtactagggttatagttctaatatatgatctatttggaggataggtcaagaagatggtgaggatacgaaagcatgtgatactgtttataatgttggtgatacaggaacatgttattatttctagactgatgatactttatgatatctaatatttaaacagagaattcaaatctaccattaaactacgattatacgaggttagtacgtaccataattataggttctgggtgttgttaatatcaattgagatcgtcggtattgattagtttaatagataagaaagtacgtataactgtataagtagtaatcaaacgatctaccagtttccacttataattcttttttttcttccgacggatacaactgtattactagaggttatcgggggttgatcatgtttcataatttaatttttcttaacggtataaatgataattttcgcactaaaatttgttaactaaatcaaaactccaaataatctatcttcttttacatctttggattgataagatccgatcgatattcaatcttatggtgactatatttgttttttaaaaatatatttgttttcaataaaaataaattaccctacacaggttaaaatctagttagtgttgtaaatacataattttgttgggtaactccaaaagcattacagtctggacacaattttagtaatgtggttcagcaccaatgacgatatcttggaataagtactatactaaaaccaataactttatatattttcaccattcgataaatattcatcaattagatatgctaagtagctaaagtatcgtcatgactcaagtttttatacagatgtagtattgattgtgtaaatgatccacttgacattgaaaattattggattggaacaaattatcattcagaaacgataagtaagaagaatattcttggataggaagaaaaagtcaattaatcaatcaactaagacactggaaaaacaaaaaagaaatgagataagtctatgttttggattgatgattgacggccaaactaaggataaaagtccttcgagaaaaagggttgttggaaaaaatggttaaaagataataaaagctgaagaaaatggattacgatttccgttgattgtggttgatattgaaatgtaaatagtaggatgatgaaataacgaatattatatactaggaacatgcttaagtaaaaaatttagtgaataatcacaaaattcgaaacttttctatatttcataactcttcattaagcacatagtggagaattatgtcggtcgaaattggctcagtaaactcctcattgtgccggccaacttagaagctgaatccgtaccaaaagatctaaacctaatttaaccacattattttataatcaaacaaaataaatcaatctgaaccaagaaattagatatcctctcctattagcaactcgagcactcggttttgaatattttgtatacaagaagtacagatatatagttacacttaaaccttaaatccgaattagttcttagttttcatatcaataagacaataaccactattccactaataacgaaaatgtaccagagaaatacaaattcagatgagcgaaattttctaaatttactgttttgagttcaaaacaattaaattcgaaaccgggacaaggacaacaatttttcacaaatatcaccttattatgtcacaaaagtagcggtgaacagaaaaacaaatttgtacttagccgttgacatacaaaattgctacggagtttagtcatcatgggaccatatattccgtactcatgtttttttgatataccataaaagggatatttaagaccagagacaatgccaaagatccaaacattttgggaaaaacacagttttgataaatcatgctttttgggaccaaagaaatcaactttgttgaaattcctcagctaacaaacaatgctcactagaagagtaaaacaacaaacacatgtcaatgagaaagcttctctacaagtctcttttaagcacataaaacctcatcaacattaatcctccacaaagctaaaatccggttttgtattgctctattcttatgtcataaggactaagattcaaaatgcagcataaataaactttctattagcaaaatataaagtttcgctacaagtctctaagtacataaacgataaacaacattattcgcccgcaaagctagaatccagtgttgtactctaatcttatgtcaaaagcactaaagattcaaaatgcagaatatttaaactatcttcctgcatatctccttaatgcatacaagctcaagaagaacaaagtaatagagccaaatacaaaaagctaatctaatctaatcagcctcaacaagtaagagtatgaagactgaagagtaaagatctaagaaaggtatcaaacaattaaaagacacagattaacaaacagcagaatatcgaaaagaatcacacttacttaccgacattaagaaaggaatgatagtcgtaattgcttccattgcaaaggccacacaccattgcttggttttttccaacatcaaaattcaaaagacgattctacaatcaattcactttcatacaaagctatccgcgatcaaaatagtcaagtcagaaaagccgccacaaaacaaacaaacaaacactagctaattgtcatccgaattatccgtaaaaaaaaaagaaacttgatagctttaataaacaaaagcctaaccatcctaatggaaaatataatcattccagtaaaaagaacgcaccaaccaccgcctatctaactaatcaatacgaaggaggagcacgaggcggaggaccaccccaatacacgtcgtgttgagccatttgatgaccatttgggataaaattaggaggcatattatacatcggcggctgcatcgatccttcgtttccgttattcccactctcgttatcatcattctcttctttctgcttcttcccatcttctagttgaagcggctgctcttgctgttgttcttcctcaatcggtaacctctcataagtggcattgcaaaacgtagcagctatcacaataacgggtccagaggcaataagcgggccagcaactccacctcccacaacttgaccttgagctccagctaagtaaatggttaaaccagcggctgcagcaggagagccagacgtaggaagaaaagccccacacatagacaagatctcaaactgaccacgtaaactaacaactccaccggatgcagcaggctgacgcagagtaacattagtaaccaaaccactaccgctcagcaccgaaacgccccggccgcgtctacgagcaaaggcgtttaagctttccgccacgtcagctcccgtagcaatctcaagaacatggctctggagagagttagggctttctttggtaacaacaactggactctttggtttgttcttggaaccaggaggtctacctctaggacgacgacccgtagacccggatccggatccgggttcaacagctggttgctcgtctctgctgttctgttcttcttggctctgagtctgggtattagggcttccactgttgttggtggtgaagtcatggtccaatcttggatccgaacgagtcatagtcggtgggttgttgttgttactgtttctgtggtgcaaagaaggagctgatgacgtcactggactctcaactccaccgatcgcaacattccctacccaccaaggattcgccattctttttttcttctctaatggaaataaaacgagaaagagaatctttttctttttcttgttttttttgttgaagttggtgttgatggctctccgacaagaaactattacaagacaggaagagaatccgaaaaccttatcttaaacttttagattaaccaaatccaaaccaacatgttgcatgaagcagacacacaagacatgggggtatcatttgtttgctatcatcatacctgagagagaggaaaaaaaaagaatcagatctacaagaagaacaagaaaacgcacaaaataaattttccttaaagcaatattccccaaaaagctaagatcaaataaggaaaaaaaaccaaataaaatcctccaaaaaaagatacaaaaatcttcccattcgaatataaaaaacttacctttatcataaaaggaacttctttgtctgttttttttttttggcttgctactgaaaaaaggttaaaatcaaaagaagtagaagacagagagagaaagatagacccaacagggttttttttttttggcaggggaggaggattttgtactttgaaagtcatgaagtctttttattattaccgtctctttctatattgtactttggaaaatattgagagcatgcgtacgttaaaaaggactgaaggaaaagaggcgtacgataagggggttgtgatttgatctttcgtgattgaagttctctgaagcggtcctctcttctctctctctctcgaccagagccgtccttttggaccattgaacttttaggtgttcgtgcaaaagtttttgagcgagcttctctagacgcctgtctcttcttccttctctctcactacccctggattgctcacttttgtggacccgtttaaaattactataatacccccaatacctcaattgtcaatttcttggttctggacttctggtattgcaacaagttgtcttttgttttggtttaataatggtgagaaatcaaacgaaaacacaacttgagacaaagacttctaatactataagtttaagctataaacattgtcaactcacactaaattagttgctctttttttttgtcaaagctaaattagtcgtttaattttcgagtttcatcagttataagtttagaactagattaacatgttaaaaacagacaataaaaaaaagatgctgtaacgtttgaaaataatggttactgaaaacgtacatttattgtaagatccaaataagggctgttattttttgaaaattcattaacccatatatgttttggattatatgcaaagagagtggtgtgacatttgactatctgttatgaatgctaaagggataaacccattaccagaaagaaagaaaaaaattgctaaagaatttagagacattgaattcgatgacgacaatttgatgacaaaaacttcacatatataccctatcttgaaatttgatttcccgcttgagaaattggaattttaattccttgtatattttgtttgactatatcaaatactaaaaataatactaataaattaggtttgatgtcaaaaagaaaataatatactactaaaaataatgaatttggttcacttctttaatgaagtgaataaaaaagaaggacaccaccggccccaatggccactagaacggaacgttacattataccatatatttatgtctttttgtcgccttttaaattcatctatttattaatatacctacctctatatctctctcatttatgtatcttctttctcacccaatctagataaaatgccatttaaacacctagcaagaaatccaaacataaatgttcgatttgttaaatccaaacaaataattcatagcacatttcaaaggtagttttatagcaaatgttattccataagaatatgaacaactactatatttgtttatatattagggtacaagtaaagtaattattatttttctcataaagattcttaagtattacatttgaaatgtgctatgaaaagaaaacacgtggaaatcgttggtgttaatagtttgcagatataatatatgcaaggtaaaaaacataaatcaaacaaataaggccacatgagttatatatggactgaagttgatgattgtagttgtagatcagttttatatgagttataaattatattttgttattttatcgtcaacttctttcacaatactgaaaaagttgcaagaagataactcatatcatacataaaatattcatacataatgttttacactaattcaattattattatttggtacactaatatagttcaattattgtttggagcagatttggggttgtgaccaaatttctttactcaggtattcttctatttaatgttttaagggaaatatatgcttatttgattaaatgcctaccaaaaaaaaaaatctctattaattatatgtctatcaaaaaaaatctctattgattaaatacacatgcactcattatctttataaattggcttcttcttccccctcgtaacataatatagagtcatagacagatacaattattaacacaaaaaagaaatggcaaagacaaacttgcttctagctgcaactttacttctgtgcttcatcgttattacttcctttgctccggccagatccgaatctttactcacaggtattaactcaattagatcgattttcacatctatctttttttatttatatataaaaacattgaacacacacgtaagtcttcaaaacaatatttcaaagactaatgatgaacattaaaactaaaacataacaaagatatatatatatatgtgcatgccgcttcccgtagattagttagtacttagtatagaattacactaattctattatgatttttgttgtataaaagggattggaagtgaaggggaaatgtggcacagaggagtgtatgctaaaaggttcgttgtttgctcatgtggattacactagtcccggtgacagaccgccaaagagttggggaagaccaccccatgcgccccaaatctaaaataattgaaattttcaatttgcttatgatgatcttatactgtgatatgttacttattataaaccgacttcattaataaaaatcacaattttattttattttggaccaaaaactatttacatataacaagttaacaacaataaacaacgtacatcatgatttcttggattatctgttaagtttgcgattgaaaccctttagtggtacgtagtcaaatgctagaaactcatttctaataaataatgttagaatcaaattagaaggtacctattatctaagtaattaatgatgtgtccaaaataaaagtagtgttgattaaactaaaaaactcgagatcttaagatgagtcatcgattcatggatcatatcacttgataaaatgaattataattgggttgtataattgcttgtgagttataaactgaaggttgatgatttatagataagttttatactatgaatttaattacaagaaagataagcctattaaaaatagtacaaactcgtgatatggtttgatgtactctcacagattaaaaaaacagacaaaggatgctaaaattggagaaatcactgtctataagatacacatatatattacggtttcaatcttaaataaattaaaatccaaaacgtaaatgaagaactacctaaaaagcctgtgttgttcaagaattgagaaagctaaaaaggagtatcagctttgtttcgtaaagaaatgcttttaacttttcttaattcactaggatataaacgcgtaggtctatttttgcaacttttaataaaattttgtaaatcattgatgggtttggttagagtatgtgctgcttcttgggccctgaaaacccaaaatactttttgttcccatttttaataaaattgcagaaaaaacttggaacagatgagggagaaaaaagcttgaactggtgacactgaagacaattagaccaagaacaaatcgtcctagtgaatcattaagagaattagtctgaaagtttgatatattattatagtcgaaaatcctaaaaattctgaaactcctagtttagactcttaagaccagccttgcggttctgttgtcaccctcaagtagtttctgttctggtttgttcaagagcgatattctaatgaagatatataagactttgaaattgttttcacaaggcgataaattaccacttaacttccttgacccttgttattaactgcttccaaacattgctctacgagactcttgatttacatgtttattacatcatattggtaagcataacatagaccaatttggttatcgccaacacctaagcttagtagtagtaaaaaccttatgcatgagctgattttgtatctttcttcagtttggagttgatggacttttcttgataaagctttggattacgagttgaaatccagagaaaagctccaatagcaaagtcacgcttatgagccaagtcaccataagtagacaaaccgtaatctgctaaaaccctgtcgagcttccactctggcatgtcttggtaatcttctttggagtatcttgggtaatgaagaggcatgcgaaacacactcccttcaccgttcttgccattttcaacatccatatatactgtacaatattattatttgaagaatactctttcctgttctgttcttgcttctggtgtgtaaatatgcatgtgtttatatatgttcttgaggcttatttatataaaggtgttgcaagcggtggtttaactacacacttaacgtgtgagtttttgtcacacggatccgtttgtttaccttcttcattgcctttgttaaacgcatgaacatgtgtaaatggaaacattgttgtgatcataactttggataacactaatcattcacacgtacggatggagtttaaaatgtaaacaaaacttcgattcacatacgttctaaatttattaagaatacagattactgtaaacttatatgcctaaatctatggttttaacttttaagtatatcatgattcatgaggtgttgtactgttgtttttcttcattagcatgaattgaaatttaggtagttcttcatacaaaaagttaaagcaaaattatttttaaaaatttttgtgaatgtgtcatcatactaaatactatgaatttttgtgtttccgtttatgggtatgatttttcttagttaatattacgaaaatatacaaaatcttgaaataaaaatgtaaaacctaattggtttaaagtaaaattttgttaggtttgtattaaagtgtgtacactgtgttgtagggttaatttacagttctcatctacaaataacattctaaagaataaaatcacccataaacccaaacacattgttcttggctaattgcatatgttgttcttcacaaaaagaaaaaaacttaagaaaaaaataagacaaagcagtgatggctaggatcaggttcttgagaggtcccacatggtgactcaaagcctgcgacgtgtcatcacaatcattaaacgaaccccactggctaatttagccgacatatgaaggaccaaaaccacacttctacttccagaaacttcgtcacaaactcttggcttagatttcgtcataaacttagtggttcacattttgccacctgtctgtttagtccccacgtgatttatcctacgtggctactctcgttcctaaataatgatacttttttgttggaaccaaccccaaacttattgatactttcgtaactcgcccctattctttgatccaagtataaactcctttgtcattccttatcaatcattcgtcaatagaattaaggtcgtgtcttaacacactttctaaagggaaagcctatttctggaaatatatttttagataacgttttaacaaaaatggatttgatcaagtgaaaactttggtccacatactccactgagatatttacttggcttacaacatatgtcacaagatatatattccaaagagatattttacttggctcacataattcccaagatatttcatatgttttggttttgttttcgatgaagataagatatttcaaatgcttctccacctaaacccaacaacttttgagaattccaaattctgatcaagatagaaattttttatattgtttttcgaattaattgtttttcatatcactacaaaacaaaaatattatattaattaaagtataaaaaatggtactaatttaaattactcaaaataaatgatacacatatacatggtgttatatcaattacaataattgacactattattgaattgtttgacattgatttaataaaatcggtacaaattcacattaatttgcatctttttcaaaatattattacaacaacatttaaatcactatgttcttaatcgtcttttcgtaataataattaaattttgaggtttttcgtttttttagataagaaaaaaataatgtaaaaaaaattgacgagatcatattttggttgatcacaagtgaggaaaatgaagttattatgtaaagaaggattctataatcgattgaccaacattcctccaaagaaatatattttattttataaaaaaatctaataaataattggaaataaaatcatcattcaccaaactttatactgttttacaaatctacgttttagtcaatttcttccccatacttgacctcatgaagcaatgaacacaaatctatgtttcgattttaccatggaagagggtcttagtgatatgaatttaaatgtcgggataaaatataagattataaaactataaaggtttattttgaaatacagcacacacaagaaaaaaggcccatcaacctcgcagtcctaattagataaatacacgtcaacttctctgggaacaaaaaaactgatattttctgattcgtcgtttcctttctactttcttcttcgtcaggttttcaaaactgagaaaaatgaatggcgagggaaaattggagactggtggaactagcgccgccgccacaccaaaagaggagaaggaagaagaagaagtagtttcccagagagtagtgtacatgtggggttacttacccggagcttcaccgcaacggtctcctctgatgtcaccagtcgaagtaaagattcctccggcagtcgaaagttcatggaaagatgtctctggtggtggatgcggtttcgcaatggctactgcaggtgatagaatgttttcaattgaaaagttcttcacatttcgaatcaatttcataaaatgttatctgatttgaaatcatgagtaattttttgaagttgaatgatatggtttttgttaaaacagagtcagggaagctaattacatggggttctacagatgatctaggtcaaagctacgtcacatctgggaaacacggggttagattttcttaacttaagtgtgaaattttgattttcttttctttgtgaaatttgagttttagttagtttcgattttattggtttataggagactccagagccatttcctcttcctccagaggtttgtgtacagaaagctgaagctggatgggctcattgtgtggcagtaacaggtaacattttcatgagcttacagagacatttgtgtccaagttcatagctttaattgtcttattgaatacagagaatcaacaagtttatacatggggatggagggaatgtatacccactgggagagtcttcggacaagtagatggagattcttgtgaaagaaacatatcgttctcgacagagcaaggtcaaattttctttgattctttcttgtaaatctatcttcttttttaacattgaggatgaatgtgaaggatggtgactctttttgcagtgagttctagttctcaagggaaaaaatctagtggtggaacgtcttctcaagttgaaggtagaggtggaggggagccaacaaagaaaaggaggatttcaccgtcaaagcaagctgctgaaaattcatcacagtctgacaacattgacctctcggcattgccttgccttgtatcgttggccccaggagttaggattgttagtgttgctgctggtggtcgtcatactctagcattatcaggtgagatttttagcttttcacacaccatgtcactaatgaggtacattggttatcaattatgaaaaaaatatcagtggcggtatccattaagctaaagagcttttggtgtgctataataatcacttgatgcatcctaattttttttctgaagtccagatattggacaggtgtggggttggggttatggaggagaaggacagcttggattgggctctcgtgtacgtctagtctcctctcctcatcctattccatgcattgagccttcttcttatggaaaagccaccagttctggtgtaaacatgagttcagtagtgcaatgcggccgagttcttggaagttatgtaaaaaaaattgcatgtggagggcgacacagtgctgtgattacaggtattgttctcaccatattgcttttgtggttagtcatttattttatgattgtttaaatccaaatcactgaaaccaacgcatttcaaccttagataaatctttatactctgtcatcaggatttaggattttgaaatatgatctcatttccgcactatgccttggttaaggttcacttgttagccttctcggggtcctttatataactatgaacagaccccaataattctcgaccctttaacctggaaaagattgacaatttgacatatcttatctgaggatttatcacaagaacaatacttgctttgcatataatacgaatgagtttttttgtggacagatactggagcgctccttacatttggttgggggctttatggacaggtgagcacgatcgatccctggctttatttattacagtatatgcttgaaacttgaatgagttaagattcttgcttccagctgaacacacatgttgaggaaagctaatcatcatagtgttgaactaattctcaaaatgtttttttatatataccaaaacatagattcaacacaggattcaggtttgataaaacatagaattagggaaaaatgctagtctgcatttaaaataagactggaaaagataattgaaactttcatttgttatacatccgcagctaatattttcactttctgttgggtatgtggaagtaattgattttttttatttttgttgctctgtgaagtgtggccaaggaagtacagatgatgaactaagtcctacatgtgtgtcgtctttgttgggaatccgaatagaagaagtggctgcaggtctatggcacacgacctgcgcttcatcggatggtgatgtttatgcgtttggtggaaaccaatttggccagttaggtactggttgtgatcaagctgaggtaaaaaatcttgaactatattgtttccctggctattctagtaaatgctaatctgattatttctagaggccctgccactaaacttgaagtcatttgatctttcagactcttccaaaactattggaggctccaaatttggaaaacgtaaacgtcaaaaccatctcctgcggggctcgccacacagctgtaatcacaggtaacccatttaaccaaagactagattcagtttcatgttagctaggaaagtgattcatcttaaaacttaaaaaaactgctctgtgtttttgtttgttgtagatgaagggagagtattctgctggggatggaacaaatacggacaggtaaaaagagaaagaccatatggagtttctgaattgttattgtcgttccattgaatgacgtagtttgtgtcttgtctgaaacagttgggtataggagatgtgattgacaggaatgcacctgcagaggttagaatcaaagattgcttccccaaaaacattgcatgcggttggtggcatactctgcttctaggccaaccaactctatgaacacatccgaatttttgttagggtttaattagagcaaatgccagatttttcattctttttttttgttcttttgtcaagctttgacctttttctacatacacgtagacctttagtatcgcattgtacatacacaagtcagttttcatttgttaattgtatgagaaaatgaatgtttagcttttattcatccaacttagtattatgcatgaagtatgaacatactatcctatctccataaaagaaatatgtaaatatacgataacgagttaacttattaaaaaaacattaaccaaacatactatcctaacttaaaaataagaataaaagatgagacttgtatttgtatataagcataagtagtataaagttaacccaacatttccggctacaaataaaagtataaaacataaccattcaccaaatgaaattccttggagaaaaacaaggctccatgggccatgtatactcttcttcttcttcttagtcgtcctctagatgctcatacgttcttcatcaacttcttcttcttcactttattatcctcttatatgtgtgtcatagctgtttcagtaaaagacagcaactcaagccgattgaatatatctaaaaactagtaatatgtagtataaaaaaaagattagaagaagaagaagaagattaacgacgataggattggttaagaatgattccagtggaagagagtgctcgcagtacgtgctcttgggttttttgtagctcgccacatgcagagatggtgacaggaccagtgtaacctaaattccgcaacttccgttctatacactcacggatctgaccagcaatccagcatcatacccactaggatccggaaagctgtccatgtcccaccataccgacgttttagcctccgcctcctccttgcttagcgccttcttcggcagcattatcaaaattggacatataatctcaataatcttcgatacgtagcagttaaggcatttagggtttctttcaacttttaactatatacacgaaacttataggcatagccgcataggcctatttatttctattatatatgttctttttttttgccttaatacagttgacaatgtttaattttttgtaacattaattacaataattagataatcttgtaaagatgaatagaagataattcatattttcactaatagtagaaaatattttacttttatattttggtttaatgaaattatcaagttttgtaacatctgttttaccaaaatttctaaaaaaataagagttacacagctagtcagtagatcctttaatcctcccaaaatcgcctcttcatctcagggcttagtttatcgacgatcctgtgagatctcgtataggtaaatatgactttctcttctcttcacggtaacgactaacgagcacgaatctaatccgtttccttgacttgtggtgcatatgattttatttctggagtggttttgtgcgatttgtctgtattgatttgttttggcctacgtaatttgggtcttcgtttctagggttgtggattagggttatgcgtttaaaaccttttcagtgatgattgttattttcctaaatgtttattttctttagttgtgagctttgtcttaatctggacttgcctacaagaatttacattactgccgtgacatgttctcacaatagatgcatgttgttgtgattttctctgctttttctcttgactatgttctctacaggaaaagggaagttagtagtgcatcaagatgaaagctcttattcttgttggaggttttggcactcgcttgagaccattgactctcagtctcccaaagccgcttgtcgatttcgctaataaacctatgattctacatcaggtactatgttctttaattaattgattttgtaattgtggttcttcttgctatagtgtcatggtcttatttttgtattttgttgtttatgagctatatgctcttttaagtgatgggaaatgttgttgcagatagaggcactaaaggcaattggagtggatgaagtcgtcttggccattaactacgagccagaggtaaaaagacttcaagtctttaaaactttcctttggaaagctatatttgatttttttaatagaagatcttaaaatattgttcaatgttgaataatcattcagcaactgctagtgatgtccaaattctcaaacgacgttgaggcaactctcgggatcaagatcacctgctcacaagagactgagcctttaggtacagctggtcctttggctttagccagggacaaactggttgatggctctggccaaccattctttgtccttaacagcgatgttattagcgactacccgcttgaagagatgattgcttttcacaatgctcatggaggagaggcctctataatggtgacaaaggtaaattatttttgatgaaacctttaagcatttgtgttcatgttttttttactcattatgatataattggtttaaaaggtagatgagccttcgaaatatggagttgttgttatggaagaagccacagggagagtggaaagattcgtcgaaaaaccgaaactatttgttggtaacaagatcaatgctgggatttatcttctaaatccttcagttcttgatcggattgagctaagaccaacatcaatagagaaagagatcttccctcaaatcgcagaagcggaaaagctctatgcaatgctacttcccggattctggatggacattggtcaaccacgagactacattactggtctaagactttacttagactctctgaggaagaaatctccttcaaagttagccactggtccacacattttgggaaatgttcttgtggatgaaaccgcagagattggtgaaggatgtttgattggccctaacgttgctataggccctggctgtgttgttgagtccggggttagactatcgcactgcacggtaatgcgtggggtacacgtgaagagatatgcgtgtatctcgagtagtatcattgggtggcactcgacggtcggacaatgggctcgggtcgagaacatgtccatacttgggaaaaatgtttacgtgtgcgatgagatatattgtaatggaggggttgtgttgcataacaaagagatcaaatcagacatcttgaaaccagatatagtgatgtgatgacaatttggttgatttgtccgtatttttcatttttttgtgcgaatacgatttctaatttaaagtcatgaaaaagtaaaattttcaatgttttataagagtctagctcctagtaagcctttcgacaagtttcctaagaatatcaaagacgctcttgagattgaaggttatattagtgatgtgtcaatcttgacatatgatgctgggaatatatgttgtttgaagttagatctaattaatttatgtgtgtctcttgagttaaaagatgtttgatctaagtgaaatcatgagaagaggtcgtgatcttgttcctcctttttgtacgtgccatggccttggtcgtgattctgaatttttcttaggtacattgctgacaattgaaggtcaggatgtagcaaatcaatgtatcatgcgatttggattacttaagaagtaaaagagatatcagtctcagcgagcagataaaacttttgttcaaaatgatccacagagcagacgtacgatttaatctttcaattaatcatacaaatactaggaaatgagaaatcattagcagagattataaaacctagggcattgatgggaaagggattaaaacagcaaaacactaaacagagtttaagagaacaaaaaccaaagtcttttggacagaagagattataaaagtgaaaaccacacgccctagcatagccttccccgcggtaagctcccaagcagtgggaggagccctgggcacccttctccacaatatggacaaggagtatcgtcgccctcgtcatcttcttcggatctgaaagtctcttgtttgacacgagatattaggctacgtaattggatccaataggctttcccaaaaccatacagtgtttacatacggaatttgcggcgcttctggtgaccagtcattagccacaactaagataacattgtaactcataaacatccaacaaactaagatgttcttcgaacttggtctctcctgggatgcttttggcgattaccatcagatttgtagatgtataatggggagcaggattttccactgaccaaaatgcaatttccactaacatcttgtttagtctctcactcttaccccctaaaaaaatgtatatatcagttatcaactaacatgtaaaattgcactgcacatacatatatatatatatatatatatatataatatgtaataaaaaagaactagggtttaagtaaaggacaatcacttttgggttcgaagtcgattacatcatccagactgtcaggtttcttctcaccataagcagtgattgacacctcaccatgataacctacaaatcacagagatcgagatctctgggcatggtggtttcgacggagatcgagaaaacagaaaattagatttagaagtaagaggcctatcaatgttttacatttaagcacagtaaacatttaaagcccagcctagcccattaagaggtaaatctaatttgctacgaattcggttgttaattattaaaccatcggtttagttcatcaaacgcaaaccaaagccaataaccgaataatttctcgagaaaaaataatgactttccggtgaagatttttttttacgacggcttctcctgacaacggaaggtgttgagaaagtggcggaatttgattttgtttcctctcctctcctatctaaacaaggtctgttttcgtgagatccagatattcaatttggattcaaaatcgtgaattgggttttggattgatttctgttactggtctgtgtgctttgatctgaatgttgtttcattctctagttgtcagatttactgatgatgggaataagcaaaacggagatcaatttgcggagattgctttccgctgcacctaaccagcaaaatcagtcgaagctt
